United States Patent Application Publication US 2018/0305689 A1 - sequence listing, part 66

SEQ ID NO: 916357 - DNA, 4001 bp, Homo sapiens
gagaacaggcagaggtttattttccagggttggctgagtgctacagccaagatctgaaccaaagcagtgtggttacagggaccatggtcttaatcattaggtgagacttcctaacacactttgtggttacagatgaaagccctggacatgatcactttggctgcacgggaagcatcctcccagagtggtgctctgcgccacattcccctatgtgccaccaacagtaataaaatataataaaaacaatcaaataaacacagcacagacagaagcagacctctgcccaggtaacttccaccacaattcccttaccaaagacctctttccttattttgctaagattaacaactgatttttcagtactatgccaacaacatttcttctcaagctttgctgtcaattccattgtgacccacagtttaatttaaaaccgatgttgattcactgagctagtaattttattcggtaataggtgaattactccatagttgagtgtgaataaccgcctggttaaatcagggcgggtttcttagaggtgatacacttaccgttgagcacaactttactctttaattatcgtgtacattcccatttccctccaaacacgtcagtccctctccacacagtgtttacttctttggtcctagggacagcaagaaacattttataataaaagagcacatgctaatgtgtttactagatatgacactgctgtgcaaaactgttttcttttatggctgcactgaaagcatgctaagtttactgaattcttattaagtgtcctaagtaacagaaatagaaactaggtctggcctgaaaataccattcacttaagttagaatttatgtgcgctcctctaggtccgctattgtagtatcactgcaaaacaataatactttatctctgcacttgtctttattggattaatattaaacagaaaaaaatccgactgcacaggggaaaaaacctaaaaccttaacatgcatgcacattaacagtgactgaaacatgattaaagctaacacatttagcagaaaaatgcaatccccaaacaagctctgcggcccgcctactgaaatgcacccgcccgccactaaatgaaaatgcgcctcaagctcatacacatccttatgttaagacagtatgcactcgatgtactacaaataaattgttttcacggaaatgattccccgaaagtttgctgctgaactcaggaccctaaggacgtttgcttagggaatccgtgtccctcgagaacacctaagatgggtatgcgtttgtgcatttaaaaatgcctcaaggaactattgctgaggaacagaaaccatcgccggcgcagaagcgttcgcggaccacttggagatagatgccagtacagcaattctgttccaggaggcttcggcttaagagggccggggaggaggagaaccctcgggaaatagcaaaaaaaaaaaaagatttttctttttcactccagcgacaggaaagccttaaaaacataagcagctctcatacccacccgcctcaccagccgcgcctcgcagttcgacaaaatgcgtcctagccttcgccactcgcgacctctaccgcgcagagccaggcaatgagggaaaacagccagcgaggcccgccctccggtgcaaggctcggcatccgcggaggcccagggccggccccggtgcggcgggcagaagcaagcgcggcggcccggcccagctccggtgggcggacggcgggacgcgcgagccggcggggcccgaggcccgggttccggggccgcccgcgactgcgtctttgccgcagaacaaaagcgctctgcgccgcgcgcaggcccggaccgcgagtgcctctggctcccggctcccggcccccgccccgcccggaccccggaaggcggagggacctcggggtgctcgtctcacacttaccgacaaagggaagaggaccaccccggcaagcggggagaaaaccggcggcctcccgggccccagagtttaagtcaagtggggtccgcctccaggggcgggtcgaggagccaggcccaggatccaggaacagctacgctccgcctcacgcccgaggcggtggctgcgagggccgcgccgccgcggtcctagtgccaccagagaagccgcggacccggcccgcagataacacccgggcttgcagagcgctttcatctgcccgacgcggaaatctcctgcagcgatcttctaccttcagcgtgcatccgcagcacccagagggcacgttaaagagagattgagaaccaccagcaaaactgctgattcagtaggtttggggtggggctgaaaaatgtgcatttctaacaagttcctgagaccgactgttgctgctggcctcaggaccaattttttctataaagcgcatggaagtcagagtgcacccaagagattgttaacccttaaaaaacagaaaaaaaaaaaagaaatcaacaagttagaggcaaataagtgtgaaagaaagtggatagtctatttggggattctgaaagtccctgaggaaagttgactttggagaccagatcacgaagcacgacctcttaattgccgaccttttgttatagattaactcccttattttcttgttcccagctcagaccagatggcatctgagataaaatacgcattgaataagataaatgaccgcttgactattacatccttaatgtggaatgttaaatagacccttcccaaaaagaaacactgccttgaaccaatcaaattgctatgcgttaaccttctatggaaaatgttgacatcctgttaagcttcccagaccctgcctgtgtaaacgaccctcaaacttctccctttcgaagcactgacccccatcttttggagtctgtgtcctaccgggtcgccatcctcaaactttgcactcaaataaaccaatatttaatcatattgcccgaatctcattattaaggtttacgtaagcgtttacttagtaatgaaggttgcaaccaggatggcaaatcagagattgtgccactggagaggggcaagggagcttatgtttataggaatttatttgttacataaattgtcagattagttcattggtgaattaaacgaagaagtctttagtcattactagaagagtgcgtttgcgtctgtcagaaacaaaacaaaaaaactacatacagaatattctttcttttttgggggggggacggagtcacgctctgtcgcccaggctggagtgcagtggcacgatctcggctcactgcaagctccgcctcccaggttcacgccattctgctgcctcagcctcccaagtagctgggactacaggcgcccgccaccatgcccggctaattttttgtattttagtagagacggggtttcaccatgttagccaggatggtctcgatctcctgacctcttgatccgcccgccttagcctcccaaagtgctgggattacaggcatgagccaccgcgcccggccagaatattcttaaagattgggggtggccaggtgtggtggctcaggcctgtaaccccagcactttgtgtcacgcgcatccgtgtgaagagaccaccaaacaagctttgcgtgagcaacaagactgtttatttcacctgggtgcaggcgggctgagtccgaaaagagagtcagcaaagggtggtgggattatctttaattcttataggttttgggagaggctccgcggaacaatgttttgcgggcagggggtggatctcacaaagtacattctcaagggtggggagaattacaaagaaccttcttaagggtgggggagattacaaagaaccttcttaagggtggggagaattacaaagaaccttcttaagggtgggggagattacaaaatacattgatctgttaggatggggcagaaacaaatcacaatggtggaatgtcatcagttaaggctattttcgcttcttttgtggatcttcagttgcttcaggccatctggatgtatacgtgcaggtcacaggggatatgatgg

SEQ ID NO: 916358 - DNA, 4001 bp, Homo sapiens
accttcttcactttccttgatcagatctcctaacaaaattgcctcttattgggttttctgtctttttccttcccctttctccaccctggtgcagtcattaactggtattaaagggccaaaagagaggtagtagcagtgaataggagaaacagactaatctaacaattggataagtagccctagaataacgaagaaggcctaattaaaacttcaaaagccttataacaggtgattctaaccagtcataaaactgtcacctccctgggtggtaaaaaaaaaaaaaaaaaaaacacttaaaaactcattttattatttaagttaattaaagatacaaagtatacgaaacagccattactatgcctgacccaagatgtgtcactaaaatagtaactatagaaatgtttagaggggagaatttttagaataattttctggaaagactacaagactgggagattgttaatagttcctaattccttggagtgtagattatttttataatccttaaagcataaataaggagaagtgaattaacagtagactctcagagctgtgaaagccacgcacttactctaggatgaatgcttcattaatttttcacacagtgtgatgatgttgcaattttccatgagcaactatcagagctttccttcttgataagtatcaaaacagccgaaattacatcgaatactcgtgcctgtcattggccgaaatataatttcaatactaggatgtacctagtatttccagactcacaccctggcctgggtaacgttacgattacattgtatccaccctgcctaatgtcagtatgtttcacacagtcacccatttcacccttcctctggctaaagagttttcctccttctgtagacctctccccagtggattttaccttaaattccactcccattccaacacccaagaggctagatctgtctcctctacccacacgcgggggcatgtctagatccccgtgatgctgaaaaagatgtctcatttgcacagacatcagaacccgagtgggcgcgcggcgggccctgcggtcgccggcgctgatagtcagatgctttgtctcctgcctgggaaggccggagctgcatggacacgtatgacagacattctagaactaataaaaaagaacaccacagccccgcgcacaggcagctcctcccggacaggcgatagcccaaggcggccagacctgaggtgactgatcccgcgaggggacggaggggagtgacgagggcttttcccccagagaagtcaagacgccccccagggacccggcgccgcgcagccgccagccacctgcaaacacagacggcgtgagggcggcgcagtcgccctgccagcacccggccgcgcgtgccaggccagcggggactcactgcctcagtttcctcagccgcagaacccggccgggacgcccctcaggtcgctccaccccggtagccggtgctccgcgccacagccaggtccttgccgcgccctcaacccgccgcccgccgcccgccgccggcagactgtcctcacctgacagccacccgcacggagctctcgtccggggcgcccaacatgctggcggcgggcagcgatcgagccgttgggcctcggcaccgcagagctgaggcgccactggggccgcgggactcgggcgcagtaggctggggcgtctgcgggcgggcggccggctcacctccgccgcgctccagccatgttgggcgactgaatggaaaggtggcggcggcgctgaggcagcaagaggaggaggtgattcacggctcgcgggcgcccgccccttctccaccgctcaccccccaggatctggggcggggacaaagcgcgcttgaacggcgagcgcgcctgtggagaagccaacaggccgccagcggcctcagggcggccgggtgagtgcgccctgccccctccggtggggacgcggcctcccagcggccaggctggggactccacgcccgccagggcgctccgggctcctcgccccgcactgcgtcagccgccgccgcgcggctcagccccacctcgccctcccccagcctgcgccccgccctgccctcgtcgggacactgcctggcgctgctgggcagggaggcgagggggagggatgcctgccgccggctgccctcgcccgagggcgaccagcctgtgcgcccttccaggctcttctgggagaaggaagcagctagtgcacgcgctgctgccaggtcccttctcaaatcgaagcttgattcagcggcgcgccgggagccaggcagctgctgctgcggttcggctttgtgtcccacgcatagccttattgtcctctctgcagcttggactttgacccccttccctagcccccagctgaacgccctccctcctccctccccggagtcagtcattcatgctaaacggactcccaggtttgtccactgtctctggacagctgggctgttctacagttcatcgcccgtttaccagctcgggtgggatatggaaatgatttattcgagactcctgaatgcttttctgttcaatcatttgtacactggtaaatgaactgcaccctggtactgccaagtgttcccagaactgaatatatccaccaagacctgctgtgtagtaaatccttccaaactgattttctttcccttctggcctttaaaaagcacctcccaatcccaggattctctcaacattgacccattgtggtttctgtttgtcactattgtgcttccacatgccttcagatagctctgtggaaacagcctttattagctttgccacagagtatcttttgtggactgctccatacatctctataaacaaacatgtggcttcatacgaaatagtatcacaaattaaatggcactatccaaataaaggcactacctcaaatgcctgcaatctacaatcacatacctaatcatcttgttcagcagtgatacagcagtgtggctcagagaaggctgcaacactatgggaaaaacaagaagtgtttgatgatttaaacccatgggaaggccgatggggtatataattatagatagttttaaatttattctgtcccttaatctcactacccctaaatcttaacagacatgtaactgggaggtaaagagggcagagatgctgagtatccttctatagatcaaattggtgggaaagctctcctctggctactctttggagggcctttcctagcctcaaaatttatccatcaacaaatcagagctgcatttcaccctgccctggcaagcccatatctgggtggatctgggctggccaccttgcttcttttgttgatgaaagctgcaaggaaagcaagaatggcccagcacatttaacaagaaaactaaagagaaatttgtataattaagaccctctttttaaaaaaagttcttttttattttattttattttgagacaaagtcttgctctgtcaccaggctggagtgcagtggcgtgatctcggctcactgtaacctctgcctcccgggttcaagcgattcttctgcctcagcctcctgagtagctgggactacaggcgtgtgccaccatgcccagctaatttttgtatttttagtagagacagagtttcaccgtattggccaggctggtcttgaactcctgaccttgtgatccacccgcctcggcctcccaaagtgctgggattacaggcatgagccaccacacccagcctattttattttttgagacagtgtctcgctctgtcatccaggctggaatgcaatggtgtgatctcagctcactgcgacatcgacatcctcctccggggttcaagggattctcgtgcctcagcctccggagtagctgggatttcaggcatgtgccaacacatccaggtaatttttgtatttttagtagagatgggatttcaccatgtttaccaggctggtctcaaactcctgacctcaagtgatccgcccacctcagcctcccaaagtgctgggattacaggcatgagctacctcacctgg

SEQ ID NO: 916359 - DNA, 4001 bp, Homo sapiens
gaggggtcctccagagttgatccaggagttgttttgtggttgttttgttttgttttgttttgtttttagcccagccagactgaacagactgcagggccagcgaggtccctgaagcaaaaagaaacagaggccctctccatgtggcaaatacatacacagagagagagagagagagagagagagagagagagaccaaaagcatccatttgagttaacagtgtgggtaagggtgcaaggtggtgacagactggggcccttggggactggtaagcaggtctcccccgaagcatgtttattcaaagtcccattctcactgactcagaaggcccaggcttcctccccttctttccttcattcctttaacaagcctgtgtccaggtgctctgtgccaagcactgtggataaagatacataagaagcacctctgaccttgactgccctcgtacatgcccctccctcctcaagctagtttttgtttcctggcccagcacccctcaagccctacaggactcgaccccagatcttttctccccacacacagcctgaggtccctaccaacctcagggggagtgggcaaggcctagaatttccctttgggccattacagataaaggtgcagaacagaaacctgggtaggcaatgtgatagaagagatgggaggtttgcagtcacagatttaggttcagatccatggatgaatagcatgaccttgagaaagttattcaagttctttgggcctcaatttctgcatctgtaaaatggaaatattgatactacttctgaatgttgttttgggggttaaataatatacgtagagtaacaggcccactgttaatattagttcccttaagatatcctccttgggtagggctgtcatgatgaggtagagctggatggctactttctattggatcctcaagagaaaggatgaataagcaggtactgactaggatctcagggtttgggcatttttctttaggggggtcagttggggaatctgaaaccctcttcctactgtacctgggaccaaaaggcagacctgaccttaggattccagaggctccccccaagattgggtgtggcatcaatgatttctttcccagtaaaccctgcatcagacctactccccacaacacacacacaaaaatccaggctataactactttagggaatgatggaaggtttggtcttagagcccacttccatccacactctgcagagaccctggactgctcacctcccatctaatccacccaaaagtcttccgccttaccttccgggaggtgggggtagagatctgagccaataacaaagggaagatgcgctttctcttggggagcgggtggtggagaaggggaaaacatcagaaaaacatgggactggttctaacgggtggagacgctgcagacagcagcaaaggggagttggatctcccgaaggtaggaaagcagccccctgccactctgcagagactcggccgctggcctggccaggccacacccagccatcctgatgcaggggagaggaggggctgcggggaagaggatgaaggatgagcggcggggagggggagcaaagggaccagcagagactaaggctctgcggggggcggggagattcagccacctgccccctccccgaattccctcctgggcgacactcaccccaataacgacgctgtcgtccccttggaaaatggggatgaacttgtctccccgcagaatctcagcctggttcaggggccggaatcggcagagcaccttgatgctacattcgttgttggtctccgccatggtggtagccggcgtggggctgggactcttcttgggctgcaggggtggtgtgtgctccagaggagagggctctcagcagaggccgaggcggaggacaggtgctcagtctctggggacagagttgagggcgcccgggcgaagcctggggagcagggccggggcgcgctgtctctctcctgcggcagcgggatgcgggcgacctgggcgtctggtcctttcgggctctctgcctctccgcccctcgcgctgcagcgccgcgctgcgggcctgggcggggccgcgatggaggagcgggggcggggctccctccactggggacgctggctcgacgtcgacccccgaagggtggaacctcaccgctcctctcctccctcccccacccctaacgttcggagataaccttgccctcgacccttccccacccaactcactgcatcccacccctatacccccgacctgtttgtccctccctcagactccaccccctggaagggataaggggactgaggtgggcctgtcgcctgtgtagcgaaaagggtcaacagatctccctctccctttattccagggcatcccccaacccgtcacagtcctctctccaaactgggatcacacttctcattctccccctacgcccatcccatgccccacatgcacggaagctggactcccaacccactcagctttctggggggacccctgcctgtactcctatgaagttgggtgtcgtgggaggttctggctactcccttccccttccacatccaaaggtgcactatactgtctccccaacgtacacaccaggtccccagtttcagggaagataaactcccattctgggttatgggaattcaaaagcagatacaatacttatttttgtgtcctaggctgaggatgggaggaagatgggtgggaaacatctttgcaagagaaagggagtcagaaagcagtgaaggaggggcaatgatggggatgggtaaggccagagagactttgaagtctgaggcaaagccggcatttgggtttcaggcaaattcagatacctacgggagtgtgtgttttctgtctcagtaaccattggaggatagagtcccaatacttcagcccccttccctggccaaaaaaaaaaaggtgtgggggaagaaaaacgaaagaaatgccaagcccagagattccttgtccttccttcctttgggtcagactcctgctgcagcccctggaaagaaccaccaagaagctggccaaattgatttttctccatgtcacaggcctctgctggccaacagagagttggactgcaggagttgaggttctaggcaaagaggaagggcagggtggatgggagaaggaggaggaaaggaaagttctgctcagcaactgtctggtgagtggttaaggtcacttaagacactatgggacaaaagtaagaggctgatagcctggccagacaagacctaactattcagaactcagggggtttcccacattggggctacacctctaacctaccttgaatcttaagggaactgaaagaaaagagtccaacataaggaatgggacaggaaagctgtaggactatggagaaagggatagaggcttggggaggagccaggagaaagaaagacaacgagttccgaactcaggaactctctagtcacttggtttggcacaatttctaagtgttgcagcatcctgcaagctcaggaaacatcctgggaaacatcccatccttgggtccccaggggctccaaggtggcatctttagtaaaggggtttcaaaatgccagtccatggagggtcactggtcagagacaaaagttcactgagtatgccctcacctccaaaagaacaatggtgagtttttttttaatataaagatggatttgataagtttcaaaggactatcttttattctgagtgtgtccttcttgcttttctaccaagtaatgatggtgacagtaaataataggttttctatttgtaatatacttacttgataaaataaaaaggcaaatcttcaaggtttgtagttgttttaattttattgaacgatgaaatttaaaagtctgagaacggaaggtaaggttggtgaataggtacaaaaaattagaaagtataataagacctactatttgatggcacaatagggtgactatagtcaagaataactcaactgtacattttaaaataacttaaagagtaattgga

SEQ ID NO: 916360 - DNA, 4001 bp, Homo sapiens
cagtcacaatgtttcagactagattgacctctttctagttttcaatggaattattccatgtaatccgatttacacagccatttaatcaaagcgagaaaggagattacagagctcacatttgttttgcaaagcaagggtgcaaggataatcaatcctactgcctctcaaagtgacttgatagtacatcccctggctttggagtgttggacattaaccttatctgtctcctgtgttcttgtttaaataggaaggtttaggctcttttcctgaactagaaggtagcagcttcttcccccagatctcaccaccatccatgggagcagatgctactataagaaggaataggtctctacccttcttataatttcgcagaaagcttgtctaaatcaagagattacaataaaacttttcttttgttgcaagaatctttaacatttgcatttcgacagcacgctgtggtgattccaggtgcggtgctcaatgccttgcctgaaagctaacctgcttgtaagagaggggagaggcacatcgcgtcttttctcttagagagtgctctagagactatgcaagcctcttttagccaggcaatgtccctttcccctgccttttaccacaccggtacaaggggctagagtcttgcaactttttgcaggcctagatatctgtttaaaatatgatgctaagcaggtcatttgataaagcattttgagcacattgatgccttcattctacaccaacgatgtgtacaaacaccccggtttcctttttccccaccacttccaccccttccacacatttcaggaactgcaatctccaacagaacctctggggggtgaaagggcaacccttagccaaccgcggcagataacacataacaatttctaagggggaaagtgagaggaggtaacaatcaacaatggtgaagagaactgtggataggggcaccgtggcggccctttctaaacgaagaaccaggtattttcttcaagggaaaaaaaaatctaattgtccccccaggcagcgctttacccacagtgctttatgtataatgcagaatttagcagcactgggaattatctcaatcactatcattcagaggtgcctattttataaaaagcctttatcccttttgaaatggaaaaaggtgcgtgcattgtggaggtactagagctctttagagcccacacagagctgcaaactaggcagacaccgccgagagccaagtttcccgggcaggcgggcaggttcccgccccgccgagagctgccgcttaggagttccgcgttggcttcgctcccgcggctgcacccgcgttcgcgccgctcctggtgcccggcgcccacctcggggctacacaaataaatctgagtgagagagctagtgagggtggcgcgtggggtgctgtttcataatctcctggaatccacgggaaaaccgtctcctatgcaaagacatgccttcccgtgataacttaacattccatggcccaaaagccaatctttccaccagacgggaattacggtttccgactgacagctcaaaacttaactgctgaggctccaaacttgacactggctccctctcagcactcccactccttttctccctggctcacccggctcggctcgggatcacacaccacgccggcctcccccgcatcctcttgtctcacccggcaggcacagccctgcacgccccagctgcaagtcccagggagcgccggcttccccggggcaccgggcgcgatttttcctggagagcctgggagctcccgggcgcgccctactcacttgtgtcttcttcataaggaaaggcagcgctgcgatccagcacaaacagtggtgtggcgactccgtttagctgttctggagctccagcatattgcacgaacagcggcggcagatagtccacgcattgggtagcccgagcgcagcgccctctccactgtccctgcttcccgcagcgcttctagtctcggcgcgaggcggcgagcgaagcccggctgctgagccgccggcgcttttatacagttcccgcccgcctgctccggacacgcctccttcccttccggagcccggggtaggcgagaagcaggcaagggcgcggagggaagaatcgggagggcggccagagcacggtaaatgccccagaagtttggcagattaggccaaccttgtccgctcgcctgggggccccggacctgcactggcgggagaccgcgaaggcgcggggacgcagagggcgaagcttggtaccctgcagctactgctcgcgaggagtcccagcttaccctcccggatccgctggggctcacctggcacccccggggacagacgaaatacctcgcgcgccagagagggctcggagctccctctgttatacaaagtcggagagggagaggagtccgggaggttcggagcaaagaattcaccctgcctgccttagagaaataaagtttaattgcgatctgtagttaggccattgtcctatcacctctattttttaaaaaaaacaattactttagtgaatgaatatttaataattacaagaattgttgactcaaggttaagtattgcaaggggagacgcttcatttggaatggtttgttactgtgtctttagaaattaagattgaaagagaagcgatagattattaaactacaggtcgccaacacagcaaggctttgaaagttgtacttttttgaacggaaagataatgcaaccacaataataatagctaacatcattatgtgatgcacttattcatgtgccaggtgccagactaagaacttcgcatagattatctcattaaattctttcatcaaatctattagtgtagatcttattattttattcccattttatggacgatgaaatacaaggttaattttcttgaccaaccatatctagtaaatggcagagctctaatttaaacctggagctccagctgtacagtcttaaaaaatacttcaaatattttattgattctccagaatgtgtctgtttttgtttgtataactggagaacattccaaagcatttcattaattttttaaaagaaaatattagctgaacattaacatcagtgatctttaaaagaaagaataatgtatgagtttaggaattagttattttaataatagagtaggagtccaaatttgctttaattagttccggtgcgtttgttaaacatgaatatgccaaacctgtaatcagggcgaagcttgtttatttcactccagatgtgctgacttctgtgatttccccaaatgtgggaaactcgactgcataatttagtgggggactgcgttctcactttctcatgttagaaaaaatatgtatagacagcacatcaatcatgattccaagttgatagttgcttagaaagatttttatacattaggtactcttagtacaaatatatcgaacatcaaatatcaaaatgagcttaatttggatactggaggcatagcaaatgattgttttttttttcttcaagatttatttttattttttattttttagatggaatctcgctctgtctcccaggctgaagtgcaatgacgcaatctcggctcaatgcagcctccgcctcccaggtttaagcgattatcccgcctcagtctcacaagtagctgggattacaggtgcccaccaccacgcccaggtatttttgttgttgttgttgttgttttagtagagacggggtttcaccattttggccaggctggtctcgaactcctgacctcaggtgatccgcctgcctcagccttccaaagtgctgggattacaggcgtgagccactgcacccggcccctttaaggcttttttgaagtggagaattttattttttttctccagctttattaagttatatttgacaaaaatagtatctatttaccacgtacaatgtgatgttctgcttatgtatacattgtgaaattattaaatcaggctaaatagtatatccatcacctcacatactcatcatttttgggagctg

SEQ ID NO: 916361 - DNA, 4001 bp, Homo sapiens
cgaggaggaccctcgagtcaaataaacagatatataaaggattctctgttactgttaagactttctttgcccagctgtgagctccccaactccttgctccacacttcaggaccaggaccctgtgaggattgagatggaaacacgtggatgggaagaaagggtattttcatcctttcttgagttacattgattcttttccctgcttctgaatgacgctgaggcctcctaggcgctaccatctttatttcctaccatctcttcctgtatatgctctttgctcttgttttgatattccttccctggttcctttcccttctcccctctcatcccactcctcaagctcctcctcttcctttcttcaagtcacccttgttggaggcaggagagatttgcaggatgggagggggagaaggttgcgtaaatgaaaatattccaattctgtagttgaacacttccaggctcaagctgtgggtcatgacgatggctgtccagggaaggaagcaaaagagaggataaaaaataagaaaagcaacccctattgcaaacgttaatacatttccagtgattatctcttgatcatgatgggtatcacagtgtggaagactctgttgtcacagtcactgacatcagaaaaaaatcccccaaagtcagtgttacaggttactgtccagtgtatcattatcatcaggatcaaatcctaaaaactaagacaaattttttaaaaattaaggggcaattttcttttaaagtattcttgtaggaaaccacaacatcttttttcacaagaacagaggcaaagaaagcagtttcacctaaaggcacaatacctgccaaaaaaccactccacttcttgacctcactggggacgtcctcttcgcaatttcttagttcattgggaattttgccagcgccaaggccaacaacattcctgaagatgtcatttccaccacagcacaccctcccctatttactggctcagtaaacactggggtaatgaactaatgaacaagtgaatgaatgagaaggcagcagcactctgccggggtgcttacctcttctggttcatggaggccacctggagccactcgttggtgctggggttgtaggaatgcgcagcggagatctcctggctagtgatcctgtacccgcccactatgaagaggtagttgtccaggatggcagacccatagcccctgacattgaccaggtcgggaggaaggttgttggccagcgggaaccaacgctcagtcatctcctcgtacctgagcatggacgggggctccccctggtaggggtgaggggccaggggtccccccaggaagtccccgagggccacgaggacaggagtcccagtcatccgggcctccctcagcctctgcttcaggctgacatcccctggagcttggggaggagaccccaggaggtggaactggggcttgcacagcacctcgtggaagtggacgaccatgaagcgcaggcaggcctcctgcaggtcgggcagcccgtacacctgcgccaggcggtacatctccaggcagttattgagccgcacctgggacagcagcagctgcagcagggacgtgacctgcaggaaggaggccgcctccaccagctcggacagcaggctcacctcatccatctcctcgtcctcgtccaccccgccgcccttttccccgcgcgggcccaggagccagccttcgcgggccccgccggcgttgatgaagtccagcaccagccgcaggcccggcgcgctgaggccgcgcagctgctgcacctccgggccgccggcctcctggctcagggcctcgcgcatgccggagcggtagagggcgcggaagtagtcgctctgctcgatgagcttcctcttgctcaccgggtagcagcggtcctccaggcggatctgcaccatctcctcggccgacatggctgggggccccggggcggcagcgctcaccgccagatctgcgcgccggcctcccagcccctacgcgcgcgccggttccgggcggggcgccgagggatggcggcccgggaggagcggcgaggtgagggccgcccgcgctcgcccggcctctccggcggcccctcctcccggggcccgctcccgcgaggcggcggccctgcccttctcctttccctcagcgccaaaaaagggccggcggagcgcggcgggcgtcctcgcgcgggctctcccgggcggcgccaggcgggaagggaattccagctcccagccagcagcctcctcccccgccgcccttctcacttccgcccgcgggaccccagccgccggcctgacctgccggctggatccggctctcggggaggcccgggaagctgcgggcccgggcgcctcggctgcggacgcgcagctgcgggaggcggagggcgcgcgtccccgcagcctctccgcccgcccggggcgcgccggctccgccgcttgttgggggctgcagtgatgctccggggtaccccagggagaagaaattcgttttctctcccacgctgctttacacgggctaaagaaaaagaaatgagcgtgggaggaaagggaaggatggagtctctggtccagggagacaaaaaggcatcaaatatggggtcgtccttctggcccagtccggcatcgagtgtcagtgggctgaggcacgcaggcgatctatggacagttggtggcaatgttggtggcacgtagagctgattctctggtagcgtggtcgcgtaggagccatcttacaggaggtccaggcagatggcagcaggttctcagaggaatcgggttgggaggcaggggagcttgcatttgccactggggccccttattctccctaagttattaaaagaaagatgaaagcgcagcccgactaaataaagttacatcacgtggcttctggttttaaaccatgttttctatgagccattgcttttctacttcagtccagtccattacggaatgttatcctggcgcaaaagatctgacaaaattggctcataaatgtctgcaagaagtagcttttcttgtcaccccctttctccacctaccctgcccccatcatctgaggactattaagagagaccacacgtgcggtttggctgagcgcggtggctcacgcctgtaatcccatgactttgggaagcccaggtgggcagatcacgaggtcaggagttcgagagcaccatggccaacatggtgaaaccccgtctctactaaaaatacaaaaattagccgggcgtggtggcacgcgcctgtgatcccagctactcgggaggctgaggcaggagaattgctggaacccgggaggcggaggttgcagtgagccgagatcgcgccactgcactccagcctgggcgacagagcgagacgccgtctcggaaaagagagaccacttgtttcctatgttctctcactgaacattgcaattagaaggcccaccccaaataataataggaaggactttttgtcttgctaatgaattcatcccaggaagggggtggggggagaaatatattgtttggattatctttgggtaggagaagggagaaggattgggaggaagcagagggtgtgttcactcttatcttacaaaacaaaaacagaaaaccttgaaaacttaccccaaaccaagatttgagaaccacctatgataaacagtccttaacttggagagaatatgtgtttggtttttttttttattattacaagcttcagctttcttcttgaatgacagattgttaaataatatcttcttcataagtacatttcccctatttaaagaagatacatcctaccatgctaacattttaccttaggaaggagaaagggttaaaaaccagagaactaaaagaaagtcaaaggtgaaacatgagatcctttcaacatagtttggttacatttgtggttcttactacgaaatttatctgcttcacagagaggtgttgttgtcatcttttactttgtttattattattacttgggaaaggaggtttatctttttattttttag

SEQ ID NO: 916362 - DNA, 4001 bp, Homo sapiens
tagcaacatttgggaagagtctcactacctctatattcattttctgacaaaagcccactttccaccttttgctagatatgaatagaggaaaagaaagacttactcttttctttaaaaaaaaatgttactcaaccaaatcctccctatagttattagaaccctctgatttcctctactcttatgtgaaaattatactgaaacttaattgacggctctaagactttcttcttgacttaaaactttgagaattcaatagtttaaaacttaaacagtcttaaaacagcacaagtcaaatgcttggcatgacatggaatgaatatcagattggtaaacaattgtaatattatcaatgatagtaaattcagttagatatcagaaaataataatgtgtcataataatttcatgctgattttctgcctcagtttctagtttcttcccatccatccacaggccatgctatccatcatgtgttacctcacattggtgttccccgcttctttcactcagaatgctaactcttcagagacacaggaaagtgccagtttcaacaaatggtaagtaggttcgttactgatatgctcgagtatttttgtggcttgtctctttctaagctgtgatacttttcaaactagaaactatcaggtagtaatgatattcaaatctttgatcttgaatatgattttttttccagaaagtgttcccctctcttgagagagtgaagtatgttactcattaagcctacactttatatatatatatataaaatatataaaatatatgtataaaaagtatatatatatatataaaatatataaaatatatgtataaaaagtatatatatatatatatatatatatattttttttttttttttgagatagtcttgctgtgtcacccaggctggagtacagtggcacaattacagctcactgcagccttgatctcttgggctcaagcaatcctctcacctcagcctcccgagtagctaggaccacaggcacgtgccccacacttggctatttttttgtattgtttgtagagatgaggttttgccacattgcccaggctggccttaaactcctggactcaagcaaatcaccttagcctaccaaagtgttgggattacaggcatgagccactgcaactggcctacacgttgtattctgaaaggaatattatggatgaaaatgcactgggacttaatcatagtattgatattttgtagaggaatttggaataacgtaggttgttattacagcaagtttgcaatgtgtcttaaatattccttagttcatacatgtaaaatatttttccttccttccttccatccttccttccttcctccttctctttttctttctttcctttcctttctctctctttctttttctttctctcctttctttctttcttcttttctttctctttctttcctttctttctttctttcttcctttctttctttctttctttctttctttctttctttctttctttctttcttttctttctttctttctttcttccttctttccatccctgtagagcaggggtaaccaataggcagtgtgcccagggtagcctaaagtgttcagagtcttttaaccaaggctcagtaagacaagtgatgtttgcttttcatgctaacttgattgaaaaaaataaatgtatgaggtttaaattttttttcccaaagttgtgattatctacaggcaagccatgcaacacccgttaaacattaatataaaactactgctcatctttaaagcaatgatttaaagccataaatgtaacaggaagatctaattctggaagacatacaaatgccgaaaggaaaattaaagccacttaccccgaggaagagatgaaggtgaagaactttctgggcctgagtctgtgggtaagtttaactcagcatatattgcttgttggtccatggcagacagaggaaggtggcattaaacttgtgtgtaagaacaaactctcaattctgtgaggcaaaatcagcaaaaggaagctttctgcctgcagtactttgttgtctctcttttgtccccacccacatacactttttgttggtggttatctccataaattactgagacaatccactgactgcatgttcattatacctagctatgtaatatctactttccttaattaactggcctgttgtttgagaaaattctgggaggctcatttgttcttgtttttctaaccatcccttttgtgttcctctctcagggccaggaccagagtgaagcaaatgaggcatagcctggggttccaatttaaggggcccccaacaaaactcactaattaacagaaataatatttagcacaattttgtaaaagtaaaaattaatgcaaaaaagtccataatgctattcaaaggctctaaaatcttcctgaaatatctgtgctccaaagaaagttgtgaaatgtgaaaaatggaaacataaatgtgagaaagccccctgaataacacaacagaaaaagcaatgtgctaaagatcagtagcctactgttagcttagctctaaaggcactcttggatatgatagcattttcacataagtaaaagtatttggaaactgccagaattgtaggaagtggagtatatggaattttttatctctttgaaagactttctttttttttcaaggtgattatagtatgtgtctacttttttttttttacctttttttattattattatactttaagttcacaatgtacaggtttgttacatatgtatacatgtgccatgttggtgtgctgcacccgttaacttgtcatttacattaggtatatctcctaatgctatccctcccccctccccccaccccacgacaggccccggtgtgtggtgttcccctccctgtgtccaaatattctcattgttcaattccaacctatgagtgagaacatgcggtgtttggttttctgtccttgcaatagtttgctcagaatgatggtttccagcttcatccatgtccctacaaaggacatgaactcatccttttttatggctgcatactattccatggtgcatatgtgccatatattcttaatccagtctatcattgatagacatttgggatggttcacgagtctttgctattgtgaatagtgccacaataaacatatgtgtgcatgtgtctttatagcagcgtgatttataatcctttgggtatatacccagtaatgagatggctgggtcaaattctagttctagtccctcgaggaatcgccacactgtcttccacaatggttgaactagtttagagtcccaccaacagtgtaaaagtgttcctatttctccacatcctctccagcacctgttttttcctgactttttaatgactgtcattctaactggtgtgagatggtatctcattgtggtttagatttgcatttctctgatggccagtgatgatgagcattttttcatgtgtctgttgcctgcataaatgttttcttttgagaagtgtctgttcatatcctttgcccattttttgatggggttggttgattttttcttgtaaatttatgtaagttctttgtagattctggatattagccgtttgtcagatgggtagattgtaaaaattttctcccattctgtaggttgtctgttcactctgatggtagtttcttttgctgtgcagaagctctttaatttagttagatcccattggtcaattttggcttttgttgccattgttattggtgttttagtcatgaagtccttcccatgcctgttgcctgaatggtattgcctaggttttcttctagggtttttatggttttagatctaacatttaagtttttaatccatcttgaattaattttttataaggtgtaaggaagggatccagtttcagctttctatatatggctagccagttttcccagcaccatttattaaatagggaatcctttccccatttctcgtttttgtcagatttgtcaaagatcagatggttgtagatatgtgg

SEQ ID NO: 916363 - DNA, 4001 bp, Homo sapiens
ggcgcggtggctcacgcctgtaatcccagcactttgggaggccgaggcatgccgatcacgaggtcaggagatcgagaccatcctggctaacacggtgaaactccgtctctactaaaaatacaaaaagtagtcgggcatgatgtcaggcgcctgtagtcctagctactcgggaggctgaggcaggagaatctcttgaacatgggcggcagaggttgcagtgagcggagattgtgccactgcactccagcctgggcgacagagtgagactccgactcaaaaaaaaaagataaattttctgcatttgacaaaatattattgctggggcaatgagaagcaataaattactaaggaataaagaagttcaggaataaaaatatatttcttaaagtctgatgttttacctgtgttaaaaattaaaatgttgtattagaaaaacttctgcactcatttttatgttaattttgaaatccagtaatggttaagactatgtggtctgcacatgagtaatagtaaagttgacatatatatatataaaaatttcttgcactacattacttttaattagtaatttatacacattaatgaaaatcaatagaggtaattaaatggtcttttcttaatggctgaaatgttctaagaaattattaaaaattatttattaaaaattataaaaaattaaatatttgtatatgacagaaaatgctatgtgacacagttaacttatgcataacctaaatagtattaggaacactacataaattgttaatacttacagaagtattggtaatttaattagtaattggtaatttatttcctggctaaattatgaaccaaaaaatgataaataaaagtataggtaattcatgttaaagcacatttcatttaaacttatagaatgattttatggttgtcaaagtgagtaaaggccactttagttgtataagtacttgtaaaatttcagataatgtaattaaatcatttagtcaatgggctctggagtcagtgagatctagaattaattctagctttgacacttataatgtgcgacctttaaaaagttattctatttttaataacccagtttgttaatctaaaatgggcataagaacatataaaacgttgcatgtaaaacatttaccactcaacctggcacttaaagttctcaataagcattagctactttaattattattttagtcacaattgttatgttactgtttctgattcatgtcagttaaagcatggaaaataaatcttcagataagtctcctatgtccatgcgctacatctttttttgcaatattttgatcaatttttaaaaagtatttttattgctttgtaatacctttagcattttatgtaatctacctcattctgatttttattaaaaataaaaactgcttttctctaatctacgtgtctgaggaattgtatttggctttcatcaattgattgatttattttaataatctttaatggctaagctaaatataaattattattcaaagatacatgatgtactgattacaaaatacaaaattaattgttcattattgtgatgttaatagctttcccttaaacgatattgatcaacaaacccactagatttccacaaacaataatttgaaaactttaagaaatccttcaacatatttcatattttaggtttttaccctgagttattcaaatgaagacagcaatattctactttgattttattgtatattaattatacctcctttgtatcatattgagcacttgaaatcacccactaaatgaggtaggctagtagagagttggagagtagcaatacataccttctgtccccagaaagtcacacatcctttagtggagaggccaggttagtctcataaaaaggcctgctatagctgtgtaataaaaggtgaaatttaaaggcataaatccaagacaagaacaaacaatgcctgcaatcttcgcagactgccctgtgaaggctcagagtgagtcaagagtggaaaaagtagatttctcatcaacgtgttactaaggtttgaacaggaaattctacacatgggctattgtgaaatcagttttatctcatcacacacctccaaaatataggatacttggtctattaaaagtacaaggttgactttgaaagtgtgtcatttagttggttcatttttcaagtgcctatgagaattttttttttttctgtcttgatcacgaacattgtcaaccctcaccttgttaagagtgccttttagactaggttgctaaatcttaacattgcatacttcttttctttatattattttattatgtcacttccattataatagaaaacattctaaaactcatagtaatattatcaactgatatctactgattttttccttaattattctgaaaaattactgcagtaattactcaattgattgtagctggcacaaaaagcatcattgccaaagttatattattaacttctcttagttcttaaatttttgcacttaatttttaaaaatagattatttaatcttcagattacccttgataaaaatatcttggataggtaaaatattaatcaattttgaaatatattagcataccagaaattgaaatattaaatagctattcattacattcttcatttattcatcctccgccataacaaattatgtcgactttcatagaaatatttagttgtaaatgacaaaaactgaagtcaaactatgtatggggaaaaagtaattttaaaatcttactaggaggaaagtcagtaaattggcagaataggtggtcccccacacatatgcccccacagcaacaataatttttcagccatccacagacaaaagttcctttgagggagtttggaattcaagtaggagtttgtaaaatgccagtggaacccaagacctaggaaggttgttttagggaatagatttgcatccaagtggcagacttaccaacagtgattccatctccagacctgaaaagggacccatcctcctgtgcttgccttcagccccatttaggccttggtcatgctgccaaaaccatttgcccaggggcccaggaggagactcacacactagtgtctcaggaggtaggcatatcaactgtagtctcaatgtagaccctgaaacagccctctaacttggctttaactagtgtcagccacaacttgagatcagtccttcacccacagagacttcctgggagacatatacatctgtacctctggggcatgcttgctgacctctgtcctacagaagatactaaaatggccctgaatctccactcaaactcctctcaactgtgacctgagttaatcacaggaaattgctgtgagactcaatcatctttgtcagcagtacaggcttgctgacttcagttccacggtagtttctgaaacagccttgaatcttgaccttcacccttctcagctgtggactgtgagcagtcttgccagctcagggatacagagggaggacatgtgcatccatgtcccaactaggagaccattgacctaggtttcacagcagatcctttaattggacagaaaaggggcttcgacacttctcagctatgctagagagcagtttgcccatacagggacctggagagagacatcattagtgcccctgcaggcacagaccttagttttatttcagatcttgaaacaattctggatccagctccagcccaactcaactacagtctgaggcaaatctgcctgcccacagacctgccagaaaacacactcaaccatgaccccagagacagacatgaagacactggtttcagctatagaccccgaggaaaccttgtgacttagcactaactcctctgtgccacaggttgaggaacccactcagagacccatgagcagccttcccagcaaactagataaactcttccccaactacacacctaataatagacccaccatttacagaccttgaagtggaccctcatcccctccccagccctatacagtatgattctagagccag

SEQ ID NO: 916364 - DNA, 4001 bp, Homo sapiens
aaagcatggaaaataaatcttcagataagtctcctatgtccatgcgctacatctttttttgcaatattttgatcaatttttaaaaagtatttttattgctttgtaatacctttagcattttatgtaatctacctcattctgatttttattaaaaataaaaactgcttttctctaatctacgtgtctgaggaattgtatttggctttcatcaattgattgatttattttaataatctttaatggctaagctaaatataaattattattcaaagatacatgatgtactgattacaaaatacaaaattaattgttcattattgtgatgttaatagctttcccttaaacgatattgatcaacaaacccactagatttccacaaacaataatttgaaaactttaagaaatccttcaacatatttcatattttaggtttttaccctgagttattcaaatgaagacagcaatattctactttgattttattgtatattaattatacctcctttgtatcatattgagcacttgaaatcacccactaaatgaggtaggctagtagagagttggagagtagcaatacataccttctgtccccagaaagtcacacatcctttagtggagaggccaggttagtctcataaaaaggcctgctatagctgtgtaataaaaggtgaaatttaaaggcataaatccaagacaagaacaaacaatgcctgcaatcttcgcagactgccctgtgaaggctcagagtgagtcaagagtggaaaaagtagatttctcatcaacgtgttactaaggtttgaacaggaaattctacacatgggctattgtgaaatcagttttatctcatcacacacctccaaaatataggatacttggtctattaaaagtacaaggttgactttgaaagtgtgtcatttagttggttcatttttcaagtgcctatgagaattttttttttttctgtcttgatcacgaacattgtcaaccctcaccttgttaagagtgccttttagactaggttgctaaatcttaacattgcatacttcttttctttatattattttattatgtcacttccattataatagaaaacattctaaaactcatagtaatattatcaactgatatctactgattttttccttaattattctgaaaaattactgcagtaattactcaattgattgtagctggcacaaaaagcatcattgccaaagttatattattaacttctcttagttcttaaatttttgcacttaatttttaaaaatagattatttaatcttcagattacccttgataaaaatatcttggataggtaaaatattaatcaattttgaaatatattagcataccagaaattgaaatattaaatagctattcattacattcttcatttattcatcctccgccataacaaattatgtcgactttcatagaaatatttagttgtaaatgacaaaaactgaagtcaaactatgtatggggaaaaagtaattttaaaatcttactaggaggaaagtcagtaaattggcagaataggtggtcccccacacatatgcccccacagcaacaataatttttcagccatccacagacaaaagttcctttgagggagtttggaattcaagtaggagtttgtaaaatgccagtggaacccaagacctaggaaggttgttttagggaatagatttgcatccaagtggcagacttaccaacagtgattccatctccagacctgaaaagggacccatcctcctgtgcttgccttcagccccatttaggccttggtcatgctgccaaaaccatttgcccaggggcccaggaggagactcacacactagtgtctcaggaggtaggcatatcaactgtagtctcaatgtagaccctgaaacagccctctaacttggctttaactagtgtcagccacaacttgagatcagtccttcacccacagagacttcctgggagacatatacatctgtacctctggggcatgcttgctgacctctgtcctacagaagatactaaaatggccctgaatctccactcaaactcctctcaactgtgacctgagttaatcacaggaaattgctgtgagactcaatcatctttgtcagcagtacaggcttgctgacttcagttccacggtagtttctgaaacagccttgaatcttgaccttcacccttctcagctgtggactgtgagcagtcttgccagctcagggatacagagggaggacatgtgcatccatgtcccaactaggagaccattgacctaggtttcacagcagatcctttaattggacagaaaaggggcttcgacacttctcagctatgctagagagcagtttgcccatacagggacctggagagagacatcattagtgcccctgcaggcacagaccttagttttatttcagatcttgaaacaattctggatccagctccagcccaactcaactacagtctgaggcaaatctgcctgcccacagacctgccagaaaacacactcaaccatgaccccagagacagacatgaagacactggtttcagctatagaccccgaggaaaccttgtgacttagcactaactcctctgtgccacaggttgaggaacccactcagagacccatgagcagccttcccagcaaactagataaactcttccccaactacacacctaataatagacccaccatttacagaccttgaagtggaccctcatcccctccccagccctatacagtatgattctagagccagtttggccctctgaggcactaaataggatacaagcctgctagaagccctagtaaaaggatcatgaaccaaagatcccactctggacccgtaagcaaccatgtgatctggctgtaaccccattcaaccatgatactgaaggcaatctcatcagcccaggacactaacaggagaagcttttaacctaccgaaaccagtctgtaaagactgaaagagagtctgctctttcaaatgcacagacatcagtacaaggataaacaaataacaaagcatcagacaaatatgacaccaccaaaggaaactaataaagctttagcaactgatccaaataaatggagatctataagtttcctttaaagtaattcaaaacaatcatcttaaaaaatctcagtgagatgcaaaagaaaagagtaaacaaaaaatacaactaaaacaaaaaatacatgaacaaaataaaaatttaataaagaaatataaactattaaaaagaaccaaacaaaaattctggagctgaagaacacaatgaaagaaataaataagtcaatagagagttttaatgcccgactcaatcatgcagaggaattagtgaactcaaaaaaagagtcttttaaaattaacaaattagagtaaaaaaagaataaaaagtggcaaagaaagcatgagacctttgagacaccaccaagaatatggtatagaaagtatagaaacttcagaaggagaagagagacataaaaagtcaaaaatattttttctttaaagacatactgtctgaaaaccttcctcacttgggaaggatatggaaatccagattcatgaagctcaatgaatcatgagcaagatcagcccagaaaagactattatgaggcataatataatcaaattgtcaaaagtctaagataagagaatctcgtgggggggttttgtttattttttagcttaatgtgatctcgtttgtccatttttgctttggtttcctgtgattgtggggtattactcaaaaaatctttggccagtcaactgtccttgagaatttttccaattttttttctttcaacttttatttttagatacagggagtacatgtgctggtttgttacatgggtatattataccagaatagtgagtataatccaaagtaggtagttttctgaaccattcttccctgctctcctctcccctctagtagtctgcagtgtcttttgttcccatatttacgtctaagggtgctcagtgtttagc

SEQ ID NO: 916365 - DNA, 4001 bp, Homo sapiens
aaattagttcacatatttcaacagtataaacatatatgtgcttaacatatttacgcatccttacaggcttataaatgtatatttttaataactgagtcagtcatacacacatgcacagacaagggttagcctctcctccctaattgtgttcccatataaagcaaatgaacaaacaaaaatacactctacacatgtgttgaacatcgctgatacacaactgcttttttagaatagtaaaattatttatttggtatcatctcacagcagtaggaaacctctgttaattgggagaaagagggtagaatgattttaagtgagtatttctactcactggagaaaaggaaatgctgcctcataatctttctttataaatatttatggctgaatttatggcttattttctgcaaaaatgccactattcttttacatgccttaaaacagacacaaaatataaattgtactaatatcagaacattgaaaataaaaatgtacctttctgcgttcttgtattcggggaaaaattgttctgctccaggactgtaatagaaaaattaaaatgatttttataaaaactgatatctagataaaccataacgagtttagtttcttactttgaaactttgtgtgttatttaaaatggggagaatctttaataaaattaactttttctataaaaatatataaagtaatagacctttgaaataaacatttttaaagactttagcacaaacttcaccatctcttgtagtatttgatgtaaccactttcaaaaattaatttgtttttctaaatacttttcttctatagcatgcctttgaattatgaaatcagaaaatatctttgtgtgtgtatgtatatacatatatatagattacacacaaaaaataaacacatgttctctacaatgattttgttatttatgttgtgaaaaattcagaataaccatattacttttggttccaaattgtactaatatcagaactttgaaaataaaaatgtacttttctgggttcttgtatttggggaagaattgttctgctccaggactgtaacagaaaaattaaaatgatttttataaaaagtaatatttagataaaccataatgagtttagtttcttactttgaaactttgtgtgttatttaaaatggggacaatctttaataaaattaactttttctataaaaataaatgaagtaatagatctttgaaagaaacagtaaaataagagttctattcttcaacagtatgaaatattttgaggcacttccaagcattaaagtaaaacgttcccttctaatctttcaagaatatgcttacaaggaataagaactattgtttttaacacagtggccatcaggacaatgcaaatgattcctaggacctcggcagtgagcttctctggaggtggcagtaaacctgcagggagagaaatagaggcactgagagaggggagatagagagttgattaggattacatactagagaattacatactagagaacccacatgcacagggaaacataatgataaactctggcctctaaatctacatctactctagtaatctttctctcagaatataccatttcattttcagtaaatataatgttccatgagtggaccgcagattacagttgaacaatgcccgaataaaattagtcttctgatttcatattagaattttagatcccaattatgaactccgattctcacaagtgcaaaatattccctaatctttcctcacccttctgcattcaactgcacatcctagaacaataatattgaagatatatttaatgttttaccttggcagtcatatattttatcaatcccttgatgattcagggaaggattttgaagatttaattctacttggaatatttcctgttcggttcctgaaatggagcttttattgcctttaggtttcctttgctgccgctttgggtcctgggccagactcacttctgagaaggttcctctttgtttattcatctctgcagctgtgtgatgtgagggactgtgctctatgataactgcacttaagaagctataaatggtgtatattttgacaggatccctggtataggcaatgtgcatgtgttggggctgagtaataatgtttactttgctgttaaccaatgtaaaattctgctactaatttcctaaagctttaaacaaaaatcacacgatataattggcaattttttagatgtattctgtatttgacataatattactagtgggaacaataaaaacattaaacttatgagaactaggaagttcatgaaaaattggtattaaattaaggttagattcttcaaaaatgtttaacaccaatagactgcatatgtcaacaatcaaaatactgtatttagaaatacacaaattttatcatagttttaagagtcattgatggttaaggattgtgtgccataagataaaatagttctgtcagcatatagagtatcttcttatactaaaatacattgttagtgacttacattcatttattaaaaggacctgaggtattgtcaaatgattttttttctaaattaggaaatcagaaaaatcattaaaattttaaaaatatatcttgtaaaacattacattactgtatgcataaatattattgaaaacgtatttttaaattgctgcttttacacaagaaattggtaattgatttaatgactaaaataggaaaacttaaaatgataaataaacgtgtgggccgtctatggaagaatagtgtccaatcaaactttcagaaagctcctatgattgtataagtcagtgagggttgctttggttgtataagtaattgtaatagttcagataatgtaatttaataatctagtcaatgagctctgtagtcagtgagactacaattaattctagctttgcaagttgtaatatgtgacctgtactaaattacttagtgtctactaacctagtttactaatctacattgggaaaaataatttataaagtataatgtatgtaaaaaactaaacacacaacctggcacatgttaccactgaatacataatagatatttcaactatttttaacacaattgccattttattatttctgatttgcattagagtgtgttaaaataactcattaattaggcgtctcatgtcagtgtggtacatcttttttgcaatgtttggttcaattgttttaagtcttccaattgtttataattaaggtcagatttgcattttatggaaatgatttcatccttacttttattaaaaattaaaactgctttcatgaaatctaggtgtgtgattgagaattaatgtttgacattcacaatttgatgtatccatattaaaaatttatttttaaagtttggtctaaatataatatacaaaatgtaatggttacaaaatccaaaattaattgttcattgtcatgatggttatgggtttcactctaaattacatggattggcaaacctattattatgtatgcatctacttgagtgattctccagcggcaatgatgtgaatactctaagaaatccttaaacatagtttatattttggctcgtttttcaccttgaattattcacgtgaataaagttctaccttgattttcgtctatatcaactttacctcaggtgcatcacagccagtacttacaatcttctactaaatgagatgagctagtagagaaacagggagaggagcaacacttacctactgtcatcagaaagccacacgcccttcagtggagaggtcaggttacctctgaaagacacaaacgttatctgtgatcttcacaggctgccctttgaagggtcagagtgaggcaagagtggaaaaagtagattcctcaccaatgtgtcactgcagatttgaacaggaaattctcaccctagggctattttgaatcagtttgtctcatcacacactttagaatataggagactttgggtggctagtgtgtcatttagtttgtccattttaaagtgcctcttagaaattatttt

SEQ ID NO: 916366 - DNA, 4001 bp, Homo sapiens
catatttatgcatccttacaggcttataagtatatattttttaataactgagtcagtcatacacacatacacagaaaagggttagcctctctcccctaattgtgttcccatataaagcaaaccaacaaacaaaaatacactccacacatgtcttgaacctcactgatacacaactgcttttttagaatagtaaaattatttatttggtatcatctcacagcagtaggagacttctgttaattgggagaaagagggtagaatgattttaagtgagtatttctacttactggagaaaaggaaatgctgcctcataatctttctttataaatatttatggctgaatttatggcttattttctgcaaaaatgccactattcttttacatgccttaaaacagacacaaaatataaattgtactaatatcagagcattgaaaataaaaatgtacctttctgggttcttgcattcggggaagaattgttctgctccaggactgtaatagaaaaattaaaatgatttttataaaaactgatatctagataaaccataatgagtttagtttcttactttgaaactttgtgtgttatttaaaatggggagaatctttaataaaattaactttttctataaaaatatataaagtaatagacctttgaaataaacatttttaaagactttagcacaaaacttcaccatctcttgtagtatttgatgtaaccactttcaaaaattagtttttctaaatacttttcttctatagcatgcctttgaattatgaaatcagaaaatatctttgtgtgtgtatgtatatacatatatatagattacacacaaaaaataaacacatgttctctacaatgattttgttatttatgttgtgaaaaattcagaataaccatattattttggttccaaattgtactaatatcagaactttgaaaataaaaatgtacttttctgggttcttgtatttggggaagaattgttctgctccaggactgtaatagaaaaattaaaatgatttttataaaaagtaatatttagataaaccataatgagtttagtttcttactttgaaactttgtgtgttatttaaaatggggacaatctttaataaaattaactttttctataaaaataaatgaagtaatagatctttgaaagaaacagtaaaataagagttctattcttcaacagtatgaaatattttgaggcacttccaagcattaaagtaaaacgttcccttctaatctttcaagaatatgcttacaaggaataagaactattgtttttaacacagtggccatcaggacaatgcaaatgattcctaggacctcggcagtgagcttttctggaggtggcagtaaacctgcagggagagaaatagaggcactgagagaggggagatagagagttgattaggattacatactagagaattacatactagagaacccacatgcacagggaaacataatgataaactctggccgctaaatctacatctactctagtaatctttctctcagaatataccatttcattttcagtaaatgtaatgttccatgagtggattgcagattacagttgattacagttgaacaatgcctgaataaaattagtcttctgatttcatattagaatattagatcccatttatgaactctgattctcacaagtgtaaaatattccctaatctttcctcacccttctgcattcaactgcacatcccagaacaataacattgaagatatatttaatgttttaccttggcagtcatatattttatcaatcccttgatgattcagagaagcattttgaaggtttaattctacttggaatatttcctgttcggttcctgaaatggagcttttattgcctttaggtttcctttgctgccactttgggtcctgggccagactcacttctgagaaggttcctctttgtttactcatctctgcagctgtgtgatgtgagggactgtgctctatgataactgcacttaagaagctataaatggtgtatattttgacaggatccctggtataggcaatgtgcatgtgttggggctgagtaataatgtttactttgctgttaacctaggtaaaattctgctactaatttcctaaagctttaaacaaaaatcacacgatataattggccattttttagatgtattctgtatttgacataatattactagtgggaacaataaaaacattaaacttgtgagaactaggaagttcatgaaaaaaattggtattaaattaaggttagattcttcaaaaatgtttaacaccaatagactgcatactttaacaattaaaatactgtatttagaaatacactaattttaccatagttttaagagtcattgatggttaatgattgtgtgccataagataaaatagttctgtcagcatacagagtaacttcttatactaacatacattgttagtgagttacattcatttattaaaaggacctgaggtattgtcaactgattatttttctaaattaggaaatcagaaaaatcattaaaattttaaaaatatatcttgtaaaacattacattactgtatgcataaatactattgaaaacataatatatttttaaattgctgcttttacacaagaaattggtaattgatttaatgactaaaataggaaaacttaaaatgataaataaacgtgtgggccgtctatggaagaatagtgtccaatcaaactttcagaaagctcctatgattgtataagtcagtgagggtcgctttggttgtataagtaattgtaatagttcagataatgtaatttaataatctagtcaatgagctctgtagtcagtgagactacaattaattctagctttgcaagttgtaatatgtgacctgtactaaattacttagtgtctactaacctagtttactaatctacattgggaaaaataatttataaagtataatgtatgtagaaaactaaacacacaacctggcacatattagcactgaatacataatagatatttcaactatttttaacacaattgccattttattatttctgatttgcattagagtgtgttaaaataactcattaattaggcgtctcatgtcagtgtggtacatcttttttgcaatgtttggttcaattgttttaagtcttccaattgtttataattaaggtcagatttgcattttatggaaatgatttcatccttacttttattaaaaattaaaactgctttcatgaaatctaggtgtgtgattgagaattaatgtttgacattcacaatttgatgtatccatattaaaaatttatttttaaagtttggtctaaatataatatacaattaaaccagtaatgattacaaaatccaaaattaattgttcattgtcatgatggttatgggtttcactctaaattacatggattggcaaacctattattatgtatgcatctacttgagtgattctccagcggcaatgatgtgaatactctaagaaatccttaaacatagtttatattttggctcgtttttcaccttgaattattcacgtgaataaagttctaccttgattttcgtctatatcaactttacctcaggtgcatcacagccagtacttacaatcttctactaaatgagatgagctagtagagaaacagggagaggagcaacacttacctactgtcatcagaaagccacacgcccttcagtggagaggtcaggttacctctgaaagacacaaacgttatctgtgatcttcacagactgccctttgaagggtcagagtgaggcaagagtggaaaaagtagattcctcaccaatgtgtcactgcagatttgaacaggaaattctcaccctagggctattttgaatcagtttgtctcatcacacactttagaatataggagactttgggtggctagtgtgtcatttagtttgtccattttaaagtgcctcttagaaattatttttatggtcaacaagatgaggggagagc

SEQ ID NO: 916367 - DNA, 4001 bp, Homo sapiens
ccactcctcaggacaatggccacaatgacgtgctaaataaaaatatgaattactatgcaaaacaatatgtttacaaatgaaaattattttatatatttgcaaagctataaacatacaggtacacaatatctgcatcctcataagttgttaaatatatattttaaaataacgagtcactcatacgcacatgcacaataaaaggtccacctctcatcccttaattgtgttcccatacaaaacaagcccgccaacaaaaatccaccctacacatcttaaacatcactgaacaaaactgctttttaagtatagtaaaattatttatctcttatcatcttatagtagtaggaaatttcagttaattaaatgcaacaagagggtataatgattttaactgagcatttctacttattattggagaaaaggacatgccctcatataatctttattttataaacatttatggctcattgttatagtttattttcccaaaacattttattatcattttgcatccctttagagacaaaatataaactgtactaacatcagaacattgacaatcataatgtacctttctgcattcttctattcagggaaaaattgttctgctccagtactccaatacctagaaaaattaaagtgattcttacaaaattaatatctagacaaattataataaattcagttgcttactttgaaatacaaaatttaaaattattttaaattggaacaatctgaaataaaaatgacttttctataaaaataatgagatctttaaaacaaatatttttaaagccattagcataaaacttcaccatctcttatagtatttgatctaaccactttcaaaaattaatttgtttttctaaatattttttctcttaaaacatgtctttgagtcatgaaatcagaatacatctctctgtgtgtgtatcatatatacatatatatttagtacacacaaaaaaataaatgttttctacaattattctgttatttataaatttgaaaagttcagaagcagcatattatcttggggttcagagatatacattaaacagagaattctaatcctcattattatgaaatgtttcaaggcgcttccaatcattatagtgaaaagttcccttataatctttcaagaatatgcttacaaggaataagaactattgtttttaacacagtggccatcaggacaatgcaaatgattcctaggacctcagcagtgagcttctctggaggtggcagtaaacctgcagggagagaaagaggcactgagagaggggagatagagagttgatgagaaggtttacgtacaagagaactcacgtgcacaggaaaacataatgataaactctgtcctctaaatctacatctactctagtaatctttctctcagaatataccatttcattatcagtaaatataatgctccatgagttgttaatcacaaattacaattgaacaatgcctgaataaaatcaggcttcagatttcatattagaatattagatcctgactttgacctctgattctcacaagtgcaaaatattccctaatctttccccacctttctgcattcaactgcacatcctagaacaataatattgaagatctatttaatgttttacctttgcagtgatatgtcttgtcattcccttgatgatccgaagaagcattttgaaggtttaattctacttggaatatttcctgtttggttcctgaaatggagattttattgcccttaagtttcctttgctgcctctttgggtcctgggccagactcacttctgagtaggttcctctttgtttattcatctctgcagctgtgtgatgtcagggactgtgctctatgataactgcacttaagaagctataagtggtgtatattttgacaggatccctggtataggcaaactgcatgtgttggaggctgagtagtaatgttcattttgctgttgaccaatataaaagtctggtactaatttcctaaagttttaaactgaaatctctttaaacaataggtcactttttaaaaggccttctatatttgacataatattattaatgggaacaataaaaaacaatacatttgtgaaaactaagaagtaactgaatataaatatctttattaatttaaaatcagattctacagaaatattttatcaccaatagaatacctgtgtaaaaaactaaaattgaaatttgaaaataaaatgcactaattgtatgacaattttaaaattcattaatgtaaggattgagcgctaaagatggaggaataatttgttggcatatagaacaacttttaatactaaaatacattaagttagtgacttacattcgtttactaaaagggcatgaggtcttggcaaatgttttttattctgaatgattgaggaaaacagaaaaattgttaaaattttaaagaaatattttataccttgtaaaacattacattaacttatgcataaactaaatactactgaaaaagatttaactctttattttacagaattgattggtaattgatttaatgactaaaataggaaaactgaaaatgataaatataagtttggaccatctatgaaagaacactttaagttcaaactttcagaaagaccctgtggttgttttaaaaggcagcgagggtcactttggttgtgtaagtaattgtaataaatcagaaaatataatttaataatctagtcaatgagctctgtagccagtgagacctaaaattaattacagctttgaaactcataatgcatgacctttacaaagttacttggtgtctacaacaccagtttactaatctagattggggaaaataatttatgaagtataatgtatataaaacccttaacatacaacctggcacacattagtcctcaatacatattagatattttaattatttttaacacaattgccattttattatttctaattcatactgagtgtgtaaaataactaatgaggtaggagtctcatgtcagtgtagtacatcttttttgcaatgtttgtttggctcaattttttttaggtcgtcctattatttataattaagtttagatttgcattttatggaaactacttcattattacattcttaaaaaaataaaatctgcttcaattaaatataagtatgtgtatgagaaattatgtttgacattcacaatttgatgtatccattaaaaatgcatttttaaagtctgggctaaatataaagtattattacatctataatgattataaaatttcaaattaattcttcattgtcgtgatatttatcggtttcactctaaattatattgattaacaaacctattatgatgtatgcatgtgcttgactaattctccacaggcaataatgtaaatactttaagaaatcctcaaacatatattatattttgggttgcttttcaccctgaattattcatgtacagacagttctactttgattttattctgtattaactttaccttgttgcatcacatttaatatttacaattttctactaaaggagatgagctagtagagaaacaggagactagcaacacataccttctgtcatcagaaagtcacacgccccttagtggagaggtcaggttacctcttaacgacacaaaagacatctgtgatccggtgaaaccccgtctctactaaaaatacaaaaacttagccgggtgtggtggcgggcgcctgtagctgcttgggaggctgaggcaggagaacggttgaacccgggaggcgtagcttgcagtgagctgagatcgggagccactgcactccagcctgggcgacagagcgagactctgtctcagaaaaaaacaaaaaacaaaaaacagatatctctgatcttcacagactgccctgtgaaagctcagagtgaggcaagagtgcaaaaagcagattcctcatcaatgtatcacttcggatttgaacaggaagttttcacactagggccattttgaatcagtttatctcatcatacacc

SEQ ID NO: 916368 - DNA, 4001 bp, Homo sapiens
aactgagcatttctacttattattggagaaaaggacatgccctcatataatctttattttataaacatttatggctcattgttatagtttattttcccaaaacattttattatcattttgcatccctttagagacaaaatataaactgtactaacatcagaacattgacaatcataatgtacctttctgcattcttctattcagggaaaaattgttctgctccagtactccaatacctagaaaaattaaagtgattcttacaaaattaatatctagacaaattataataaattcagttgcttactttgaaatacaaaatttaaaattattttaaattggaacaatctgaaataaaaatgacttttctataaaaataatgagatctttaaaacaaatatttttaaagccattagcataaaacttcaccatctcttatagtatttgatctaaccactttcaaaaattaatttgtttttctaaatattttttctcttaaaacatgtctttgagtcatgaaatcagaatacatctctctgtgtgtgtatcatatatacatatatatttagtacacacaaaaaaataaatgttttctacaattattctgttatttataaatttgaaaagttcagaagcagcatattatcttggggttcagagatatacattaaacagagaattctaatcctcattattatgaaatgtttcaaggcgcttccaatcattatagtgaaaagttcccttataatctttcaagaatatgcttacaaggaataagaactattgtttttaacacagtggccatcaggacaatgcaaatgattcctaggacctcagcagtgagcttctctggaggtggcagtaaacctgcagggagagaaagaggcactgagagaggggagatagagagttgatgagaaggtttacgtacaagagaactcacgtgcacaggaaaacataatgataaactctgtcctctaaatctacatctactctagtaatctttctctcagaatataccatttcattatcagtaaatataatgctccatgagttgttaatcacaaattacaattgaacaatgcctgaataaaatcaggcttcagatttcatattagaatattagatcctgactttgacctctgattctcacaagtgcaaaatattccctaatctttccccacctttctgcattcaactgcacatcctagaacaataatattgaagatctatttaatgttttacctttgcagtgatatgtcttgtcattcccttgatgatccgaagaagcattttgaaggtttaattctacttggaatatttcctgtttggttcctgaaatggagattttattgcccttaagtttcctttgctgcctctttgggtcctgggccagactcacttctgagtaggttcctctttgtttattcatctctgcagctgtgtgatgtcagggactgtgctctatgataactgcacttaagaagctataagtggtgtatattttgacaggatccctggtataggcaaactgcatgtgttggaggctgagtagtaatgttcattttgctgttgaccaatataaaagtctggtactaatttcctaaagttttaaactgaaatctctttaaacaataggtcactttttaaaaggccttctatatttgacataatattattaatgggaacaataaaaaacaatacatttgtgaaaactaagaagtaactgaatataaatatctttattaatttaaaatcagattctacagaaatattttatcaccaatagaatacctgtgtaaaaaactaaaattgaaatttgaaaataaaatgcactaattgtatgacaattttaaaattcattaatgtaaggattgagcgctaaagatggaggaataatttgttggcatatagaacaacttttaatactaaaatacattaagttagtgacttacattcgtttactaaaagggcatgaggtcttggcaaatgttttttattctgaatgattgaggaaaacagaaaaattgttaaaattttaaagaaatattttataccttgtaaaacattacattaacttatgcataaactaaatactactgaaaaagatttaactctttattttacagaattgattggtaattgatttaatgactaaaataggaaaactgaaaatgataaatataagtttggaccatctatgaaagaacactttaagttcaaactttcagaaagaccctgtggttgttttaaaaggcagcgagggtcactttggttgtgtaagtaattgtaataaatcagaaaatataatttaataatctagtcaatgagctctgtagccagtgagacctaaaattaattacagctttgaaactcataatgcatgacctttacaaagttacttggtgtctacaacaccagtttactaatctagattggggaaaataatttatgaagtataatgtatataaaacccttaacatacaacctggcacacattagtcctcaatacatattagatattttaattatttttaacacaattgccattttattatttctaattcatactgagtgtgtaaaataactaatgaggtaggagtctcatgtcagtgtagtacatcttttttgcaatgtttgtttggctcaattttttttaggtcgtcctattatttataattaagtttagatttgcattttatggaaactacttcattattacattcttaaaaaaataaaatctgcttcaattaaatataagtatgtgtatgagaaattatgtttgacattcacaatttgatgtatccattaaaaatgcatttttaaagtctgggctaaatataaagtattattacatctataatgattataaaatttcaaattaattcttcattgtcgtgatatttatcggtttcactctaaattatattgattaacaaacctattatgatgtatgcatgtgcttgactaattctccacaggcaataatgtaaatactttaagaaatcctcaaacatatattatattttgggttgcttttcaccctgaattattcatgtacagacagttctactttgattttattctgtattaactttaccttgttgcatcacatttaatatttacaattttctactaaaggagatgagctagtagagaaacaggagactagcaacacataccttctgtcatcagaaagtcacacgccccttagtggagaggtcaggttacctcttaacgacacaaaagacatctgtgatccggtgaaaccccgtctctactaaaaatacaaaaacttagccgggtgtggtggcgggcgcctgtagctgcttgggaggctgaggcaggagaacggttgaacccgggaggcgtagcttgcagtgagctgagatcgggagccactgcactccagcctgggcgacagagcgagactctgtctcagaaaaaaacaaaaaacaaaaaacagatatctctgatcttcacagactgccctgtgaaagctcagagtgaggcaagagtgcaaaaagcagattcctcatcaatgtatcacttcggatttgaacaggaagttttcacactagggccattttgaatcagtttatctcatcatacacctcagaatataagagactgagctgctagggtgtcatttagtttgtccattttcaagtgacttttagaaattatttttatagtaaacaagatttggggagaacaaagactactacccatgcagttgtttccatctcaatcacaaacactaaaatcttatacctttttcagagtctcttacatgtttaacttctacatttacacagggtggctaaaacttgggattacgtacttctttatcatatacccctataatatcactgctaatatgacgataaatttttaaaataataatcttaccaataggaatttaatgtatttgtcactaattattctgagaaaatacatttccacttcattgtaattgacatcaattctcaaagttaaattcc

SEQ ID NO: 916369 - DNA, 4001 bp, Homo sapiens
tttatttggaagttagaggttctaagtttttagaaccctgtttggtgagaatacgtccatcagtcattgtcctttttttcatcttagttcactgacttagaaataaaaatccaacaaatacaagtttacttcaagaactccaggcttaaatatttaagatacctaaacacacacacacacacacacatacacacacacagtaaacatatatgtatatacctctttaactctttctgagctgccaactctgattgttctttttttgtttgtttttgtttgtttgttttttgagatggagtctctgtcacccaggctggagtgcagtggctcactcggctcactgcaagctccgcctcccgtgttcacgccattctcctgcctcggcctaccgagtagctggggctacaggctcccgccaccacgcccagctaattttttgtattttttttttttagtagagacggggtttcaccgtgttagccaggattgtctcgatctcctgacctcgtgatccgcccgcctcggcctcccaaagtgctgggattacaggcgtgagccaccgtgcccggcctctgttctttctatttatttttgtacgtagacaggtgaatgatttccatgtactgtatctctcccactcatctccacttgttcctgaagttatcattgcctcgcctatgtcccttggaatatttggggaactatggccaactagttatctgtatagctgtatctatgggttctttttttctccaataactgctgaaagccttgctgttctcagacatgctaatccggaagtgctgaataatcatcaccagaatgggcgtcaacaaacgaatcttgtgatttgctatacagtccagcagtctcagccctaaagtcaggtaattctgaacattgtgttttgcccagttcccagaattactcaatagtgttatgttccagtcacctcctctagaagctagattaagaaaataacctttattgcgttccactttccctttcctattacatttcctttcctacatttattgcatacacaattccaaataaagtttctactcaaagtattctctgagtgtgctgccgagagaaaccagactaaattccgctgaaatatccagcttcacttacataaatttgcttttgaaaagttaggtatcctgccaaaagaacgtctctctttgcaggactttccatcccctagtatccattgcaggaagatgccctcttcctcccctgcaatttactagtgcccttggtaagagcaagtgatgacttcaatagctaagtcaacttttaaaccttagtcaaaagccagggaaaagaaactaatgttcacttaacatataaacagtgaagtcttttccctacctaaaaatgtataactaaaatgttgcagaacaaaataacagtatacgttctagtatccccaagggaaaaatttattttgatctcactgcttttagaaaatgcattctttgagcggaaagaaaattgctcacatcaggctgcaaattattcttttaacagagagagagggctccctgagaaaaaacaaaagacgttactgacctggtaaaatctcattgtaaacatgctaataacaaacctactagctatagtggtttcttatatatagtgtgttttgcttgcaaaatccttatcaatggaatgattttagcaggatgtattagattgtctaaaattgttagtggtaaaatcaaataaaaaaataaaactaaggctgggcatagtggctcacgcctgtaatctcagctcttttggaggccaaggcaggtggatcacctgaggtcaggagttcaaggccagcctggccaacatggagaaaccctgtctctactaaaaatacaaaattagtcgggcatggtggcactcacctgtaacccctgctacttgggaggctgaggcattagagtctcttgaacttgatgagctgagatcgcaccattgcactccagcctgggtgacaagagcaaaacacactatataaaaaaaaagcataaaactagaatctgtgggtttatggaggctggcttcctggaaaaatgtcacataagctatgtgtaaccataaccatgtaaccatctgagtataaaatggagatgtgtcataaccaaaacatctccttttgtgtaaacggtgcagccacaaacaccattaagagacctcatatgtttatctgtttgtctgggccagagtgtgtcctaaggggaaagtaagaatgagtgggtgcttttgcaggcctgggttttccactgttttgtctgcatctcacaattattgtataactgaaattatgagtaaagcatgatactgggtgaaatctctgaggatgcttgtgatactgatttgacaatccaatcctttatgttaccttcttgaagaactggttaagttttgtccacatagataatgagaaatatacatacaattacatgtatagaagcaaacactccttgcctttcatcttatagcccaagttatcattgcccctctcttatatctaggaacctttgttttacttaaacagacttttgcatctgtaggccttgggacttcttttccccctagatctgctcaaaactttgccaccctcataccaatggatctcaggacttgatatataaatatcccaaattattttgcttatcttatatgcaggggctatttggggatgcatgccagaaaaagaaatgtgttgttggggctcaggacatatcaccccaaaatatgatagcaggagactaaaatatgtcccctaaaaatatttatctttgttggcatatttcaagctggttattttgagaaactgcagacacaagagtaggtcatgtgaaaagctgcccttttgtaaaggaaaattacatctgtaaaggaaatctatattagtaaaattatctatatcaggaaaagagctgctcctgaacaatttctcccctgaaggactctcatttacatagcaagaaaatctttattcaacatgtatttcctcaccttcaccctcccacaacatgtccctctttcagaagccccctccaataaaccccagtccctactcctttatggaattcaggatgccattcaagtgtcaatcatccagcccttcaatgagtttcatatttttgtggaacccaacactaagaaaaactcccctaatatgaaggaaaagaggataagcataaaggtgaaatggtgaatgagagtaggcagataaaagaggtcagagaagcaggacggagtgcttctgacacaaaggttctcatgctatgagtgaagccacctctgcaaaattatgacagtgagagaaatctggcatagttgatttaatcttgcttctgacttccaagctgacttgatcattactgggtgtaggccaagctaactttgggaggaatttagtttatagtttaaccttaaggcaagcatgataatagctcttctcaaaactcagcttttgacaaactaatagcttttgacaaactaataaaaaggtcacgaggttaggattatgagaggggcctgagctctgctaaagtgtaggtgtagtttctataatcacttactgctcaggagtcatgtgtctagtgaccttcccaattgctcctatagatagcatcaatattgtagaagttaaggttggttttttttttttgaggtgtttttcagactaaccccacctggactcctggcttatgactcaactaatcctgtggccccacccagaggcagactgagctcgtgaggaccattttctatacccttatggtttcactgcccctcaaccaatcagcaacacccattccctaaccccctgcccaccaaattgtccataaaaatactagccttcaagccttcatggagactttgagtgataactccagttctaccaagtaggacagccttgtgtcaattaatttctttctctgctacaatactggtgtctcagttgatggattttgtctgtgcaacggcca

SEQ ID NO: 916370 - DNA, 4001 bp, Homo sapiens
actatcctacactggtaggcaaatttctattactaagtataatattccatcatgcctctctgtgtgaaaaacaagaaactgcctatttaatcttttaccaatgctaagttttccaaaaaatgtgacctacctttctggagttctatgttgggtcctggagtaaatgctggctcaatactcagtttagtaaaagctataagaaatgattagaaatttgtttaattaggtatgggtttatgaaatactaaaatattacacattagcaagatgaagcctttattattaaatgatgtcttcacagttttgatttttatggagacttgcttagaaaaacttacaatttttcaacaaaattcccaacgtagacatcaacgaaaggcatattatccctaaggtcccagaaattaacctccacagagtggtcttaaacactgtagagaaagacagacagagtaatgacttaaagagcaaactcaggagctgagttcttaaaagcagaaactagtgacggagaatccacaacattctttcatttgataacggagtcatcttgccaataaaacactgaagactttccaatcgggacttcacccaataccaacatttttatgtgatgtatcttattcttcaggaagattattcaaacattttcttctctaccagctctgttgcagtaaagtgaatttaccatttattttaaattggcagaggtgcttaaagatctggaggtagaagatattaacaagcaccacgttgtgttttatggacttacataacaggcatttatttttattctctcaacaaaatcacaagatagatagtatggttctcattacatagatgagaaaacataaggtccaataataatgttattttctcaaggtatcaaagcaagtaagtatccaagtcagaaatcacatgaaagtgtgtctagctcaagaatctttcattcaacgtagtctaccattgtcacaataatactagttgagagtatgccctctcctcatctcagtgcaggttttgctctgataaatgtctagctgctcattggttcgtagagatattatagggaaaagaagacataggaacattctggacttggtgtgataactgataacaaattgatgggtaacaactttgaggcctggcttcatttcacagtatattgaacatacataaacaatcctttttcccctagaacattccatttgttcatactcaaaattacttgcttttaggcctttcacctaaaacatttcaacattaggagattctgtgctaacgtgaacacactctcaaagagtgatgtcattaacaacagtacaatgtgtcaaactgttcatttgtgtaatttttggatgtcacaacataaatagtcaattaaaaccttttcagcattgtgtcattaatatttggcattttctattgctatactagaacactgttgctcacaatttaaccaggctaaagttcagttctcactcagaatttaaaggtagccctgtcagaaaccactcttcaaacctgtggaaaaaacttcatgaaatcatgtctaagttatacaatgaagaatcaggaaaatataatgaatgtggaaagtgctaatgcatgaaaatcctaaaaacatccactgttaatcatgtccttttctcttaaagcattaccccaaaatcagccaatccaagaaatagcttttctggttatttttaatttagtgactgaaatcacacatacctgccatgagaaattatgttccaagagcgaagtagagaaggcacgatgtgtactttttcagaaagaacagcgttgaattgttgaagctgagctggagattaaagaatctgaaagttgagtatgaagaaatttagcaaaaatagagaatgaaaaattgtgtatttaaatgatgttcttgaatcatctattggtgagacatgtattatagtgtgaataagaagcagtagaatcacaagcctctgaagtgttccaggaaccacaatacaggaaattctcacagtacttttgcaatattaacactttggcaaggactaaagaaggtgagaggaggtcagagggagttttgttgctgttttgttttttattgtttgaaaatcaaattcattttaaagggttatctggaaaatgaaggaaatgatgggcaaaccaaaggtaaatttacttagcataacaaaattacttacagaattttcctcttttaataataaacatttattatttaccttgtacttaacacaatttaaagcacttggcatatcttagctcatttatttctgtaaatggcttgatagtaaagatatataaatatcttcaatctatcaaagagaaaactgaggcatacagagctaagtaatttgcccaaggtcacataaattgggatttccatgtctcactctgttcttctgatctctacctaattatcctggccacgacaggcaaagttcaaaaaagtagaactggatgggtttcccacttggacgcctcattcacgttagccttaaaagcttttttcaacacctcaattttcattttcttaaagttctttaagcacgacttcagcttctttattttccttatttttactaatacattattatattgtttagtgtgttatctaattcagatactatactgatacttcgatatacactttttcatctacagaagagtaaccttgttaataggaatatcaaatgtggaacaggtcaaatttccaatgtggaagagattggctataataagaatcttgaaaggagagatttcgatccatgatttagtatctggaaatacaatctaccatgcacccccatacaaaagcagacactcaaataaacgttttgtgtattatattttgtatattgtttatgttcaagcattataatattactatagataaacccttttgtaaaagatgggctttcaaccaacaacagaaaaaaatgaaagaaaagactactttgacttctcagtttttatgaagtcaaaactttccatcttttcagtttgcattgtgtgcctagagctgctttcattgcaccaacaaatttgttgagctataaatcctcactgaagaatataagcgtaaaatctacttcatccagactgtatgcaaatcttagttgaagtgatttatttaaaaatcctttgcttacttgaaatctattcatttttagtgttagaaaaagctggtctggaagaaacctgtctgatactatttttcccccatgtaaaattgcctcaaaatataggagattaggggtttgcttttagtttttctcttgagagagtacaaatttatgacagaatgtgcaatagggattattactacactttcattactaacacaaccacctttatttggaagttagaggttctaagtttttagaaccctgtttggtgagaatacgtccatcagtcattgtcctttttttcatcttagttcactgacttagaaataaaaatccaacaaatacaagtttacttcaagaactccaggcttaaatatttaagatacctaaacacacacacacacacacacatacacacacacagtaaacatatatgtatatacctctttaactctttctgagctgccaactctgattgttctttttttgtttgtttttgtttgtttgttttttgagatggagtctctgtcacccaggctggagtgcagtggctcactcggctcactgcaagctccgcctcccgtgttcacgccattctcctgcctcggcctaccgagtagctggggctacaggctcccgccaccacgcccagctaattttttgtattttttttttttagtagagacggggtttcaccgtgttagccaggattgtctcgatctcctgacctcgtgatccgcccgcctcggcctcccaaagtgctgggattacaggcgtgagccaccgtgcccggcctctgttctttctatttatttttgtacgtagacaggtgaatgatttccatgtactgtatctctc

SEQ ID NO: 916371 - DNA, 4001 bp, Homo sapiens
cacacttggcccctcattatataagtttgactgaaaatatgtaaatgttttatgctactataaagtaagttaaacaaaaatgaaaaaaaatccataaaaaatgaagaaaaggaatctaactaggtattgttagtgtcttcactatagagagaggaattacttaaagtgattttaaaacatttaactgtgcatgctcaatggaatatatcttaaggattttttaaaaccgcaaaacattttaatctgttttaagtaactattattataatattatttctatagtgattctgaaactactacatatgtatagtgggatagagcaattatgtaatttcttactatcactggcaacaaaggtttttcaatatatgagaaaagatttacaaatatgtcatcacaaaattaagttaaatgaatgaacatcataaccccaaggctcacattgtcaatctaattcacataaaatacgtcttacctcaagctttaataaatattagctaaaggtacaagacataaatattagtatgtgtcacttaaatatctgggagccgaaaatctgcacatttttgcttcagagagacatttatgaacagagtgtggaaaaaagtctgcagagaagtcactacatgttgtagtctttcaggtttaatatctctaatttccaaaaatgaaataaaaattgagtgtaggaagtaaagacttgaaaatatgggaatctaaaaattcacatggaagaggcaataaatttcttatacatagcacgtatgtaactctaagatgaatcactgatggatgatacttgtggaaggactcaagagataagtaaaattttcatgggtgaagttattaaaagagaaatatttagaaagcaacagaacagaacagacagtctctataactgtgattatttgtgtctttaatttctgcttatctcttttgccaaatcacattaaggtggcatgatggaattgcattgtgtatggagggtatgcttgaagtagcaaattaaaatgttgattgctggtgtataaactttattttgagtcaacttggtgaaaagcataaagtttttgagaagttgaattaaaaattagtattaaaggctgggcgcggtggctcatgcctataatcccaacactttggaagactcaggtgggtggatcacctgaggtcaggagttcaagaccagcctggccaacatggtaaaaccccatctctactaaaaacgcaaaaaattagccaggcatggtggcgggcacctataatctcagctactcaggaggctgaggcaggagaattgcttgaacctgggaggcagaggttgcagtgagccgagatcatgccattgcactccagcctgggcaacaacagtgaaactccgtctcaaaaaaaaaaaatagcattaaaacaccatattctatgaatgataaggaggtgaatggcagcaaatattcactaatttgaaattattaattttaattgagtatgcatatttcctcagagaatgtccttaagaaattatatcagacaaaatattacaagtaagtgttagttccacattgataaatgggagagagagagattatctcatagtaaatttgtaagattaaatgaaggaacatagataaaacattctgtatagtgccggaaactggtgtttcttaaatggtaagagaggttgttatttttaaatcattattaatattgaaagagaggacaggtgagagagatacagagacggagaaagaaaagcacccaaatactgaaacagtccaataacacaatggaacaggatacgggaaactaccatgttaattcacaccaattgaaaaaatgaaattaaattccatacctttaaatgtaagttgagatgtttgggcagaactccttttctttgactgtacattcaatgtcatgtatctttcttcatcttgcatcttcaatgtgagtgaatgtgtgtgtatacaggtatgttttgttttattaagtataacatgaaatgaggaaagaataataaatctgctgctaatcagagatgctcctcaaattgtcctttcacagtacatatgagggttcacagtttcacttatttgtgaaaacctcagaggaaatgttttctttttaaaagttgctttcccatgacatagataacacataatttctcaactgtccaccacatattgaattgaatattcttttgagtgctttacaaatttctcttaatttacccttaaagtcaagggaatggaaattatgcccctttttgaggtgaggttaataatatatagctgccttttgttatagcctaaatatttatatcatttgaattagcctccctaacatattgatatttaatttaataatttgcaattgccaagcaattaaattctttatcctaaaacaatattgtttataaatcatgctaataatttaacagtataatttgattttttttaacttttaggttcagggctacatgtgtaggtttgttatataggtaaaatcatgtcacaggggtttgttgtacatattatttcatcacccaggtattcagactagtactacatagttatgtttttctgatcctgcccctcctctcaccctccaccttcaagtaggctccggtgtctgtcattctcctctatgtgtacatgtgttctcatcatttagatcccaattattagtgagaacatgtggtatttggttttctgttcctccattagtttgttaagggtaacggcctctagcttcatctatgttcctgcaatggacatcatctcattcttttttatagctgcatagtattcctttgtatatgtgtatcacattttctttatccagtctaccattgatgggcatttaggttgattgcatgtctttgctattgtcaacagtgctgccatgaacagatgcatgcatgtgtctttatgatagatttatattcctttgggtatataccagtaatgggattgctgggtcaaatttctggttttaggtctttaaggaatcaccatgctatctttcataatggttgaactaatttacactcccatcaaaggtgtataagtgaacccttttctccactacctcatcagcatctgttattttttgactttttaataatagccattcgactggtatgagatggtatcttactgtggttttaatttgcatttccctaatgattagtgcctactggaggatagagggtgggaagagggaaaggatcaggaaaaataactaatgggtactagggttaatacctgggtgaagaaataatctttacagcaaacccccattacacaagtttacctatgtaacaaatttgcacatgtactcccaaatttaaaataaaattttaaaaacacaatatacccttttaaataagataaactattaattcaaggagaaaatatttgacaaattatcagaaatatatttgttgcttaatgacaaaagtaaaaggataatacatttttgtgttatttttgtttatttttacttgctaaattttgttctttaatttataattacaatttctttggccattatttgacactccaaatggataagaagtaaattaagattgataaataaaacacgaaaagtatctgttcatgtccttagtccactttttaatggggttgtttattttttgcttgttgattggtttaagtttcttacagatgctggatattagacctttgtcaaatgcatagtctgcaaaaattttctcccattctgtagattatctgttcactctgttgatagtttctcttgctgtgcagaagctcttacagttaattattttgtttgtttgttttgttttgtttcacttttgttgcaattgcttttggcatctttgtcatgaaatatttgcccattcctgtgtccaggatggtaattcctaggttatcttccagggttttttatattttggggttttagacataagtattttatccatcttgagttgagctttgtatatggtataaggaagg

SEQ ID NO: 916372 - DNA, 4001 bp, Homo sapiens
gaccaaaaattaatattttcatgtaagccatgatttacatactatatcaagccaggtgaacagagagctgagtacatgaagtgcagtatgctggcctatcctagcactgcttggctagatgccattggcttacacagggctatatgaagaaattgtcttacaaaatctgctggtgctactattgcaagaacactaattgtattattttatgtgcttcatgagaactcaggaaaatattttttctgatttaggatcaagattaattatatcaatcttaaggaataggtgtaactttatcttatacacaatgtgaactgaacaactggtaagaattcccttaggtcagtaataacaaggaagcttggaagcaaatgtatagcaagcacaaacatgcctacagtaatttttctggcccaatttattttcccagccctatccttccttcattcataatttaaatggatattatcttatattttatgtatcaatactcagattttaagtctctgtacacatttgtatattaaaaagtagtttatagattaaaaaatagtaaatttagtttaacatccacataaaagcatcatcaggtagatttttcttattatatatcaaagtattgagatttaagaaggctaaaagcttctgcccagagccatacatttagtctgtgggctttagggtctgaataattttttttgtttttttatatatggagtcttgctctgtcactcaggctggagtgcagtggcatgatctcagctgactgcaacctccgtctcccgggttcaagcgattctcctgcctcagcctcccaagtagttgggattacaggcacacgccaccatacccagctaattttttttgtatttttagtagagacggggtttcaccatgttggccaggctggtctcgaattcctgacctcaggtgacccgcccacctctgcatcccaaagtgctgggattacaggcatgagccaccgtgcctggtctgcctcagtcaatttaacaccaatggtactagtttttgctgcatggaagtaagttactattgaaaaagtaaacatttgtttcatgatattgaaacacaaaaaagatctgagtcttcagataataacaaaagtgtcattttgtgggggcagggggtgcaggggaagtttgcatttgctagatataaaatgagattgtacacgagaatgttcaatacatatggcagaactgccactgcgactggtaattctgaatttctggcctatgtcatcttaacttaggtcttggctatttcaacaagattgttttcaaaattcctgaaaaagcaaacaaagccaaccacagagcagccctaaggagcaaagattaatgtttttttgtttttttttctctcttctcgcattcccagtagattgttctaccaatcctatagggcttttacgaagattaaaaatattatatatgtataagcataaatatatatataagcatatatatacgctttaagtttatataaactttaagttttgtaggaggaagtttctgtaaaaacacaatttttcagccttttcttcgaaagtgatgttcttatgctacaacacacaggattacacatcgtcatattcgcatttctcttacctcatggctctgaaaatgcagactttttattgttgatgctttcatgaatctaaataatctaacagacaatttatgaccatttttatattccttattatgatcaatgttaagatgttaaaaatattctaagataattctcttcctagaagaataatgaaattttaaatgcggtgatggggagcagtattcctacctttagatttctgcttcgatttacaacgattcttgaaactcagcgtcatatacccatcttcattctccatctcttcaaatgtctaatgtcttattatccagaaaatagtacaaagaaaatggaaactaatctcaaccttggatatgtctctttggcacaaggtactaaaagaaaactaaaaggaaggccaaaaatagtcaaaatttactcagacacagatgtctaaaaccacacaggatgtgttggtaaatgaaaatggatataagcttgttaatatctggctacaattctgtgaatttcaaggtaaaggtagctagtgtgttccactgttttcaacaaatggacttgtgtgttcctgccacttgtgtgcggtgtattagaaacataattccttccttcatgtcttttataataaagtaagagaaaaaataaaataaaacaaataatctctaaacaaacagaacaaatgtctaggtaaataaaaattcaaattaaaaaagttaaaatagcaattttgttatttgggacatatttgactagtagagtccaaataacgatggttagatgggacaaaaataggaaaataaaagatcagcaagtctcaagttagtgaaaatcggaatcacttgcaaagaatttaactttttaaacttttttgtttgtttgtttgtttttcagaaaacgccaggcagattttccttcagtaggtgtggcagtttattttgtgtcaacttggctgagtcacagagagtccagatagttgatcagacatcattctgcttatttctgtgagggtgtttttggatgggattcatatttaaataggtgacctttgagtaaggcagatttgcctcctctgtaatgtgactgggccttattgagtcagttggagccttgaatagaacaaaaagacttgtcttccctgagtgagagagaattctccagcaatggccttcagactatctgcagcattagctcctcctgattctacagacggtggactttgcatttgaattgagccttcctaggtacccagtctgtccatgctcatttgcagaattttgacttaccagcctccataatcacattccttattttatatatatttcacttaacacgcacacacacacacacacacacacacatgctaatggttctgtttctgctacgtggccactcaatatcaatccattgatttaacaccgagtgtctggggaaggtggctgactgtttcccacagcacatgttgtgttcacctgattattgagtctcctcctcaacactggatgtcacttgtgagtatttacatgggaatgaatatttacacacgccgcgtccattctgcatgatctctatatgtacctcttagcttctcattcatttttctattttgttctttttgagtttccgacaagtcatctcacctattagtttctgataagatgatttagatgtatttctctgagtgcttatccttcctgttaggttcacaaccagacatattgtccaaacttctgttcagtgggaagacttaccttcacttctgtctttcacagtcttctcctgaatgggactgtagtgtggcatctattccagctgccgtattttacataaccactgataaacttatttttttcaactacttcagtgtaagatcgtacagaaccctcttttccatccccaacccgggtcataggtatggttgaggtggagatagcaaaggaatgcgaacatgtgccatcggagtctgagccatctgctcatgcagtttactgtgcttctttggaactgttcaggccttgcctccaaaatggcacaattatgtttgtgataaaatgcttctgtgcacttctaaacatagggttcattgggtcaaagtggtcaagttggatcaagttaatggtggtgaacatatgtcttataaaaatatgtagtaggtttactgcctacttttcaccaggaacagttggcatgatagcatcaatgtaatgaatctattgtgtgcaaccagttctgaggtataacatattgggagctatatcaagatgatttagttccctctgggccatcttataacagagatcaggagagctgacatacacctgggcaaggcagcaaagaaatacttgttatttctgtttgtaaatacaagccggaaaccatcacaggttctcagc

SEQ ID NO: 916373 - DNA, 4001 bp, Homo sapiens
tcaagacaaagaaacattctgcagaacaggatatacaaatatctctgcaagcacactcaagaatctgataacattgtttgcctctggaatggaaaaaacagtcactggagacaaaataggaaaaagactttttaccctattttcttttgtaccttttgaattttgaaccatgtaaacatattatctactcgaaattgaaatacataaaatttaaataaaaataatctacatttcagaagtgctttgtaaactgtcgttattaaaagagcagtaagtttaagttgatgccaagtttaagaataggacactacttcatgttagctgtgttgcatacaaccgaaatctaaattttaaatttgaaaaatggaagtattttcagcaaatctttattttaaaatcaaaggtatctcatagtgcaatagtgtagaaattacgtgtaacgagcaaaactctgtgaagtaagatgatatttaacttctaattttgattcctttgcttaataacatttaattaggaaattaaacttgcctatttgggcttcaattttctgattaaattttagataaattattctatatatgtgtgtatctatggagtattctgaacttcttaaagaaaaaaattcataatgagagatgccttcataaatagagaattctgcataataaatatttggactgatgaatccaaaagcattaagatttctagaaaaacttttaaaaatacatttgcatcacaggagaacatttaatgaaatacacaaatgttcatttttatgttatgctaaattttaaaaaggtatcaaaccataattgaatttgtgtaaccacaagccaattcaagaagtaaagtaaatttttaaaatttactttaagtatatattgaaagcctctaaatagttccaactaggttccaatttatcaccagttgtgtgtgtgaccttgaacatatactttgagatatgcattacttctaacgtaatatttctattccttagaaattaacatagatacaattcaaaaataggaaaaggttacacaaataaagatatccaatgctatataatttatggtaatagaaataggtctaaatatcccaagtatactagaatgatttagcaaattaaggcaacactctcaaaagacattaaaaattataatagtaaaactatgtagtaaaaagagagaaagcttagggaactaccctaaagaatacaccttgtgggagttcactgcctacgatacaaaatcaaggattaattttggcatttacactattacctgtctgtctcagataatattctctcagggctctatgtaaaaatggctcttttgccttcaaatcctcagtcacagagactattatctgtagtttcttgatactttttcttccctgtcaccattctagtgcaacactgtgaagttaaaaaaaaaaaacaaaactagatatgtaaatcagtttctttcctgacaaaaatcttactcgtatccaccagcaaaactattggtgtcctcctcattccatagtcagaaaaacagccatacctagaatttaaacagctggtccaaggttactccgaatataactaaagagataaaattctcccaacaaagttcccgctttagctaagagcaagaaggaataacggcaatgccctaagttgggtttctaagatgcgatcaaagaagtgaacagttagaaaagagtttacctgagacctaagatcagatcctgtaccatacaccaacttttcatattccaactctggactttaaactgaaccaaaagtatttcctcaaattatcctcaattcttctgcaccctctgctttaaacttattctactccccattcatccatagcctactgttgctatgcatcgtcttccatgctaccttggttaactcacatttttgctgtggtccatagtcattctgggcttgggttgccgtaggcaactctaacatggaataaataacactgtcagtcatcttcagctaagatctttcacatgcagttgagagagttaaattatagaagtgtgaagggatatgtatcagtgaggaaacagcccaatctctaaactgctagcaggaaacttcacaaaagcagaagtaatttttcaggaaatgattcaaatttgggggctgcctatagaaattaatattgtaagttgctatttttttgccccatgacactgtagatgctcactaaatatatattaaattgattccccatctcacctaattctgttgagcaaggaaaaattgctctcaagtccagcaatttcagttatggaaactaaaataaaagtgagagtggttactagctatgaatttctctcggaattttttctctgctttgtttccttctgaaaaagtagatgtatgccaaatgagactgacttcatcatttcttggaacttttgggcagtgataagcaataacgaaatggactgttgggtgcatatgcctggaatcacgggagaaatagactattacccagatatattttgtgaatatgacatgaccacatcttccccaaaaccttgtccaaattgtgtgatggtctttacccttcacagtatcagaaattccattatattttttctctttgttgtcttattttttttattattatacttcatgcaaagataactaaaaagaagagcaaagtaaacaaatacattctaacatcttagtaatttgtttttagtaggtgaaaagttaataaaaagttagagtaggccaggtgtggtggctcacgcctgtaatcccagcactttgggaggccaaggagggtggatcacctgaggtcaggaattcaagaccagcctggccaacatggtgaaaccccgtctctactaaaaatacaaaaaaattagctgggtgtggtggtgggggctgtaatctcagctgctcaggaggctgaggcaggagaatggcttgaaaccgggaggcggaggttgcagcgagccgagactgcaccattgtactctatctagcctgggcaacaagagtgaaactccgtctaaaaaaaacaaaagttaaagtaaggaaacagaaagagtattgaaactcttaagagtggataagatcatcaagatagactgcataaggataaaagaagagaaacagggagtgctttatattaatttgttttatattaataaaaacaaatatatttctgcttccagccatgacagaatggcattagacttactctccaatcaaaatacaacacatggcaagacacacaaggcagctattttcaggaacacacaggcagcattgtgatccttgagagaatacaaaggtgagtgcaatgatcaccctagctttctatctaggaccactttctagtacagagcacaaaaatgaatcctaaacagaacagcagtcttactaaaatgaggaggcagatattggagttttgagctgcttaaatggctggaatttgcagggcaggataattcacaagagagaggcacccttaagactgtaggaattcactgtatgtctgtggccaagttctaggctgcgcagacataggacaaaactctgcaagtccaagctgagatagttcctgcagggccaagagctgaacagaaaggacagaggtgatgcattgcttagtagcaccaaccaaaaacagagcaaaacttaacattgccaaaaagagtcatcaatagtttagctgcctctgagaacaaattttcacgcccttaatatgaaggcaaaacaaacaaaatgtggtctacacatacaatggaatattagtcttagaaaggaaatcctgtcatactttataacactgatgaaccttgaaaacattatactaagtgaaatgaactgatcacaaaatgacaaatactgtgtgattccacttatatgaggaatctaaagtagtcaaacccatagacaaagaaagaagaatggttactgaaagaagtttggagggaaaaagaaaaggaagttgcttaatgggtacagggtttcagtt

SEQ ID NO: 916374 - DNA, 4001 bp, Homo sapiens
tgttacatatgtaaattcatgtcacgggggtttgttgtacaaaagccttttataaattaaatgataatatgaattatattttataggtaaaattagacattgattgcgcatgtaatacctaactcagttattttacatatggagtaaagagagtaggtatcactttatggatgaagaaattgaatgctagagatggccaaaatcataaagcttatttaatataatgttaccaactgtgaataagttataaatttataaacacctttaggataaaaagtgctttaacatacatgtcagttgatttgaatattacacaaatctaagataaatatggaatgtttcatgcctgtatttgatagaaaaagaaactaaactaaactacacagaggttgcaaattgacccttcaaatctagagagcggtaaaagtttgagtaaaattcaagtctgactccacatctatttcactatttcaagctgtcccaagttgtgagcgactttaccataatatagttaataaaataaagggaaaaaagtttttaagttttggaagacttgatttaaaatacaatatgaacataacatgaaatcaacataaatagaacatgaaaagaatcagagtaaattgcttgcctatgccttatatgcttgtatgaaattcttggtatcttaaaattgtataaaaacaaaactacacacttatgtggtaaaaacataccccagctgtgtcgagacctccgaccacgaatccaccccatcaaatacttataagtgcacgtctaccgcagagaggaatctaaagtcttcaatgcacaaaggattcctgaataaaataaaactgggcatttgttttttgttctctttcccgtggtgagataaaatattttgaatagaaaagtaaaatgcagaaacttttcccctgtgcatgcctttaagaaaagaatagaaatgacaattcacataaagccaggcaaaattaattttatacatttctcttggttgtaaaataatcgccaattacttcaaaatgtcataacaatataatgaacctattaattcacctacattgagatatttaataccaatattttactttactgatattagataacaacacacccagttttctgtttatagtcgtttattgcttcttggccttttagctaagatcaagtgtttccagttgtttattttatctggcaataatttagttttctttctgcaagctaaactcaggtaagttatatgcacttttgttgaatgtccttttctagtgcattttaatccaacgtgcccatatcatcatcatcaacaaattatcatcaccatcatcattaacaaaactaatctcacatgtttatatagtaacatcttagcaatgcacagcagagcttccagaaaaaaccatttaataaataagcatagtgcttagatttcaaaaataaaagctatttcatatttgattatgatagttggaaagcacagatataacttgtttcaccttgcatgtaaagatgtgtatcaaaggtaagtgccccctacagcatcagaaaactcaaaaatttgacaatttaaattgaatctcaattcttctcatcctaaatgtaaagattcatttttctagttttgcttagagacaaggcttcttcttatagtaatattacaacttctgattcttcaataagtatatcctaattacctatcatcagatacagtgatagaatatacatcagaaatgataagcattccgtatcctcaggagttctattcaagcatctaagaaacaattagaattaccttatagtgtaaatatttttatttttttgaggttgaaatataatttctcatatcttgaataataaacacacacacatacacacatacacacacctgctcagagagggaagatcttgattcttgtggataaaagccttctataaaactagaaaatttagatatgtcctcagttcctgatctagaattgaaagtggagatacttagtgaatttctatctttgagaaagatgtgacaaatattataatctcatcttcctgtggaaaaacataaaccacagtacttccgccttatcactacaaaaatattgttaatttggtaaaagagttaagaccacccattgttggataaatgttaggttggtgcaaaagtaattgtagttttgccattattttaaataacattttaggatttgaaaatgatgaatttaaatgatgccatttaatcctaaatattttagagattcaattcaattccagttaatacctcaggttttgttgtagaacttacaaagcagaattctacatgtacattaaattacaaaagtcaagactaggaaagtcacaattgaagatgaagaaaatgtgggagccttgttttactagatagtaagacctatgttaaaaccgtattaataaaggcaaagtggcatgtggggcatagatagacaaattgagaagggtaaaaatacagacaagaaaaagtcatgtgcatagattaaaaaatataaggtaacattgcagataaagtgggaaattagctcctattcaataatttgtcctgggttactatcacactggcctttaagttacaaaaaattagtcctgggaatttttaaattttaatataaaaaacatgaaattgcatctctgtcatatctacatcatatgcaggagaattagaaacttaaatatataccccagtatacataagaataatatatgaattgataccaatgaacaagataagctaaatatatattttatgtttattaatttaaaatactaacataagacatcatataaagtaatataagatgaacacattataacattttaacaaaaaccaaagctattaatcttaaaactctgaaatataaggaaggaaaacagctttcatgtggtgatgtgttaaagttggacaataaatttattcaacattttttttctttagcgaatgctatttgctatgcacttttctagatcttgagaatgtcaaagtaaacaatccaaaagaaagtttttgcccacatggaaattaattactttttttttttttttttttaagagatggagtttcactcttgttgtccaggctggagtgcaacggggcgatctcggctcactgcaacctccgccacctgggttcaagcaattctcctgtctcagcctccagaataactgggattacaggcatgtgccaccacacctggctaatttttgtatttctagtagagacgaggtttcaccatgttagtcaggctggtctcgaactcctgacctcaggtgatcctcctgcctcagcctcccaatgtgctgagattacagacgtgagccaccacacccagctggaaattactttttagtttaggtgatataaaatgaataagtataaaacaaattcaaaattaaacaagataggtgaatataaaacaagttgaagaaaatatgttattttctgacataccaagattcttttcagctaatcaacattttctattagctattttatatagtaaaaatagatctatatagaggaaatataggctgatattttctaacaactacattttaacaaatatttggtttttgaaaggaaatgaataaatgagtaaatgcaggctttttatgggaaaaacctgaatcacaatttcctgaagagttatttttatatatgtagttttcgattgaatagagattgtctcttaaatacagaattgagaaaagggggataggaataggataaaaaagaacatttgaatatcctacctatttcgtttagttcaaatggcaacttacagccaactgggaagtccccacacatacctaaaagaagatttctgaaataaataccatgataaagctaagcaccagggagagttttattgtcatatataaaggtccctaaaccaactgacagagtgtggaaaggattcttaaagaagaaaattctaaaatgggtcctgtatgtcgggttaaaacaattagtt

SEQ ID NO: 916375 - DNA, 4001 bp, Homo sapiens
caggtgcacatggaacattacagtgtcctctctgccctcatttcctttcttttttgttgttttcatgttaacaggccttctccgactgccctcattttcaaccctaacctgtgttgtgcctaagactttcctcctgcccttccattcctacctgcaggcttggcacactttgcattcagggcactgccagccagcacgtttgcgggcagtcagagcagtgtccaggcaggccccgtgatagtgatgcccacagctggtacagaagaacaggtcacacaactcccctggcccctcacacactgcacagcgagcctcctctgcagggggtagagacaccacaggtcagctatggattccttgtaagcctcagcacattgctgtacacaaaacaggcactccatgggcacagaatgaacaaacaacaaagttactgagtgcctgcccaacgtctgccagctactgttctaggcactggagacaaaatgataaatgagacaggcaaaaccctggtgctcacaaagttcacacctattttagtggggcagaccaacagtaaataatgctatactttgatcagtgctctgtagagtacaaaaatccaaggcacatttggtctctcatttgccctatgaccaaagatcaggacttctcacccagatatgcagccccctcactgtgctctgggcatagcagctgcagtgttttcatggataggaaggaaccgctggcagtcgcgcaggggaagtggtaaagccgtggacatccaggtgagcggcaagggatggaggcaccgagcctggtgcagtgggagcagcgctgccagggtgaaaaaagagcctcagtgtcagccagctctccccagacaaacagttcaggcactagctctgccccagtatacccatggtccttctcattccaacctgactctcagaagcccaccagccctgcccttcacctatgcaatcccctggcccagccccacctgtgagatccctgagaagatggccttgtccacaccacatagttctgggccctcctgcccccatacgcctgccgaccatgcagcacaccaatggtgagcccagcaggaccctttacaggtgggaagaggtaaagagaaaggaaagaattaacaaaaagaggattgctggctcaggactacccagcccttatcccatttcctgccccattctcctcactcacctccaggttctcctaggtgggcaggtgtaaggccctcagggaaaccaatctgtgataggtcctcactgggcagcactgcctcattgggccctgggctccccccaggggacaccactggacaccggggccaatcaaatggcaactcaaagcgccgtagctcccgctgcccgtgtagactgggctccccgcagttacagagagcacaacgccgcaccggacccccactgtggacacacaagcatcagtaccacgccaggcccccagcaaccccatgatctggcatgcccatgcttccccaacactcattttcctaaattctcttccttgaaagccctagactctcaaatcctcatgtgccctcaaacaagctacctgcagtcctgaggagtctcctgaagcctgggactcccagaactaaggacagagacctctcccacatgtgggttgggcaggtctgactcagtggcacttgggtcctcagaagctgcaggtccatcagctgaataaacagacaaacagcatgtgtcagccatcatccctatttaacacaaagtccactcaccagacgcatgagattatccaaaacctgagtggatcagagtgatgatatttcaactgttgtcccaaagaacaaagttgttccattacttatctgctacatagacttagctcatgtccttgtgccaggaccagaaatgtaaggttgccaatgaaatctaaaagcaaacaaacaatttgtcctactcacctgccggttctgaatctttatcctcaccagccagcttctggctgtccatccctctctccgactgggcagggccctctcggggagacctgttggtgccaagaaagagatctatatgcctactaagtcttcccaagaagcatttttcccagaatcctgggaagaaggcatccagaccctccagacatcagagcaaagccatactacaaactcctatactgacaagaaagtcattctccctaacctgtagggtcacttcctccccagataaacacatacgctcttctcacactctggagagattctcaggggatccatttgactttcccacttccaggctcctctgtaagagttcctggggccatagcatccaactagaagcatatccatttgtatctaatactgctctttggcttgcctctgggtttttggcttttggtgagccctattcccacacctttccctcaagtctcaagtaagctcccattctagaggccagtctgtgccaacccaggggtagtcatgacccaggaagcctgagtccagcaaaaatccctctcccagaggcagagtctgaggcactgcaagagatgtaacacactactggaactacagcctagctatggatggatctcccccaccgccacttgtttctacgaggacatcaccattacaaaagaagaaactccctaatttccacccacttccaacccaaatccagctcagaccaacccccggcccatgccctaactgagctcagggtctcacccagcctgaaggtctcaggtcattgcccttagcaacaccaactgcccttcctcttcagatatccctagtagttaacagaagtggaccttgagagttactgagcatgtgtagccaggcctgaggctaagcatgctgggagttgtagtctcaggaagcatagagccactcagaggagttctaaacagggcaggacatagcacagcacagcggagtagcttccttcctcttccctcaagcagggtttccacacacatacatgggggtggggaataacggtcccttgtcccttcttctaagaaatgcgtgcctgtatcagagccaaatgaaacacactaaagttatacctaaaaaagttgagacttacacctttgggcattattttcctagatctcagagggaattaagcacagtgggaaaaaaaaaagaacaataattacagacacgaagaataggaaagggattctatagaaggagggagaaagtggtaagtgttagcagcttgtagtgggaaatgtagaccctttctcttaatcagagaaggtatacagtgttcctagagaaagtggtggtgaggtgggggaaatccctaaaacagaactcaaacaataaaagtttgagaaattcatctctcgccttttccactcttcttgactaaccagagtgaccacaccacccttagcaaggacagcccgtcctcccaaactggaaggcaaataccccagtcagccacttacggttgaatgactgggacagatgagacagggggaaccctcaaaggtgccccaaatcagtaaatcaattccctaagaactacaatatcactcttcctgccctgaactcaccctttatttccagatagtggctatgcccctctggagacatgtcacaggaaagaaacttcctttttcccctaacactctcagaactcactggataaagtaaagcatcacctgatacacatcatctccattcccaagccatctttcccaaacctgccacacaaccacattcgaaaggaaagcagggtgggtcatctggccggctcgtacaaaagctgctccagaacttcaaggagtccttagaagctaccatgggaagtgggaggtggagatgagggcagcagccaggcccctcttccattcagtcattcaaggcctggccacacccggaaggtccaaggggcccttaaagttttctaattctttgcatcttactatatcttaccactacatacccctaaagatcctctacccgctctggtctcaaagttgaggccaaaagagtc

SEQ ID NO: 916376 - DNA, 4001 bp, Homo sapiens
aggtagaaacaatttctgacttggtgctctttcacaatgactaggcagctgtccttgggtgatcacttaatctttctgttcctcaattctctaatttataaaataggaatatacagaccaggccggcgcggtggctcacacctgtaatcccagaactttgggaggcttaggcaggtggattatctgaggtcaggagtttgagaccagcctggccaacatgacgaaaccccctctctactaaaaacacaaaaaattagccgggcgtggtggtgtgcgcctgtaatcccagctactcaggaggctgaggctgtagaattgcttgaacccgggaggcggaggttgcagtaagtcgagatcgtgccacttgcactccagcttgggcaacaagagtgaaactccgtcttggaaaaaaaatatatatatacagtttgccgtcaatatccatgtgttccacatccctagattgcacctacaggcatagcacatttacactgttacgcaagataagaaatcaagagatgatttaaagtatacaggcagatgttcctaggctacatgcaaatactatgccatttaatgacagggacttaagcatcctagggttttggtatctgtgggaggtcctggaaccaatctcccatggataccaataccaagggactaatttagttgtacccacctgaaggagttttctatttttcacttctggttttttgagagacgagggtctcactattttgccctggctggccttgatctcctgggctcaagcaatccttctgcttcagcctccaaatgttttgagttttaaatgttcacagaacaatgcttggttgatggcaaacattcaattttaggtgttagctaatttgttattgggctgagaattgaagatcatagttttataaatgtttaaagagttcttcctaagagcataagcaagggaacagaaacaaaacatgtttggagaatagagaagtttcagtggctggtgtttgggtgggagtgaggagatgaagaaggagggacaggttggaatgaatacctttatgggtctcaatttcccacatctgtgaaatagagaaaccgcccgtaactgccatatttacttattcaacaaatgtttattgaatacctatttactatgtgccagacacctttctaggaactgggaatatagcttgaacagaacacaaaatgtctttgccattatgaagtttatgtttttgcgggaaaaacggacaaaaataaaattgttaatacgtatcttgttatgctacctccacaaaaaagcaactgcacaaataattacaaaaagtgctaaatgatttgaaggaaacagtgattaaatggataaggtgaggcgtcgctgaagaaggatttgtttgggaagggaaggaggtgacatctgagctgagacctgaataacaagaagtacgcaaaacttaggcggaacgcgacgtaggcagagggaacagagtgcaaagactcggaggctgggtaggaagcgtttgatgctgctgccgggtcaaagcaaaagcagaagacagtgagggagagagcagtggagtccaataaaacctcgacctcaagattgaattttattctcagtacaaggggtagaaggggaactcagcaaacgagtggtctgattttataattttgagatcactctggcggcggaatgcagaacagattcgcgaatacgagagaatgagcaagatgaaacacttgtcagttaggcctccatacttaaacgctctccgctggacatcgccgccagcaaaaaccgactccaacctctctcctgccagcgtcaaggggaaaacaacaggaactgagcagaggctgcagctacttcgtcctgaacccacccccagttccctacacagcgcagctccccgtcctcacctgcaattgaagaaactaaagaggaacactcagatatctggcccctcttcctgactcacacaaccgcctctagtctttaggttccatgccacaggcttaaattggcgggagaacactaaacccaacccctttacggcggccggaagagaccaagattactttagactcgaaataggaagttgccccaccctgagttccgcccattccgttctcccgactgcgcattccgggggtgtattcttggccccgccctcttcacggtctttacactcccctatgaaagaacacccaatcaccgcctcgaattgcgttgttatagaaacttttgttaccgcccctttttctcccagcaagctgtgcgacgcgccgggcctcctcgcctttgtgccatccgggtctctcgcgcgagcgatttagtctgaggcgaagcttcggagcggccggtactgttgaaagcgacaagtggaggcgccgctctagcggccgggactctgaactatggcggtaggtaccgaatctgagtttaaagccagggatatttttctgctacgttccaacagtgggtgaacggctcccagaaccttgttcgtgtgtatgtgtgtagacaaaatggcgccgcggccttcttctgcgcccgccatcatggctgcctgctgtagggagggggaagtaaggcggtgttggtgggggtggggagccgcagggagtgcctttttttttccagaactttcctcctctcttccccaaccctacgttcctttcgcctcactgaacttcctccattttcgcttattcaccctggctagtgatttattctaagttttttttagggcctgagaatttgcggtggagaaaggggctggggaagagaaagacgatcaggagtggtctctgaaaagtattgggtcaaaaaggcagtgtctgtaaagggtagtgtgggagaagagagcgacttgtagctatttttttttttgtacgctcaatgagatgcttctagttgcataatttcaattagtgttcgtccgtgtaaaccttattattgtgtattaacgagctaggaaggtattgctgaaagggagtgaaaattcaacttaaaaggttgtggaactaccaattctgactgatgcgcggtttccgaagtggcccgtgatgtaatcaatttgaagtccgagaagcgttacagttaagtcttgtcactgaccttgttcctttaaatttaaacccttcgttggccgggcgcggtggctcacgcctgtaatcccagcactttgggaggccgaggcgggcggatcacgaggtcaggagatcgagaccatcccggctaaaacggtgaaaccctgtctctactaaaaatacaaaaaaattagccgggcgtagtggcggacgcctgtagtcccagctacttgggaggctgaggcaggagaatggcgtgaacccgggaggcggagcttgcagtgaaccgagatcccgccactgcactccagcctgggtgacagagcgagactccgtctcaaaaaaaaaaaaaaaaaaaaaaaaaaaaaaaaaaaaaactcttcgttgaccccagaggagctacagttcgtaaattatctattctgaacaataagcctgcgtgtgtataagatacccaattctgacggatccacattattttgtgcttacctcatttttattccgttaaaaggaaaatgtaaagattttgcattcctttttactgactaaaaaattacatcattttcgataataattatgactcttaaacatagtgatagttttaaagtttgctcttcctaacgattggaatgcctgggattaggcagatgattttctttttcccccatacccctctattatttaggtgattgagtttaaacccgtttcttttactgtcttcctttgtttagtgttttgggcctcagtatacttaaagagtaatactatttttcttgggttgcaggtttttttgtattttttcgagacggagttttgctcttgtcgcccaggctggagtgcgatggcgcgatcttggctcactgcaacctccgcctcccgggttcaagcgattctcctgcctcagactcccgagtagc

SEQ ID NO: 916377 - DNA, 4001 bp, Homo sapiens
gtcagcattttggacctcagtcacttcagtgacaccagttttatggttaattctgagctgataattacaaatagacctttcccatttataacttatttgtaaaatgatttctattataaacataacatatacattgtataacaattagaaaacctgtctgttttgatggatctcaagatttaagaaggcttagacttcagctataagatgcacatgccactgtgggaggccgaggcgggcagatcacgaggtcaggagttctagaccagcctgaccaacatggtgaaacccccgtctctactaaaaatacaaaaaattagccgggcatggcagcagacacctgtaatcccagttattcgggaggctgaggcaggagaattgcttgaatgcaggaggcagaggttgcagtgagccgagacggcgccactgcactccagcctgggcaacagagcagatggagaccatcctgaccaacatgatgaaactctgtctctactaaaaatacaaaaattagctgggcatggtggcgtgcacctactagtcccagctactcgggaggctgaggcaggagaattgcttgaacccaggaggcggaggtttcagtgagccgataccgcgccattgcactccagcctgggcaacagagcgagactgtgtctcaaaaaaaaaaaaaaaaaggagatgcacatgtttaagtctatttcaggcggttagctggtggattgctacaattcctctgtaagtttaaaaaatcatgtaagtgctgttttggagtactgtaataactcttgagatgtagaacacatctgcaaaatgagggtagtataaaagagacgaggggatgagggtaatacataagaaataggggaaaggacaagaacaggtaaattaaacttcaagtactatttttgctattgctgtctacactcaactagcaaggaaaaagccttgcttctgctctgcgggttttcttcgggtttaacttgaccaagcaaaacagaccatctgggattaactttttccttttcactgtaggtcacaggctctacgtgtagggtgttggccacctgttcttccaccatctctacctccacctcctcctttgtggccacagcaatgtcacagcccatacatgggggaggggagcattcaggaactcggaggcagatgcatttttttccaaacacaataacctcaaacagtggtctctaagcactttcctatgctcttccaaaacgtgacctcccctcttactcacacatcccctacacacggaaaaggaccactatccgtccagcctgcgctcgagggagaagtttataccttcgtcctagagatgccaaatgcagcagggaaggctggaccgaggcagccgagtgctggaaagggaggcaagaggtgcgggagcggggagagggggaggggaggccggggcgccgcgggagtaacctccaccgcaccccaccgctccgaggggcagccggcccggcccgagtttctccccagaagcctccagccgcggctctcggggaggaggaaggaaggggttccccgtccaggaagcagcaccagcggcgaccgcctccagcctcaccctcctcagccccgcaccgcccattcctcactccccgcgccgccgcgtccgcgcgcctcccccctgcagacccctctcacccagcccgccccgaccccgcgcccgcgccccccacccgcccctccggggacccctaattcattcactcgccgccggccccgcccggcgccggcaaagagggtcgggacccgggcaggggcccaggaggggtggtccgctccgtacctctctcccgcacctgggagccgctgagcctctggccccgccgccgccttcagtgcctgcgccgcgctcgctcccagtccgaaatggcgggggccgggagtactggccgagccgccgccaccttcgccgccgccactgccgccgccgctgctgcctccgccgccgcggccgccgcctaggaaaatcgagctccgagcacaccgatgagttcggggccgggcggccgcagagggcagagctatcgatgcgttccgcgctcgattcttcttcagacgggcgtacgagagggagcggctgagggcggtgtgggaagagggaagagggggaggcagcgagcgccggcggggagaaggagggggccgggccgggccggcgggggaggagcgggggccgggccggcggaggaaggggtggctggggcggtctagggtggcgagccgggccggctggagagcgggtctgggcggcgccttggcgggaggagggactgccggacccacgcggcggcccgccccctgcctagccgcaaggctgtccccgcagccgccaattctgacccggagcgggaccggaccgcggcgggctgtgcggatgccaccagggagacgccgcgagcggccacgccgccccgctgaccggtctccacagagaagctgcgaagagcaccccgccaccctcagggtcggcctatactggcgcgcatccatttactatcattgactgcatgtaaataaacaagcagtcaccaaaagtgggaggcgacttcggggacttagggagaccgggcggacgatttcccacaccggggctgtctgatcgccgccccgattattatcagcctcagcacttgggctgggaatttagccccaggcccaaacaaacacgacagaccctttcaacgctaatcttctcgggtcaggaggcttgtgatattttgctatctttcttgatattttgaacccatcacaaggtctctaaacagggacttcgcttatacccagggcccctgaaatcacaaacaaaagacaactgtttttaagtagagatggccttggtagtttagacctgaggagagtcattcaaacattaattagaagacagattaatcagttaaagttcgtggagttaagacattaaacaatggggcaattaaacatgctagcatacccggagtctgtgttgataaactacctagaaatgtatcttgggagagtcttgaggattgagggctggaaaagcagcgcctgtacctgataggatcgcccctcctccgagactttcagttccattcctctagtccacatcataaaccaccaataaagctgaatttaaatcccagctattatgtctgttaaccaaggctttacatcaactgtcatcctttcctttctactcttacacgggctgtaatctgcaaggtttattccagtctccccctcctagcgccaggtggaaggggcagaagagaaaagtgaaagacagggaaggggagaaaatgtgcctactctatgttaagtacaagctaaatcttttgcacttatcgtatcatcttatttaatcatcacgacaaccttatgaggtaaaatactttttaccgttttacaaatgacgaaacagatttagaggttaaaacgttggcacaagttcacatagttaaaaaatggagtatacttcatgtcggatcatagtcactctactcccagatcatcagtggccctcattccacttgacataaaagcaaaattcttctcaaaaatcctacatggccttaaattatttgatatcccctaccctcttctctgaactctcatcctactgttctcccttccttacttacgtagataaacattggttactggctgttccttgaaaatgccaggcaggcgtcttcctcagggaatatgcacttgctacccctctggcacctcatttaaatctttgttccaaagtgtttttaaaaggagatcttccctaaaaagatcatctttgatactgtaatttcgcccttgtcccagatctgtctcttttcctactttttctccagagctctcatcaccttcaataatacactatctattttgttttcttgtctctctaccatcagaatgtaagctccatgagggcatgggttttggtctgtttcatttactgctaaatttccagcacctaagacagtctctga

SEQ ID NO: 916378 - DNA, 4001 bp, Homo sapiens
agtgcaatggctccatcccagctcactgcagcctggacctcctggactcaagcgatctattctcttgcctcagcctcacaagtagctggtactacaggcatgtgccatcatgtccggctaattttttttttttttttgtagcgaaagggttttgccatgttgaccagactggtctcctgggctcaagcaatcccccctcctcagcttgccaaagtgctgggattacaggtgtgagtcactgcaactagttacttacaatgtttacctgacgaagtccctatccaatttaaacacttcaaaggctatggataattttttttaaaatccccactacaacctcaggaaaaaaactgacaaaagaaatactcaggagtttcacaattaaggaagcctcaaaacatgtgaaaagatatgcaacctcataggtgatcagaaaatgcaaactaaaactgcaaccaaataccatttcataactaccaaaatgacagaaattcaaaattcagataacatgtattcatactaatgtaaggcaatgacaactttcgtccactcctagtgggaacaaaactgacactagcactttggaaaaaagttagcattacttacacacaccctacacttcagtgattccaatcctatgttcacaacctagagaaacccttgaacatgttaaccagaagacatgtacaaagatgttttagcagtattgtttataattgcaagcaattgggaacaatccaaatgtccaccgatagtaaaatgaaaaaataaattggggtatattcatacaaggaaacaccacataacagtgaaaagactaaaactacacccgcaagtatcaccctgtttgaaaaacaaaaagctaaatctaagaagacacagaaaaatgcatacggtccactttcatgtatataaaattaaaaaacaggctaaattaagccacttcatgactacaagaagaggaacagaatgcaacacaattcagggtggttacgtctgatacaggaaaagagaatatgatctgagaggtgcacgtaagggtttgaggggtatggtaatgctctattttacttagtctgaatgctagtttcccgcatggttttattaaactctatataagttgtatcccctgctatgtacgttacataatcatttaatgagcaacaacaaagaaactttgaatactttcccaatgcatctaaattgagagttcaatgtttttaacacttcctataagcctggttgaacagatccccaggctatttatgacttctctatcattcacactgaagaaaacgggtaaaaccagactacaacgcaggagttaacaattaaaaggtaacacaacctaaacagtaagggctgtgtcgtctaatattttagcatctgacaaacaggaattgataatctttcaaaatgtctttactgacaaactagagctaaggacatgtcggatagctcctttccccatacctcaccccattatcagggtccactcttgtatatcatgactacctattcccacctcaccctattcctcattccgtcagtgactttcagccacccgcaggcttacaaggttctgcgtcgccctaggcattttcttaatactcatccttttacaaaagacgtaatccgcaacagcttcgctttggggaccctttagcaaaagcaatgaattaggaacacctgggtggcaccatatcggccagccgttcctgtgggcccagccaaaatcttatcagcgattattcaggtactcaactacacagtacaggctccaggtggttttataagtccacgaggaacgaaagaaaaaaacatcgcaactcaacgtacacaaaccccaggcttcggttcccacataacatcaccttggttctccggcttcggcttctggttacgaaattcactttttccagcgcctttttctggccgctccagcgagggagacgccatttgcaagctgcttccggtggctccggaaatgaaactgttcttaaaccctaccggctaaaacgcctacactcaaaatgagttccgcggaactcagacgaggagatctgcgcagtctccgtgcgtacgtgcgttaagcccgcgcttttacacaaaccacagcttctcctacgtggccaatgaagagccggagactttctcccagtatgccctgaaaccatggagtttgcgtactgggacttgtagtttagcaggcggtataggcaaattggatactgttttatccgtagtttcctcgtggcctcacggcctaacctggaccatcggacagcggagtgctaccaacctgtcattgatgtcattcattctttcgataaatatttatatgttggccaaatatgcgctagatgttgggaggaagtacaaatatgagaatacaatgtatattgggcctccactgcaacaagtgacaggaatagctactatttattgtgagactactttgtttcagtactttatttacattatttctaattttaaaaacagtgacaaaattaaacttttcaaagttgtttctgatggtaatcttcccgagtgttggtatttctctaagtcagagggatggtaattcaacatcctgacgtttctgaagtatttcaactagcctaagatttctcaaaatctctaaactccttttctacccccaacattacatagggctaagatgtgtagagaggttcatcactaactacaaataactacacttttggaagtataagagttcttcgacatgccaaatataagatttttttaaattttgattttattgcttgcatttctaaaattttctgcagcaaatagggaaagtctttgataggttaaattccttgcattagtgaaatacacgtttgtctgataaatccactctcgtgtatcttatacaataatttaggttttcatatatgagatccaggtatgaaacagattgttacatatggacagaagaacccacgacagaggggttttttgtttttatcctgtgagttttataaatgacagggattttatctctgttcttttaatttcctcaaaaaatgataaattcctaaaatagaacagatagcagcaggtgaaagttataaagtgaggagtacacctcatgaagcaggtttttatcattcttattttaagtaactcaatcactaataagtggaaggcccgtcttcaagttcaggcagtttgacctagcagcttcagggggctactattcattaggagcttcaaatgtgttagagggctgatagggattaaggggagggaatagtctagaaataatatttgtgttaaagccctttattttatagcaaaattttctacataggcttttcttcccatttacgtgtatatttttaatcttagtattgctattatttgaggaatattgagaatatgatggagatgggaaaacgaaaacccacccatccttttcttggcactattgagtctgtttgtaaaacccaaccttttaattaccatactatgcagagcccacagttcacctgtccctttttgaaatttttacatctttttccaaatcattactgaaaggggtgtaaaaacatggataataattgagttctaagattctctaacgtcctcaagacctcctattatagatgacaccacactaaaactgtctgctttccaaaggaaaagattcatcaggctcctacaataagttatttcagtattaagtgattctttcccttccctaactcaaaagccctcatgttgtccaccaactgaatatacaatataaaaacaatatatgattggaagttaagtgaatttttttaagtctgttacttgccttccagaacccataatctaacacaagttatatcacaggaatagggagttatcttacatataggatataaaagcttttactaaaaaatgaatcctgcaacaaaaatcacaaattaatttaaaaatattaattataatgactattaatcatatactgaagggtatatataattata

SEQ ID NO: 916379 - DNA, 4001 bp, Homo sapiens
tctgaaaatgtcaaactgatgtgcctctaacctaagaaaagacatagctacatgctgcttcatgatcttagcttattactttctggaactcttttacagcaaaagttaagaactgcccagacagggtcccttacttgttccggtaatcctccaccatgtcctgcatgttcttcagttccgaatccaaccgagattgatcactcttcagttggtccactctccttcggagattgttgatgaatgactcaaagtagggctctaaattatgggttctagtggaggtatctacctgctgcagcagctcccattttgtttgcagtacctggttctgctgctccaggaacctcacctaaaaacacaagacccctttactcctgatgcataaatggagtctcatagccatggagaactgtgcctcatttggaaaagaacctcaattcctatcttctgaccatgacagagaaataggaagaagatgatcaagttaatatcatctgcataataaaacccaacttgttaattcagagagggcttggaagggagtaactaaacaaataccaatagcaaagcgcatacagaattattgcaattatgttttgaaataggtgcatggtatttaagagatttgccttccaaaattttgttaggtatattaccataaaaactggtttgcatccccaggacacacacacatttcaaaagtatatcaggaaaattcaaaattggatttgaaatttgttgtggataaccttggattggcactattaatgattaagcaaaaaattaaaaaaatggtttatctgagttttttagagctgatttttggagatattagtataaaaaaactctagcctcatccagtaccaatgtaaaattattagaaggcagagctcccctctgacagcaaaagatgtttggcactgactgaccacatgttttctgctacaataacactctatactatgttcacactcaactccctttctatggttaggaagacctttccagggttctcacttgcaccctggaaagttcagttagccccatttctattatcttcattcaacagatatgagtcccaattccgctcaagagctgaataaaaagcacttaaatgttaatgtcacactgacccacctttaggtcgaccacgaaccctttgtcaaagagagagtcattaacaccattcacaagcatacatctaacatatctcctaggagaccattccacaaaacatccttttaatcatgtaaacatggaaacttgaggttcaaacctactgtgttttgactgcaccaatcccaagtggaccagcggcagccctaccagtgcaatgagagagaaactcaccttgtcaatgaaggaggcaaattggttgttgagtgacttgatttgctccctttctcgagacttcaccttttggatctcagggtcaatctccacattgaggggctgaagaaggctctggttgatagtgacttcttgtatgccaccaggagggcagacaggaccataaccacccccatatccaccacccccaaagccacctccaccaaaaccaccaccaccactgccaaaaccaccaaagccaccacccccaatgccacctccaccaaagccaccaccaccaaagccaccaccaccaaagccaccaccaccataaccaccaccaaagccactaccacgtccacctcctctagccacacttatggagatgcttttactgccaccaaggttaacaagactccgacttccaaatccaccaccagcaccaaagctaccaccaccaccaccacagcttgaaaatctcccaccacctcctccactgcggcgtgtggagctgctggtggtcctgcgctggtagttgatgatcccagcagagccagagctgaagccccctccacttcggtacccagacctggaactaaactgtcgactcatgttgacttagagaaaagtaggagcaaggtagagtaagggaaggagctaaacactcctctaccccaagcatagagacttccccttatatacagggaagaaattgggcttggtcttctagagtcagcggagatgcagtgcctgtcaagggtttggcttgcctgcagccatacaagatttttacgagcctcaacaatacgataaacactacacacctagctcccaggatgggctctcaaaattgctgtgcatgcaagattggttcatgtggtaattattttatcacacaagatcttccttcaagcatttgtggctttgggaaaacaggaccccacatctgatacctggtgtttcttggtaggatttcataacccccatcaaaaaggcatgaaagtttctattctcaccttgcctttgtgagctaccaagcacactctcttaccatgcacagcaggtgcaattccccgtgcttggatctcagaaggagctctctggcccatttctaagatcttctttccaaactccagagctcactcagttacaacctgacaaagagaaagggctttaataactaaaaaattaaaaggtctttcataaatataagctttataaatataccacagtgattaattaaaggaagagaagctgtcattgaacaagatggatgagtgggtggtctggaagaaccagaagggagagacattttttttctctgtttctcagttattccttttcttgtttcttttcttcaaagatagagcaggagacagacaccagcaatagaaaacaggtagcaatggatagcatgcaaacgcccttgagtgaaaaagcccacagagcagtgagacgagtaaatagaagctctaggacattttgtaaagcacaggggtggaggtgaggcttgataggtgattcaagcctcacactggactgcaaagagagagagataaatgcagatttggaagggaagacaatgagaggtgtctggagagccttatatgagaagtttaaattgtttctggaggtgataataatgataatacctaacatgtatcaaaaactgaccatgtaccaggcactgttctacgtagcacatatgtattaacttgcttaattttcacaactttgagatagatgctatttttctccccatttgtaaaatgaggaagcagagacacaggggttgaataacgtgatcaagtctacacagttggtaagtggggtgcctgcgatttgaagcaagaatacctagctatcatgtgcaagatcctaaacagcatgttgtacgacagcacagcagccgaattcaagtcattctgcctgctgtgtgtaaagccagacagcacaggaagcgccccaccacagagagctctgagggcagaaggcctgttttatcactctgagtccttggctcctggcacatgcaagtcttggaaaatgtttcttcaattcacactgagaaggagattttggtggcacagagtttagtgaggagattttacttccatccaagtgcaagagtacccagcatgcattgcaatggaccaggaaacctcaggggtcttcctggagagcagcacttgatcaatatcagtggataatagtggcactgagatctggacacactagaagcccaagcagactttcattcgaagacttcttagaagcctggcatggtccccgggcctgcacataaacacagaattgaagactcaaaggggagaagccagctctaacttcagctggctccaagtaactctgtaagtggcaaaccatagatgtacatgggaagtctccactatggtgtgcaagatctatgggagaaagggagtctgtgaagatcatctggtcccattactctgtggctctgaatcgggctggctgtgtcggtcctctccattgcactccgctattgaaccttgtccctcttctcctcccagtttttgccctataccctcctccagaaagtgcccctcaccgctcccctgctactcctctccctcgccatcactgtggcactgctgtctgggactctgtcctagcactaaaatccttcggctgct

SEQ ID NO: 916380 - DNA, 4001 bp, Homo sapiens
tcttcatcagaacggtcttatttaagaagagcccaggctgctatttctaaacgtcttagcaaggctacttgcagttggtttgtcttgtctattctccgacccagacttctcttggcccctcaatccctggcctggccagtggcccctgcttgcctcttcgtggttcttcttcatgaagagcagctcctccttgagagcctcgatctctgtctccagctgcagtcgtgtgatattggtgtcatcaatgaccttgcggagcccatggatgtcgttctccacagactggcgcatggccagctctgtctcatacctataggagtggaggtgatcagaggggcccctatctctgatccagaaccttctcaactcatgccacctactaagagaagttctgtgcccattgcaaaccagcaacttgagtcagcaattaggtggtaatcccctgagcaccattcttggcacttggaggacagtattcttaaacggggttatacaaatgaacagttaaatgaatacactgatggaccctgactctcatccacccacacctaacaggatcccactgtgagcccctaactgacccagcctggggagcagatccttcttagctccacccctggacccccagctctctagcccccaaacttacttgactctaaagtcatcagcagcaagacgggcattgtcaatctgcagaacgatgcgggcattgtccacagtatttgcgaagatctggagggattgtagagagaggttgttccatgaatagaaagccagggatgggtggggtgagtgtgtaaaaagtgttatgtatcctagtgaaaacttcctggtcccaggaatagccagaggctctccctggacacctatcccttttcatctagccccaccccattccctcctttcctggattcccagatcccagcactctgcccctcttgggaagcctcagcaggctggctagctggctggcctgcctgcccagaagtgagtcgctactaacaagtcctcttcctggccctctcctggcattttttccctagtgcacctggtcactctgggccccctacaccctggattggctcctcccaaaggaaggcctcttgtttactcctagatgactcagccttagccacatccgcttaaccctccaatagtccccattccgccagagccagtgtctcctcctctttacaggcctttccttacctccctccatgctgtccacttcctctgtaaagctctcaaccctgtccccttccccctctctcctgggaaagagccctcccatgcctagctgctgctcttagggaccctgtggctaggtgcgcggatggaaatccaggtatgcccaaccccctcccggtggagtaggggttgggtggttatggaatgacggaaagaggcaaaggagtgtataattggagggtcagacaaggctgggagttgaggtccctcctaccccttacctgagccctcaggtcctcgatgatcttgaagtaatggctccagtctctgacctggggtcccttcttctccaagtgctcccggattttgctctccagcctccggttctcggtctccaggctcctcactctgtccaggtaagaggccaggcggtcgttcaggctttgcatggtctccttctcgttctggatgcctcccattcctgccagacccccggctatcccggtggccaggcccccggaccccatgccgcccctgaagctggtggagcgggacacggagatccgggaaccagagcccccagcgcctgcatagacgctggccgcgctgctgaccggccgggcgccgtagctgggcgcctggacagagcccagggaccggtagttggtggagaaggtggagcgagtggtgaagctcatgctgtccggggagagagaaaggacaggactcaggctttgcggacgacggtggcggcctgcgcgagccgcgcgacccgagttatatcgcagagtgaggccccgcccccgccccggagccgcttcggaagccggagccacaggtggacggctcggagcccgcgccctccgccccgggccgctccgccccgggccccacccccgcgccctccgcgcagccctgccaagccccgctcaccccccagaaacggggtggccaaccgggcatggacacggacagcaggtgttgttggccctcgaggctgctttcagggcaggaaatgacgttattatgctcttctcccccaggtggaggaggtgctggcgagtttgaaatttgggagtcttgaccgggcgcagtggctcacgcctgtaatctcagcactttgggaggcctaggtgggcggatcacgaggtcaggagatcgagaccatcctagccaacatggtgaaaccccctctctactaaaatacaaaaaattagccggacgtgatggtgcacgcctgtagtctcagctacttgggaggctgaggaaggggaatcgcttgaacctgggaggcggaggttgcagtgagccgagatcgcgccactgcagcctggcgacagagtgagactctgtctcaaaaaaaaaaaaaaaaaaaaagaaaaaagaaatttgggggtctggtggtgtgcgggtggaatggcctgtgagtccctctagctgtccttaacctgcagcccaaattatccacttgtggaggggatcttgggggcatcctggagccccaggagtcccggggaagaaaggctgggagctggagaagaggaggagaagcaatgcccagcctcatagctgcttgcttacacactcacaccccagctgcacctggctcccaaacactcctcgcctgcccacgtttcctcacacacactcacacccgaatcatacagaggtgtgctctcaaatgcacacacacatacattcactcagcaaataggtgcagactccccaaaacaaacccagtctctgagccccctccaccaccctcccctctcccgacctcactcccaagggccttgcctcagtggaacactgtgatttggacagggaatgcatcctgacttctgcacaccggtatatcacctttcctgcatccttaattaaacaaatcctgagcatttacaattcaaccagtatgcattcagcacctactgtgagccaggcccagttctaggagctgggagagaagggcggtgacaaaagagaccaaaaatctctcacagagatgataatgtgtcccacatcgccgggcacagtggctcatgcctgtaatccaagcactttgggaggccgaggcgggtggatcacttgaggtcaagagttcgatgccactgcactccagcctagacaacagagcaagactctgtctcaaaaaaaaaaaaaaaaaaaaaaaatttgagaccagcctgaccaacatggtgacaccccttctctactaaaaatacaaaaattaaccaggcacagtgtgtgcctgtaatcccagctactcaggaggctgaggcaggagaatcgcttgaacccaggaggcagaggttgcagtgagccaagatcgtgccgtcgcgctccagcctgggcaaccagagcgaaactctgactcaaaataaataaataaataaataaataaaagtaatgtgtcctacatcgcatggggcctgagaggacaggcaggcactcctaggaccatcatagcagcgacccagccctggtggccagtgcccctcccctcttttctaggacttttctccaagccagtccttcccctgtccccccttgtaagggctgtctggattagaagcctggccccaggggactgcatcctccaagatgctctccccagcctctgtgtgagaaggatggaggtagggaggctttcatgctgcctgccccctgaagctgaatgaccatccctgctgaatgaagtgttggggggaacccttaggtgtttggccttcaagtttgtcagctccagcagctcgtttttctggcagggcctggtatgacacatttggctgtgttctttgctctggagtggacct

SEQ ID NO: 916381 - DNA, 4001 bp, Homo sapiens
ccttgagagcctcgatctctgtctccagctgcagtcgtgtgatattggtgtcatcaatgaccttgcggagcccatggatgtcgttctccacagactggcgcatggccagctctgtctcatacctataggagtggaggtgatcagaggggcccctatctctgatccagaaccttctcaactcatgccacctactaagagaagttctgtgcccattgcaaaccagcaacttgagtcagcaattaggtggtaatcccctgagcaccattcttggcacttggaggacagtattcttaaacggggttatacaaatgaacagttaaatgaatacactgatggaccctgactctcatccacccacacctaacaggatcccactgtgagcccctaactgacccagcctggggagcagatccttcttagctccacccctggacccccagctctctagcccccaaacttacttgactctaaagtcatcagcagcaagacgggcattgtcaatctgcagaacgatgcgggcattgtccacagtatttgcgaagatctggagggattgtagagagaggttgttccatgaatagaaagccagggatgggtggggtgagtgtgtaaaaagtgttatgtatcctagtgaaaacttcctggtcccaggaatagccagaggctctccctggacacctatcccttttcatctagccccaccccattccctcctttcctggattcccagatcccagcactctgcccctcttgggaagcctcagcaggctggctagctggctggcctgcctgcccagaagtgagtcgctactaacaagtcctcttcctggccctctcctggcattttttccctagtgcacctggtcactctgggccccctacaccctggattggctcctcccaaaggaaggcctcttgtttactcctagatgactcagccttagccacatccgcttaaccctccaatagtccccattccgccagagccagtgtctcctcctctttacaggcctttccttacctccctccatgctgtccacttcctctgtaaagctctcaaccctgtccccttccccctctctcctgggaaagagccctcccatgcctagctgctgctcttagggaccctgtggctaggtgcgcggatggaaatccaggtatgcccaaccccctcccggtggagtaggggttgggtggttatggaatgacggaaagaggcaaaggagtgtataattggagggtcagacaaggctgggagttgaggtccctcctaccccttacctgagccctcaggtcctcgatgatcttgaagtaatggctccagtctctgacctggggtcccttcttctccaagtgctcccggattttgctctccagcctccggttctcggtctccaggctcctcactctgtccaggtaagaggccaggcggtcgttcaggctttgcatggtctccttctcgttctggatgcctcccattcctgccagacccccggctatcccggtggccaggcccccggaccccatgccgcccctgaagctggtggagcgggacacggagatccgggaaccagagcccccagcgcctgcatagacgctggccgcgctgctgaccggccgggcgccgtagctgggcgcctggacagagcccagggaccggtagttggtggagaaggtggagcgagtggtgaagctcatgctgtccggggagagagaaaggacaggactcaggctttgcggacgacggtggcggcctgcgcgagccgcgcgacccgagttatatcgcagagtgaggccccgcccccgccccggagccgcttcggaagccggagccacaggtggacggctcggagcccgcgccctccgccccgggccgctccgccccgggccccacccccgcgccctccgcgcagccctgccaagccccgctcaccccccagaaacggggtggccaaccgggcatggacacggacagcaggtgttgttggccctcgaggctgctttcagggcaggaaatgacgttattatgctcttctcccccaggtggaggaggtgctggcgagtttgaaatttgggagtcttgaccgggcgcagtggctcacgcctgtaatctcagcactttgggaggcctaggtgggcggatcacgaggtcaggagatcgagaccatcctagccaacatggtgaaaccccctctctactaaaatacaaaaaattagccggacgtgatggtgcacgcctgtagtctcagctacttgggaggctgaggaaggggaatcgcttgaacctgggaggcggaggttgcagtgagccgagatcgcgccactgcagcctggcgacagagtgagactctgtctcaaaaaaaaaaaaaaaaaaaaagaaaaaagaaatttgggggtctggtggtgtgcgggtggaatggcctgtgagtccctctagctgtccttaacctgcagcccaaattatccacttgtggaggggatcttgggggcatcctggagccccaggagtcccggggaagaaaggctgggagctggagaagaggaggagaagcaatgcccagcctcatagctgcttgcttacacactcacaccccagctgcacctggctcccaaacactcctcgcctgcccacgtttcctcacacacactcacacccgaatcatacagaggtgtgctctcaaatgcacacacacatacattcactcagcaaataggtgcagactccccaaaacaaacccagtctctgagccccctccaccaccctcccctctcccgacctcactcccaagggccttgcctcagtggaacactgtgatttggacagggaatgcatcctgacttctgcacaccggtatatcacctttcctgcatccttaattaaacaaatcctgagcatttacaattcaaccagtatgcattcagcacctactgtgagccaggcccagttctaggagctgggagagaagggcggtgacaaaagagaccaaaaatctctcacagagatgataatgtgtcccacatcgccgggcacagtggctcatgcctgtaatccaagcactttgggaggccgaggcgggtggatcacttgaggtcaagagttcgatgccactgcactccagcctagacaacagagcaagactctgtctcaaaaaaaaaaaaaaaaaaaaaaaatttgagaccagcctgaccaacatggtgacaccccttctctactaaaaatacaaaaattaaccaggcacagtgtgtgcctgtaatcccagctactcaggaggctgaggcaggagaatcgcttgaacccaggaggcagaggttgcagtgagccaagatcgtgccgtcgcgctccagcctgggcaaccagagcgaaactctgactcaaaataaataaataaataaataaataaaagtaatgtgtcctacatcgcatggggcctgagaggacaggcaggcactcctaggaccatcatagcagcgacccagccctggtggccagtgcccctcccctcttttctaggacttttctccaagccagtccttcccctgtccccccttgtaagggctgtctggattagaagcctggccccaggggactgcatcctccaagatgctctccccagcctctgtgtgagaaggatggaggtagggaggctttcatgctgcctgccccctgaagctgaatgaccatccctgctgaatgaagtgttggggggaacccttaggtgtttggccttcaagtttgtcagctccagcagctcgtttttctggcagggcctggtatgacacatttggctgtgttctttgctctggagtggacctattgattcttatcgagctaccagctgagggggaaggggaggacaaatagtagggcagacctgggagagaagggaccctggaaaagcctggccagtggacctgccaggtgggaggcagagcacagataaagagcctgagcctggattgttcctgatctgtcacctaatggtggggagagccccacagtg

SEQ ID NO: 916382 - DNA, 4001 bp, Homo sapiens
ctctaaagtctcactgtcttcctcacaaataatcaacaaagatacatatgcctctccccattaccaccacaaatgcaactgggagatgaatggctttccagggagtgatcaaatggctcagtgcaatgtttatctccactcagcgtttcactctgccacctacttcttcttataatcctccacaagatcctgcatgttattcagctctgaattctgtgatgttctttctgcagtgagcccatccagatatctcttgaggctgtcgatatacccctggaagatgggctccaggttgatggggcgggtgccaacattcatttgttgtagcagctcccatttggtctgtaacacctggttctgctgctccaagaaccgcacctgccatgaccagaaggagagcacatgagttctagatcatccttcacaccaagcaagccacgctggccaggggcagctcaggtgctgcttcaggacctcgagaagtgtctgaggctggatgccgagtcatgactggcagagcttctgagctccctgctttcgcccctggaaagtcccacagactcctaatgctacatccggctctctccacgcagaggagactctttgctgcttcactgctcactggtttgtttgcagctgctcccaatactctagaccatttccctccccgcatcctggttgaatttccagccaagatcccataaattctggggaaaaccgaaagcagccatctgctggcactgctcgcaagggtgctgagtatgagagtcccagagggcagggctcctcagcctgatttttaagagccttgtaaatccctgcctatttcaaggcagataaaccaagacaggttcgtctgccttgaaataggagaaaagccagtaacactccgaagtgacaccaataaagactttatggatcacaaaactgagaacgcttctcttgaaggcaggaatttcctgcattcccaagcagatatttcaggttcagcttcccagagtttagtaatcactgctaaggaaggaaacactatctcagaagacgatggcttccaaaacctgctgctccagtggcctgtcccaaggatcagttcaatacttgcctatatccattttttatggttttcagaattttccataaatattatttatatggactgtaacaataaggtcaaagggacaaatgcttcctaagtgcaggctgttatgggaaatgtaacccacaaagctggcgtcttttccatctggaaaccgcaaatgacccaggctactgcggtacaccactggctcctaagaaatacaaatctgtgccattttctttttggttggctctggaagtgaagtggcctgagcatcagtgggagccgtcttctccagagtcaccttgtcaatgaaggaggcaaatttgttgttgagagttttgatctgctcacgctcttgggccttcacattctggatctctgggtcaactttcacgttgagaggctgcaggaggctctggttgacagagacttcgtggatgccaccagggtatcctccaggcccaaagccaccaggaccccctaaacctccaacaccaccagggcccccaaaacctccaaagcggcctccaccaaagccgcctccaccgaaaccaccaccactgaagccgctgccacctccaaagctgctgccgcctccaaaaccacctcctctgccaccaaatccaccagcggcgccaaagccaccacctcctccagccacactaatggagatgctcttggtccctccaaggccaacaagactccgactgccaaagccgcctccaccgaagcccccgccaccaccaccatggcggctcaagcaggagaagctggaagttgatctccggcttccaccagacaccacagctgagccgctgctgaagccccggaatcctcctccacctcctcctcttcctcgagatttgcaagagatctgacaactcatgatgcctttgtccagggaggaaagtcacaggctcttgagaagagtcaaggctggagactcaactgtgctgctgggaggctttcagggtccccttatatacctgccaactaggtgttgtgtacatgggtgtggatccacttatacgtgggtttggtctgcctgggagctattcctggtgcgtgattatcaagctaatagccattaaaaatctactaatcagctccatcccagaacttgctttgattgcaaacttctgtttatctgggcatctgtcatgcaatttgatttttgtaaaatcatcaaaagaggagatcagggtttgggtttctcaatctggaaaaggaccttctgcagaatgctgctccctgttctggacctgcccaagggaagtcagctaccacccatgcttgtgcaggctcaccaccccagttcaacaatgaaagggatggtgggtttagagactgcaagagcccctcaatgccagccttgtagttctcttgtagtttccctctttcccagaaagagccccaactagtgcaggggagactgcaaaggtcttaaatgaccttaaatgctaattggaaatcgacctcctcttacagaaagtaattggcctcggatactgcaaaagaggtgtcgattttcaaaatatcttggctcttttcttcccatgccacaccaaaaatacacaataactaggcaccgaatagagattttttataaccatgatggtttgtataaccatcaactgtcccttgtctacatgaacacccagaggttgagaggtatgagaaaagtttcgctgtttctggacctgtgtgatgcgggacaccaagtgaaagtttgcaaaccaagatccaagtgtatattgattcagtcagtcagtaatcacgtattgcctggtgatcctgggaagtgattaggaagtcaggctcttcaatgacatccacagatgcttgaggataagaagaccatccagcctgcacagagcactcacacttaaactcaaccacttcctctgtccatgtggccaactatgtgggagaggttcttggagtaataaaactgaatttagtcagaaattctgggtttgagtcccagttttgctatttattggctgtgaggccttgaatgaaaccctgaggctctgtggtcccagctataaaatgggaaattcgtatgaagtgttttgaaaaccaccgtgcacaataaaatgtcagtatcattattgtttggggtgagacaaagataattccttttcctttcccccttgccatgttactgtcttctggctactatgaacatgcactctccacaggcatcataaattacagaaccaggtggttcagatcctagtaccaagttatcacaaaataatgtaaaaaacataagtttgaggtcaaatcccaattttcttgtatcttagttaaatgacctcagataatccataatcctcttcaagcctcagtttcctcatctataaaaagtgaacaagaataataagaatatggctactgtgaaaacagaacaatacacacatgtgctaaacacagttcctagttcatagcagaaactcaataaatgctattcacccttctgcatcttccccgccaagtttccaatcctgtcttaactactattcaaggtatttaatttgcagtaaaagaatgctgaaggaaacaaagctacatgtctcctcaattattttttccaatctggtttgcataattataatcatgcaaacaaatcatgaagctaacagctttggagacagtctcaatccaaagcaaaatgtgtcattatctacagatatctgagcaatgccctagtcgtcccttactccaccatgactgtgctcacactatggcagcttcaggggggtcttaatgcctctatgaaggaaattgagccagatttgtgctaggcacccaatctgcatgttttactgcattttaattctgccctcacaccctggtctccctccccactctctccactgaacatcttctccttctagacccattcaccaatttt

SEQ ID NO: 916383 - DNA, 4001 bp, Homo sapiens
acttcttcttgaagtcttccaccaggtcctccatgttcttcagctcagagtccaggcgccctctctccccgaggatgttgtccaggtagctccgcaggtagttgatgtgattctcaaaaagaggctcaaggttgtttgtgcctgagatggaacttgtgccctgctgctggagcaggttccacttggtctccaggactttgttctgttgctccaggaaccgcacctgcaatggttgcaggaagcaacatcaggcaacacttgtagcagaggagcagaggggccttcactcaggtaggactaggtgtctatctcctgggcccccagcacaaaggcctagaaaagatgcaaagataggctcctactgtagtcagagagattatgatcagatgggtgatgagtcaggacactacacttgcagcgtggtttggaaagttacaaaggaaggggaagtagctcctacctgaaagcaatagaattattgcttgttgttcctgggaacttcatgaccctatcttaacttccaaaaccacagtacactctacaaaaatgcacataaacctcagcagcaccatttccacccacgactctactgacatgctagctcttcaaaaacagtgaagtgatgctgggaagctgggaagcaacactggctggcatgccacagttagcatgacaacacctctcttgggcctggaggggaggcagccccatgagaactgtcctggtctggagaagctcaccgagcactcttgtcttcctgactaggctgagtaggagtgcaaagtcactcatttctctgcgctcccttgggactaactaaggttcttatgctcttaatccctgctccaggtaatcagcctcctctgcctggcacagcaatatgagggggaaagggcttcctggaaagcctcagagggcagcttgtatttgaaaagcctcccattcttggtggacccttcgctgatggtggctgtggcccttgccttgggctgcctgccctgccagcctgggcctcaatgaggcaatgactggaaacttcagcaggggttcccacaaacaggatgtgtggtgctcaggtccaaataggggactgttttctttctacacctcccctcacttgaccatgtagacaaactcctcaaccctggatatcttcccagaccctagagttccacctaactcctcaccctccagtctggcctatccaagaaacatttaaacactgtgtcccaaaggtcaaattcaaagtccccagcccaggaagggatgaccagtcaaagcttcattaccttgtcaatgaaggaggcaaacttgttgttgagggtcttgatctgttcccgctcctgggcctttacttgcccaatctgggggtcgatctccacattgaggggctgcaggagactctggttgatagtcacttcctgaattcccccaggaaagcccccagggccaaagccaccaggactgcccaagctgccaggcccaccaaagccaccagacccaccaaagccaccaggaccaccaaagccaccagcccctccaaagccaccagcccctccaaagccaccagctccaccaaagccacctcccattcctctgccaccaccaaagccaccaccaaagccacctccatagccgctcccaaagccacctccatagccacctgcaaaggcacagctgctccgccctcccccaaagcctccagcccgggagccgccagctgccacgctgatggagatgctcttgttgccgcccaggttgtagaggctgcgactgccaaagccacctgctccgctccggaagccataggcccctccgccagctcccccagagtgggccacacagctcatcctgctgctgccggagaccacagcagagcggccggagaaaccctggctcccgccaccagatgtcttgctggcttgtctgctcatggtaaggagcttggcgaagagaagagtgtaagttaagcagggacactgagagtcagaggaagagggatgggaaatgaagacctgtgcaaaataaatccctttatatacatttgaggaggttgttgggctcaaacgaaggagagataattaatcccaaatattcatgggctgggtttgcctccaaggcaataagtttgttccaggctaccaaacacaccttgaaaataagctgaaatggtaaaagtgctaaggtggcaggcttacctggtgagggggtggtgcctggtgttgccccatgtttgggcatggcctcctcctagctctgtctgacaggacccaggaggcacgctcacctgcatcaggtgctcagcagccatccctctgcctattagctgcacctgggccctgcagagcggtgcccagctctggagaggatagagtggaggaggtgtggggaggttctgcttctctgagtagtggagacagtggagcccactcacagctctgggaaagtatcttaatggaaggagtgatgcaggtctctccacaatgactgagtgcacagtatgtgcccagctctacgctggcctttgggatgaagcgctgacctctccttctcccttcttggaaaaaagcccagaactatcacaaatctgcctcctgggttctccctgtaccccaagctttagttcaggaggtagtgaccttttggtttatgactatctttggagaaaaagtcaagttaacacctatgtatgttgagcagacactggcaaaatccaacatgcctaatgtttgtttctctttaaaacttcccagagaaattatacactattacacatcttggggtttatctatggcttcctttcttgctccccacattttggcctttctctggttttagcttaaggcctagggaacaagaaattcaaatgtcaagtcaacaacaaattcagcaaatatttacagactgccaaatgtgtgccaggccctttgcaaaactctggagacccagtcatggacaagacacacagggcccctgtgggaccattttctgtttgagagatgtgctcctgagagtcgcccatgccccctcacaaaccccagaaagccagatctggcagagccggcagcactatggaatatgtctgactccgaaagcctgaaactctccctgtctggggttgttcagaggcttatgactgggcttggtttgtccaaaagaaagccatcctgcacactctggagctggccaagttagctgcttatctctccaggacaggccttttttgttctgtctgctgcacattgggcccttctaagggtgtggtctgtatggccctggcaggagcctccttagaattgggggaaaggatagagacttcttcaacacccactgggtagggctgggagtggcccaagtgcaaaggaagtacaattttcttcagtggcctggttcttccattttatccttatctctcccatgtgttacctgccaggctgtgcaacatcctagctcctccccaggataaaaccataagctctccaggagtttccagtcttgttaatatactgggtgccttgaaccaaagcacagtgctttgccaatagtaagtgccataaagtttggtttgttgaaaaaatgaattagtccatcaattaattattaatgactaatggttaagcccttatactggattacaaccagataaaactggttgaaagctagttcaactcccattgcatgaggtagcacaagctaattgagattatttcaatgtgaggaatccagacttctcaaatttggtgttcagatttagaaaaatttacatgcaaaatgagtgtcacctcctcaggggaaaaaaatgtagaatcacagaatcaagaactaatcaatcaagaatcaatcaattacagaatcaagttgaagttgactggacatttgaggtcacacaatctgccccgttcattgctgggatcccctctccagcatctctgacttatatccctaattttctgcaagttctgcccatggactgtgaagttagcccaggcctagagtgtggc

SEQ ID NO: 916384 - DNA, 4001 bp, Homo sapiens
ccagggcaccattcactcgggttgacatgatggccccattctcgagcccatagcaccaaggggtcacataggttgtggagaatagagcacagccagagaagcagggcctaacagtgcaacaagaacaacttcctagccgcaggcacccaaagccccaaagaacattaaacttctatgaaataacaaaataaaattaagagacatcacaatctggaggctcttgcattcaaagtgatcctgacccaaggcaaatgaaagacaaagtcactacagactttttaaataagcttacttatcaatggatctggcgtgtccctgtgaacctgtgaacaactgagtatagatatttaaaacaagggccctgtacgcattgtctcacctaaactccattctgcaaaggactttcctgaactttccctctctctatgaaaaaatctagccagacaaaccaggacagcagcttagcatgacatttccatgttatgagcctcagaattgaaaggaaagcaggtaaggcagaccgatcacattttgaacccaaaaggtaaaatgagatgagatgagacaaggatgcatcaaagagccctgagtttttgctatcacatctgcatgtcctatagtcacagtaaaacctctttaagttactatgggtttattcaaactagcaagaagaacaaatatgcaccttattctattccaaaagtgttcattcttgccccatatgtcgaagctgcccaagactttgatgcctggtgaaccagggcaacctggaccaaagggaggcactcatccacccagtcatcaatctttggatgactcggctctctggggctgcactgctcactatcatccatcatgcatgaccataactgagcttaaagaacttgaacttctagacgttgcatgaaaaaggaagttgggctacaaaaagaaaagagacctgtctcctttcttcaaacagacccagacatgagcagtgttgtccagtcaaaggaatgaaaaaagtaaatttccaaggccttggtgagacctagaatctgccactggagccagtccctttttcatttgcaaaatcagcttagttgtcttctgttctaagaacagaagtggccactgttaagtgattaatggggttaactgcattatattcaaaaccaaaatctgagaaaaagcagagaaataatgaaccccctttatagctgggatgactagagccagaaaagccaaatgatttgtccagtatcccacagcctgtctagggaattccaaacacttaactgccttgagcatcccaccttcccaccagccacgggacaaaaaggaaggctcaaagtcatgatgccccttcaacagctggagaattggggcccagggaagttcagtggtctccccagcacctgtggcaggctcaggtctgagaccccaggactcaggacccctctcttctaactgcccctctccagccgaggacacagctcaccttgtcgatgaaggaggcaaacttgttgttgaggagcttgatctgttcgcgctcttccgtccggactttctggatctcagggtcaatctccacgtggaggggggtgagcaagctctggttgatggtgacctcctgaattcccccagcggggcagacggggaagccagggccacccttaccactgaaggagcccccaaatccaccaccaaagccaccagtgccaaagcctccagcacccccaaagcaggcaccttgtcgtgacccagccacactcatggagatgcttttgttccccctgaggttgtagaggcttctgctgccaaatcccccagaagagcatcggccagcacctccagacatggagactgagctgaaggcacctctcttgccaccgcctacaatggccgagccacagctgaagccccggggcccgcctcggacacactgctgtctggcaatcatggctgcagagagcgagctgggagctatcagagaagtgacagggcccaggccggtgagtgctggagccctcagccttcgtctcttatatgtcctggagcagcagggcttggttgcaggggcataaagggaaaaatctgaaacatctctgggcttggcccttggcacaagcccatccttcccgcacccgttgagcatgtcactaaacacacctacagaagtcatctggagggcacaggttactggatcccatcacactactctctgggagaacctgaactggtgccccagggcttcctaatcagaagcccctgcctgggcccagcgctccaggcccacacccactgtacctccatctcgctaggctcacagcacctccctcctccagaaaagacaccccatcacccatcctctcaccccacagaatgtggagttagacagcctgagtttgagcgcacagcctgccacctcctagctctgcaaaccggagcaagtcaccctctgaggcccagttgctttccctgtaaattggaagtaatacaaatatttgccttgccacttctcaggatagagtgagctagtgattaatggagtgctctgtaaactgtcaaaagccacatgtatatttgtcattcttagcattcttattcctccacatgttcttggctccatgtacctataaaaaggggaaatattctgtattccagccttagccttccaacctagatccagattcacttcaacttggccaacagctactgagaaactgccaggcatggagctaggtactaaggagatgggggaagacaaaacacctccccaaagaaaaccgtgactgtctttctcagccctgggtacccatgctgccccgcaggcctcccttcaatctgtgcttgcacaattctagatgggcgttctccagcggggtctggtggtgtgcactctgctgctccatttgctgtccagttgtttgctaggtgtgttctggttttctgtaatggtgcagaattcagggcaggagttcataacttttttgctgctggggatccctttggcagaatgatgaaacctatggatcccttctcagagcaatgtttttaaatgcaaaatcctagttttaagccataacttaaattcttcccaactgaacagtaacagatctgtgttcaaatccctcctgttgccactaactagctgtataaccttgggtgggccaactaagcactctaaacccatccaatatggtttggctctgtgtccccacccaaatctcatcttgaattgtactcccatatttcccacacattgtgggagggccccggtgggagatgattgaattatgggggcggtttcccccatactgttcttgtggtagtgaataagtctcacgagatctgatgtttaataaggaaaaacccattttgcttggctttcattctctctcttgccaccaccatgtaacaagtgccttttgctttctgccatgattgcgaggcctccccagccacatggaactgttaagtccaataaatctctttcttttgtaaattgctcagactcaggtatgtctttatcagcagcgtaataatggcctaatacaccatccaatccatcttctcatctaccaaatgggacacctgcctcacaaggaattagacaatgtccccatggtgcctggcatataggaggtcagcaggcattcattctcttctttcccaggctttgccattgccatttacagggagaaatctggtgtgtttgttctccctcctttcctcaattcctcatagatgaaatgaccccaggtctgaggaagagcagtcaccagcacctggataatcccacagacccaagctgcccctagctgaatgaaagctggccagggagagagtgaacggctgcctccatgcacagagagagggcaggggccagtgctgaggacagagtggtcaggagatcccaccccagacgcagggctgcagggaaggccaggctggctgggagttcagccagctccttctccagccacttcctcccttgtccccattcccccaacccctcc

SEQ ID NO: 916385 - DNA, 4001 bp, Homo sapiens
atttctctagtgttcttttttgagctttcagaggctttaaaaaaaaaaagaaaagaaacaaaattaaatctagcatcctagttgctggttcataagactaaagaaattacttgagccaccaagctgggttatgtcaccagctcctgctttgagacaaatctatccaaaggcccatgtaccggggaggaaagtcccagagagcaagccttacatcagggcagatttcaccaggtagtgccaagggcacagagcatgttgctctggctgttgactaagttccttgcagagggcctgagcctggggctggaactttctaaacatgagcctggcttgtgtatttgtttgtttgttttagtactggaggtgtccatggaaggtatatcctcccagccccaaaggaaggcatggtagtagactagtaacaaagcccatctggtaccaagaagacaccaccctcccctgtgtccaccctccaccccaactcacttgttcttgaagtcttccaccaggtcctgcatgtttctcagctctgagtccaggcggccccgttcccccacgatgctgtccagctgcctcctgaggttgttgatgtactgctcgaacaacggctccaggttctgcctcacagtcttggtgccctgctcctgcagcagggtccacttggtgtccagaaccttgttctgctgctccaggaaccgcacctggaggggagcagggtttgaagatagagaaacttggatttcatgttctatgatcaactcactaaggtgcctcccacctctttccgtccctctaaagcttttctgtgcactgtgcctggccctgggccccaggaggggaggtgcagactgaggcacccaaactcacttttccagggggagataggacacctatccagggcacagaaagcactaggagtgctgcttggagtgtgtcccggctcaggggtggctgcaaaggcactcaggctgctgcccatgcacttgtctaccttcctgtacagtcagcccctttatatatggcatgaaattcatctctctgtccaacagttgttaagaggcccttgtgagctaacctctgaatgggaagaaataattctcccttcccagctgccagtctaattcagaacgtgtccacaaatccagggcacagaaacaaacggaaacacagaactgtacaactataaaagtatttgcacaaagccaaaacatcttccttctttctctctctttggcatttatttcagacccacagtgattttttacaaaagatcgtagctcaccttgtcgatgaaggaggcaaacttattgttgagggtcttgatctgctcgcgctcctcggtcctcaccctctggatgctggggtcgatttgcaggttgaggggagtcaggagactctggttgacagtgacctcttggatacctccaggagggcagacaggaaagccagggccaccgaagccacctccaaagccagctccgccaccgagcccaaagccaccaccagctccaccgccgaaaccaaatccactaccggcaccacctccaaagccatagccgcctccagcaccagcaccaaaccggttcctgaagctgccaccactagtgctgatggatatcctcttggagccccccaggttgtagaggctccggctgccatagccacccactccacaagcacccgcaaggctgaccctgccgaagccaccaccaccgccacccccggaccgggacacggaggtgaagctggtgcgggagacagacggggtgatggcagaggcggtgctgaagctacgactgcccccgctccggaaggacacacttgactggcgagacatggtggcttgttcctggtggagcaagagaaccaggcactagtgggttgggaggtgctggagagaacagagctcagcaggacgcagaaggtggctctgttacccaggaacggtgatgccccctttttatcccttccagaactgggctgggcgagagagctgtcgagctgtgaatgattaagtgggctgggcatgcctggggggcagctgtgagctcaccggtcacacctgcacagtggtgtggggtgcaaacgctttcttcctggcaggctctgctcagttagaaataaccttgccttgcagcactgatctcttggcagcaagttggtgacgctgctagcaagtatgtcttcaccatagaggctgggggctgtgagcagcccaaaaaggatgccaggaactgagggggcattggcatggccagtgtcctggggactcttacaggaccaggagtattgacaaccatcccagtacggtacatgctgagcacctgcccttccagcttggggaagctgtccatcagcggggggcaaacgattccccagtgatctgctcttacacttttccaggcagcaggttgctgcagggttttcccctctgggaaaggcaatctgtagccttatattcttggttatgtgctagagggaaaatagagtttcatccttttctgcacaatttttttcttagggaaggcacagctatcccagagcccactgggcagatctgcctgcaaggtttaggccagagaatgtgggaagccctcagcgccccctataaaccactttgacctctttaaggccaggtttatccttccatagctcctcctaactcagcattttttctgccctttgaccttttccttgctctttggcctgggcaggactctgtggggggtttaggaaacccggggatcccatgcaatcccttaaaaaaaaaccctgagactcatgggctatagcgtctctctttgggggtagctactctgccggttccccagccccccaggtgtgttccagcaagctctattccactagggaagaaatgagtcatcgtatgtgttgatacaggctgaaggccgccacaaacacatacctgcaggagcttctaatctcatcaggaacatgttgagagtctgacggcctgttataacggcgaaccaccctgttccaagcagcgggacttgctctgctttctctatgctgtagcccacagcctccttcagggccaaggcaatggaaaacgggattctaagtctatggattgtcctgccagaaaggctagccagagcaggcctgtgggcccaggcagctggcatgacaatctgccagctgctttagggagggccctttgagatcccctctgcaaaacttgtctggggggttgtggcaccaggtggaggaaagggggtttctgatgaggttttaacacacgtctgttctaaaccacacccactctttttggcagcagatctgagtggggccacctctctgccgtcccccaaatagaagcagggctctcaggcaggacagtgcttgggctgttcagagtttcgggggcgccctgtggcccgaggctggaggtaggaatgcaatggggatggcttcaaagcctcagggaggaggggctatattctcaagagtagaagaacaggaccagacccaggctcaggaatctctcaccagggcctgcggttggccacaaggaagccaaggcagtgggaaaatgactccctggtgctgaggatcagctgaaacagtgacttctcaccagagggctgcgatgagcaagcagctgacaggtcaatctcggcagacagaccaatggccggagccggtcttacaggtcttgagcaaaatggtttgggtggcctccctggctggagcatttctgagaccctcagagatgaattgtgctgagctcaccattttcacatttggttgctttctggagaacagatgtgagtgtcctggaggcctgagacataccaggggaccctcggctcctgatagaacagaacagatccaagcctgaagcaagtgtctgaggactcgtagtgggatgctcctgctccactcaaagatcgatatcggggtatatccccaccaccacatacactcacaggtcccgggtacagacctcactgccctcagggaagccccacccctcc

SEQ ID NO: 916386 - DNA, 4001 bp, Homo sapiens
tttgtgctcttcatttccacggacatgggttgttaggaatattacccccttctggccctggtcacccaatagtcttgaagtgtgtgctgcaggaaactgagtccatttctcctgtttaactcacttgttcttgaagtcctccaccaggtcctgcatgcctctgagctctgagtccaggcggccccgttccccgacaatgctgtccagctgcctcctgaggttgttgatgtactgctcgaacaacggctccaggttctgcctcacagtcttggtgccctgctcctgcagcagggtccactttgtttccagaaccttgttctgctgctccaggaaccgcacctgaaagagagacaagatgatcattttccaggcaagggaaggaagaaaaagtgtctggtatccggtttcctggcaggtccgggaggttcccatggtgctgggctactacagtgcatgtagagaggctcaggctgagctctgctcccccaaccccttctcctttgtaccccaccaatctcactagaggaattgtcccacggaccattcaggtgttctcactctctaagttattggacatattaatgagtttcaacatgtcttttccttcttttcccagccaaaattacaaacatagttataaaatagtattcatctgataaattttacacagtttttattactgataggacctcagttagaagagatgttaaatgttgcccaatgatttgattcccgtcttatttcccatttgtgcaagtctctcctctaaaacatcctgatgttatggtcattctttgttttgaggattaattaacatttccacataacgtataaacgttttaagtcttttttttcttaatctagccaaaatatcctttcttttgtttccaatattttttcctcttatccagaccccagagtgtaatttaccagcccgtgtactcctggcattttctttgacgcttcaaagggaagagttaacctactccattctctgatggcctcatctgtgcttcagggttatgaaaagttatggttctccctaggcaggagtgagggccactccagagatcccatgggggagtgatgcccatccctgctgcttgctgggcaccagcagccatctgcactctctgcagagctgggctgagtcctcttctccctccctcctaggtctccctggcaggaaggtgttgctcctctggtctggggaccctgaagtgccccatggagggcatggcactggctcaccttgtcgatgaaggaggcaaacttgttgttgagggtcttgatctgttcacgctcctcagcccgcacccgctggatggtgggatcgatttgcaggttgaggggagtcaggagactctggttgacggtgacctcttggatgcctccaggggggcacacagggaagccagggcccccaaagccaccagcaaggccggctccaccacccagaccaaagccaatgccggctccaccaccgaaaccaaatccactcccggcgccaccaaagccatagctgcctccggctctgctgccatagccgccactgatggcacagctgccccctccaatggagatcctcttggagccccccaggccatacagactgcggctgccaaagccagctcctccacatgcaccacccaggccaccactgcccctggagcgggacacggagacgctgctgaagccagagcggctgaccccagggagcctggctgagttggcactgaaaccccggcggctgctgctgtggctcctgatggtggtggatgtgctggccatggttccaggagatgagagagctgaggagagtgtgagaggctggaggagagagggaagagaagcaggactaggaatcaggctcggggcagcagcttatatatggagagcatgggctgggcccagtcctggaaggtgagcttgcaggttgggaagggctgggctttaccaacagtgagatcacacccagtttctagaaaggtatgaaatatgaagattgctttttggcttcctttagtcatagagaaattctcctgccttccagccttgacttgatcctaacacaataagcccgggtatacattcactgaagtcatgagttagtcatgtcctcaaacaaaggagacaaggagctgatctgtgataattgtcccctccttcttcttcatcagacactccctgtgtgcccccttcccacacaggttttctactccacttgcaccagcctcaccctctgagtgggatccttcctgagggcgtatgggcatttgcccgatggcctgagcaagaagtagcctgttgtgttttttccactgcatttggaccagttcttctggagctcctggctgtcctcccttgtgtcctggacataggaacggggtctgctttggggatctaaccctcctttgtcaggcaagagggacagaggagttgagtctttacactgtaggagcaacatttgttctgtgtactgtgtgatcacctgcccacatgccgtttacctaaaatgaagggagcagacattgcccagggtgctcagagacctgacttctgccaggagtttctttccatatctgcacctctctctccagtgcttgctttcctattgagcttagtctcatgtaaatctgcctttccagttgaaatttatagacaccttctccctgctgttttggagcatttacatagagcttaatttaaacaacggaaaatgagtgatataaaaatcattaaggaattcactggatttttattcccacagattttgacatttcttaagaatcaagagtcagacagtttaattgggtgtgtagggaaagtcaaggggcatatggaagctgtgaatcataaaattgtgcccttacaagtgtgatgatgtaacatgtcaattccacattttaatttctgatctcagtgcttgaaatctcaaatccatatacaccttctgggagggtgggcaggctgacaaaggtgagtgtgcttggtttacagaggaatgagcttcacttctccagtccatgcattaagcactgtgcatgaggagaatggagagcaatcctgggcaatattgttctgtgagaacctatggataaatgagcaaccgcaggaggaagaacaaactcccatgctaagaagagcctcaggaaagctcttgttactattttaaaagcagtcccatttctccaacatttggagggggggacacagcatccaggagaacagggtgttccctgtctaaaggaggtgctaactcagcgtctggcaagaacgagataccttctcaagacaacggaagcagctcccctccctccaccctggttgcacaatggttgaccaagaatgtgcttccacccagttctgggaaagaagtgttccttctggtatgtgctccgacccactctactctcttgggatagaggctttaggcttggcatgaatgatgctaggatgggtaagaagggttggcaattcaggtgggagctatatgcatttacccagtgtcctatgtctgtgtcaatgtccaatgtccacggctgctttcacactacaaagacagagctgagtagttacaacagagattgtatgccctgcaaagcctaaaatagtcactatttgtccctttaaagaaaacatttgccaacccctggttaagagcatggactttggagacagagggctcaggttcatgaccaagcacctgggtgtccctctgcactttcttaaaccctttgtgccttgtttttacacctgtaaactgggagtgaacatagcaccggcctcaaagtgctattgtgaggcttcagtgagataattaattgaaggtcttagcaaggcatctggcatataatttctcaccgaaggtaagctaatattatcataggaaagtatgaagacattttgtatgtagaggcccacaagaagcgtcaagaacagggacacaagtgcagggtatgtgtgtgggggaggagggtggttcagagaccggtaagaga

SEQ ID NO: 916387 - DNA, 4001 bp, Homo sapiens
aaagcagcttgggattcaacattttcctgaatggaatatattctaattgagctttcctgccacagagagccaaagagatgaattttgctactactaaatttgccatttctttaatctccccatcctcccataaccatctgtggttcttgcaggtttgctcctagggactaatttgtgcttttcatttccatggacatgggttgttaggaatcctacacacatctggccctggtcacccaatagtcttgaagtgtgtgctgcaggaaatggagtcctcacttgttcttgaggtcctccaccaggtcctgcatgtttctcagctccgagtccagacgaccccgttcccccacgatgttgtccagctgcctcctgaggttgttgatgtactgctcgaacaacggctccaggttctgcctcacagtcttggtgccctgctcctgcagcagggtccacttggtgtccagaaccttgttctgctgctctaggaaccgcacctggaggggaagcaaaatggtcattttccaggaaaaggaaggcagagaaagtgtctggtatccagtttcctggaggtctgggaggtccccatggtgctgggctactacagtgcatgtagagaggctcaggctgagctctgctcccccaactccttctcctttgcaccccaccagtctcactagagaaattgtcccacggaccactgaggtgttctcgcactgtaagctattgatcatcagtgagtttcaacatttcttcttttctttttccaagcacaatcacaaatctagtttaaaaatactaattacctgatatattgtacacagttttttttaccgagaggatcttagttaggagggatattagatgttgactcatgattacatttcagtctactttcccatttagtgtctcctctcaaatattctgatgttatggtcattctctgtttttaaaattaattagcatttatccatgttttacagttgtttctatgtccctttttttcttaatccagccagattatcttttccttttctttctaaatctttttcctcttacccagaccccagagtgtaatttaccagcccatatactcctggcatttgctttgtaatctcttaaacacttcagaggggagaattaacctactccactctctgatggcctcatctgtgcttcagggttatgaaaagttatggctctccctaggcaggagtgagggccactccagatatcccatgggggagtgatgcccatctgtgctgcctcctgtgcaccgagagccacctgcactctctgcagagctgggctgagtccccttctccctccctcctagggtctctccggcaggaaggtgttgctcttctggtctggggaccctgaagtgcccgatggagggcatggcactggctcaccttgtcgatgaaggaggcaaacttgttgttgagggtcttgatctgctcacgctcctcggcccgcacccgctggatggcggggtcaatttgcaggttgaggggagtcaggagactctggttgacagtgacctcttggatgcctccaggggggcacacagggaagccagggcccccaaagccaccagcaaggccggctccaccacccagaccaaagccaatgccggctccaccaccgaaaccaaatccactcccggcgccaccaaagccatagctgcctccggctctgctgccatagccgccactgatggcacagctgccccctccaatggagatcctcttggagccccccaggccatacagactgcggctgccaaagccagctcctccacatgcgccacccaggccaccactgcccctggagcgggacacggagatgctgctgaagccagagcggctgaccccagggagcctggctgagttggcactgaaaccccggcggctgctgctgtggctcctgatggtggtggatgtgctggccatggttccaggagatgagagggcttaggagagtgtgagaggctggaggcgagagggaggagaagcaggacgaggaatcggactccagtagcagcttatatatggagagcatgggctgggcccagtcctggaaggtgagcttgcaggttgggaagggctgggctttacaaatagtgagatcacacctgcattattacaaaagttatgaaataccgagattgcatttttcgcttcctttagtcaggcaaaatgttcctgcctccagctttgacttgagatctcagcacaataagagtattctcaattcatgaagttggaattagtcactgtcttcagcaaaggttctgcatgctaggctgtttatcgacatgccctgagtgccctcctcttcccagtctgactttcttccagccttgctgttggagatcacaggcactgtattgtgaattccttaacagaaatattacaatttccccataattgtttcaccttttaggtgcaattttaaacaggtagagaagcagaacactgcaatgggcctgtatatacctgtcacctgcttccatgatgatcatctcatggccagcctgatttctttcatacttcaaccctatttcctcttccattctagattgtttgaaaggaaattccagaagtcatattatgtcttcaatcaataattcaatattaatatctaaataataggtcctttaaaaaatcaaaacactatttttatatcttaaaaatttacatactaattaaaatgaacaagtgtctatttagtcttcaagcagtcctatttttgatatatatttcttatattttggtgtcccaatcagagtcaaaataagctctataaacgttgtatttgagtgatatatcctttaaatcattgaaatttaaaaatctcccttcatttcttacttttatttgttaaataaaacaggttaactgttcattgtactttttcattcttgggatttttctaattgcatacccctattgtttcctttaatatgagactctaaccttcatatttcatattaaaattagaagcttattaagattctgtctatatttaaacattctagaagtaaatgtagtagattgcccatttaaattttgaatagtactatttgcacaattatttacatgtttacaaattgaatacatgatacatgttttaaaaaattttttgtaaaacatgctaaacaacaaaataatatagctcaaggccattccccagttacccaattcctatctatggaggaagtaatgttagcagttccttgtgtatccttgtatctttacttggatattttcctgtgcttttcctgggccatgggtgacatgtctgtgcatatgtgtttgtgtcaacgtgtgtttgtatgggtgaggaagaggtggagggagttggcatatatagagagggagcctgcattgtagaaaggtatataaataaatacatgaatgttttgtgtgtatgtgtttgagtgtgttttatgtatataaaatatttcatgtattcatatgtacaaaacataaaaatattgtctttttcaattgtgattgtgttgtgtctgctttgtctcccacatctatgttttctgattctctttttaacagtctctagtctctttttcatagctgtttgcttttcccagttattcgaggacatttctcccaaatgtccattactgtctgtttaccaatgtctttcctccttatgccgctttcaatttgggcttcatttcttttttcttttcttttttttttttacacagagtcttgctctgtcacccaggctggagtgcaatggcatgatctcggctcactgcaacctccgcctcccaggttcaagtgattctcatgcctcagcctcccaagtagctgggactacaggtacctgccaccatgcccggctaatttttgtatttttaggagagatggggttttagcatgttggccgggctgatcttgaactcctgacctcgtgatccacccgcgttggcctcccaaagtgctgggattacaggcgtgagccaccgcacc

SEQ ID NO: 916388 - DNA, 4001 bp, Homo sapiens
aaaagcagcttgggattcaacaatttcctgaatggaatatattctaattgagctttcctgccacagagagccaaagagatgagttttgctactactaaatttgccacttctttaatccccccatcctcccataaccatctgtggttcttgcaggtttgctcctagggactaatttgtgcttttcatttccatggacatgggttgttaggaatcctacacacatctggccctggtcacccaatagtcttgaagtgtgtgctgcaggaaatggagtcctcacttgttcttgaggtcctccaccaggtcctgcatgtttctcagctccgagtccaggcggccccgttccccgacgatgctgtccagctgcctcctgaggttgttgatgtactgctcgaacaacggctccaggttctgcctcacagtcttggtgccctgctcctgcagcagggtccacttggtgtccagaaccttgttctgctgctctaggaaccgcacctggaagggaagcaagatggtcattttccaggcaaaggaaggaagaaaaagtgtctggtatccagtttcctggcaggtcttggaggtccccatggtgctgggctactacagtgcatgtggagaggctcaggctgagctctgctcccccaaccccttctcctttgcaccccaccagtctcactagagaaattgtcccatggaccattgaggtgttctcacgctgtaagctattgatcatcagtgagtttcaacatttcttctcttctttttccaggcacaatcacaaatctagtttaaaaatactaattacctgatatattgtacacagtttttttactgataggatcttagttaggagagatattatatgttgactcatgattacatttcagtctactttcccatttagtgtctcctctcaaatattctgatgttatggtcattctctgtttttaaaattaattagcatttatccatgttttacagttgtttctatgtccctttttttcttaatccagccagattatcttttccttttctttctaaatctttttcctcttacccagaccccagagtgtaatttaccagcccatatactcctggcatttgctttgtaatctcttaaacacttcagaggggagaattaacctactccactctctgatggcctcatctgtgcttcagggttatgaaaagttacggctctccctaggcaggagtgagggccactccagagatcccatgggggagtgatgcccatctgtgctgcctcctgtgcaccgagagccacctgcactctctgcagagctgggctgaatccccttctccctccctcctaggtctccctagcaggaaggtgttgctcttctggtctggggaccctgaagtgcccgatggagggcatggcactggctcaccttgtcgatgaaggaggcaaacttgttgttgagggtcttgatctgctcacgctcctcggcccgcacccgctggatggcggggtcaatttgcaggttgaggggagtcaggagactctggttgacggtgacctcttggatgcctccaggggggcacacagggaagccagggcccccaaagccaccagcaaggccggctccaccacccagaccaaagccaatgccggctccaccaccgaaaccaaatccactcccggcgccaccaaagccatagctgcctccggctctgctgccatagccgccactgatggcacagctgccccctccaatggagatcctcttggagccccccaggccatacagactgcggctgccaaagccagctcctccacatgcaccacccaggccaccactgcccctggagcgggacacggagatgctgctgaagccagagcggctgaccccagggagcctggctgagttggcactgaaaccccggcggctgctgctgtggctcctgatggtggtggatgtgctggccatggttccaggagatgagagggctgtggcgagcgttggaggctggaggcgagaggcaggagaagcaggacaaggaatcgggctccagcagtagcttatatattatgagagagcatgggctgggcccagtcctggaaggtgagcttgcaggttgggaagggctgggctttacaaatagtgagatcacacctggatcagaaaagttatgaaatgctgagatggcatttttcacttcctttagtcagggaaaatgttcctgcctccagctttgactcgagatttcagcacagtaagagcattctcagttcatgaagttgaagttagtcactgtcttcagcaaaggttctgcatgctaggctgtttatcaacatgctgtgagtgctttcctctttccagcctgactttcttccagcagagatgttggagatcacaagcactgtattgcaaatgccttaacagaaatattaacatttttcctgtaattatttttccttctgtgtgcaatttcaaacatgtagaggagcagaacacaatgggcctgtatatacctattacctgtttccatgatgattaccttatggccagtcttatttcttgtatatttccacccggttcccttatcaatgttaaatttttttaaatcccaaaaatatttgggatttaattcaatattaattcaatattaatctttaaatgatagaccttttagaaatataactgaaatattattttgtattttaaaaatgtatgtatttattaagtcttcgccctcaaggagttgactctaataaagatgacaacacaaaaggagatagaagacatcacatccagtggcatcactgagctagaaagaaagtaatgctttactaggaagaaaagagcatagagagggggtgtagaggggacagtggggaagggtaattttttttcttttttttttgagatagagtctctctctgtcacccaggctggagtccagtggtgcgatctaggttcactgcaacctccgcctcccaggttcaagagattctctcacctcagcctcctgagtagtttgagattacaggtggccaccatcaagcacggctaattttttgtatttttagtagagatggtgtttcgccatgttggccaggctggtctcgaactcctgacctcaggtgatccacctggctcagcctccaaaagtgctgggattacaggcatgagccactgctcccagccaatttgtgtatttattaacatcaatgtgtctattcaattctccaatgtcctttttcatttatttccttattgtttacaattcttttgttgataagaccaggttaattgtcctgagtagtgtttcagtctttgggatttcctcattgcttactcacagtgtttcatttaagatgctactgtgtcctctatatttcctgcaaactgatcattaaaacttgaagcttaataagactctcatatacttagactttccagatgtggatgtagtagaatgcctatttaaatactgaaaattggccgggcgcagtggctcacgcctgtaatcccagcactttttggaggccgaggggggcgaatcacctgaagtcaggagttttagaccagcctggccaacatggtgaaaccccatctccactaaaaatacaaaaattagctggtgttgtagtgcttgtctgtaatcccagctcctactccagaggctgaggtgggaggatcccttgaacccgggaggcagaggttgcagtgagccgagattgcaccactgcactccagcctgggtgacagagtgacattctgtctcaaaaaaataaattaattaaaataaaaaaattgaaaattgttatttacacattcatttatatgtttataaattgaatatgtaataaatgtttaaggagaaaatacttactaaagccattccccagccatgcaaactttttatgtggaagtaggcactgttaccaggtccttgtgtatccttctagtaactttacttggatatgtttctgagctttttctggggaatatgtgagatttgtgtatttgtgt

SEQ ID NO: 916389 - DNA, 4001 bp, Homo sapiens
gctccagaaaccgcacctagaacgggcgagaaggaggaaactcaagaggagccagagcgtgccacccacagcgggattgaggaacatcatctttagccacttagcagagccatgctccccctggctgtttccctgcctggggcttccagccctctccctttggactccaaatcaagtgtcctacagagtgatccaggaagcaggtctgcctggtgcacggaagtgccccgtggttgactctcgacgaatgtgctccagggcctcctctccacttcactccccatcacattacaggtggtgttctccacctccctatctgaacagccacctcttcctgtcaatggatcatgaggatgaccaggcccagccctcccttctgtctgggacctcttctcttccttcctcaatatcctttctctccttcccctttctccagcaaggcctcaggacagtcaatccatggtaaaatgaccccagcctggagcccacaaaggcccttaaggagtagccggtatgactggaggtgggaggcaatagaggcctctgcaaaaccagcagctcagggccccaggccctggggaccacagagagtaagacggtgcagctcaacacatgggggaacctgggcctggagcagcttggggaggcccctatgaaatctaaaagaccggtctgggtgaatggcgaaggaaaggagaacgtgagggaggcgggtgtgggagtacacttcgtctaagctgaggaagggggccctggccagaacagcccagcagggccagccctgagttcctggctttggcagcactcctcccaaacccaccagtcaagtctgccctcgccccctccagcggccccatgtgtggcggaggccaacagccaggaaaaatatctccaaaatggacccctttttgagggccctctctgccactccctgcccccaactgggctgtcttcaagggcaggtataacctctcctcctgccacctaagggaggctggaggaccaggcaggtgggggaggggaggggcgggagcccccccccctcccccgccccaccgactgccgctctaatctccagcatctgcatccgcatcagcatctgagagagcctgggtctccccctctgggaagggcgtgccatccaactccattcctgactccacacggtcctctctcagggaaagggtcccagagagagaactcctggcctaggcctctggaactcctagtccgaggcaaaactggtccaggtgaccaacaggcagccagcgagggcagccctacaggactcaggcccgcactccgggaggaaagggaggggcagctgggcagcttgctggaagggagggcttggaaaccgaggggataaaatagccacggggttcatgcgaaggaggaaggacccccagatcgtgtccccaacactggcggaaagacagaagggcggcagtgctccccagcgcctggcccgcgcgcaggcagggctagttagggcggctggtgtggtctggagcgcggctcgaggagaggcgaggtccagtcccgctcaccttgtcgatgaaggaggcaaacttgttgttgagggtcttgatctgctcgctctcctcctggcgcacccgctggagggaggggtcggcgtccagccgcagcggggccagcaggctctggttaatggtgacctcgcggatgccggcgcccaccgggcccccataggcagagcgcacggccacgcgcggccgtgaggcgccgaggccgtagaggctgctgctgccaaggccgccggggcgagcggagctcaggcgcacctgggcgccgcggcccgagaaggcggctgagcgcgaggtgaataccggggagctgaagtggatggacatggtggctgggccgggatggacctagcggcgggcgaggaggagcgcgcactcgctgacctcggggacactccgcgccttttatccgcgggagcgggcggctgggcttccacaggtaggggcggggctgccgcgggccacctttctctgctgccaggcccctcctggggccgccctccgccctctgcccgcccgccccgccgaagcccaggctttcagtccaagcagggatggtccggagtaggcaggagcgccatccctagacggccgcagagaacagcgggggaccgcagttccagcccattggaaacggactcagtgagggaaggcttcccggaggaggatgcttggagagggagtgaagaacctagagatccctgaggcccaagcagagagacccagtggcaagagactgggggaaggggtgggctgaaaagttccaacccaggagtcaacgcccagacgtccccatcctccaggctgctgaagccagaaaggcattccttaccgctctccctcacaccgatccagctcctccttgagagatcagctcacttgttcaggggtctgacccctcctggcccagctagtttccctggctgcgttccttcctacttcatttcccatagaaactaggctgagagagacacacgaccgaccgcacctctggctcctcccctccccactccagtaggcatcggaatcccagggaccttgggaatgcttaccctggaccctcacctcccggaccctccactcatattcctgcccatttattttatgcgtccctgtacaggaaggggacacttgtgtgtatttgtgacactttgtggatgtgtggacactttgtggatgtgtgcacacgcctgcaggcctctgggctctgctgtgctcacacccccaggcatatgcacccgcatgtctgagcctgcttacacagatgggggtctgtgcgtgcatcctgggcgagggggcagctgtggctacacaatggcacacattttcatgcctgcctgagtgcgtgtgcttctgttagcactcaactctcctcccgctccctccaccattttcctgtttaaaggccctcagctttcatcatctttctcccgtgaagccaccaccaaacaattcccagcagtttcaaacccagtcaagaggggtaatcctagtgctggaaccgaataccggacaaagcctgagtgttggcctcacttcccggtagggccagccatgcttgccacaccctgttctcaggcctggcttccgtctgcccttagcccacctctagcccctcccaataagctggccaggttcgttacctcagacctaagcccttgggggagacaagggtggggacggaatgtccttcctgcttggccatttcagttaaagcacaaggacttccagtgaggctaaagactgtcactccttctcagtgatcttagtgaaggctcaccagcctccctccctgcctcccctcctgaccctagccattggtgttgggtcagctcaggccagaggcggaggggtgcccaaggagacctgctgtggtatcggctgtggagcatgtatgtgtgcataagaccgagagagattcgacctggaattgtgcctggttgtagcttgaagagcatacggattacctggtcctgtgatatttgcattcataggaatctcactgccctccttccccaacgcccaagcaggcaaaaaagaccaattgtttaatttacacacacacacactccaacttcctcacccctcagggctcatcttcaactctgtttttaccactgcctctcacaccaacgcctgctctcccatacctccactaacaagttctgcctctggccctctcatccgtccccatctccagccccctacaggatctgcgctctggaggctgtgcccacctagaccaggagttcctgcatccacttctcccctaaagcctggctgggaaatctttgtcagggcactgctgttgccttgaggccctggacatgtcactgcccctccctgggccatggatttttcacccaagatgaaatctccagattccatacctagagaggactggggaggacaatgggaaggagaaaaggtctctgggcttttcaggctcacatc

SEQ ID NO: 916390 - DNA, 4001 bp, Homo sapiens
tgagacaccacaatacacacctgcactactgaacacatctggatgccgaaaggatttacccgtcttctctggctgcctgaggttaagggactgatctctggagactgaaattatttgggaactgtccaagcctttcagcctccttcccctccctctgggcagaccatctttataaacaggatgtgaccctcctcatgttcatctttcttcccatgtctccagactttatccttctgtaggttttgaccagccgagccaagaatcaatcagtccactcccatcacccagaccccatctcagaacactttgatcttgcagatatgaaaaggcttagaagaataagaagccgcagagccagtcctagcccctgaggctgagccgagggcagcagggactcctccaggcaggaagtctgagctgcaggagctggctaagctctgatggccacatgaccgtctcacccatagactttgtcctgggttgacccgtccttggtgcctgactgccacagagccaacagaaccctccagtctcctcctctgggtctggaggcaaaaggctgagggtccagcctcacccttccctttccccaaatgaccctgggaatgccatttacctccatgccttcagtgactcatacgatagggataatcatttcttctctgccagaagtcaggggcctatctggactgtgtcatctcttcaggtctctagacacctttgattcctcccctgagcttccctcccccacattccagagataagaaatgagagtcacaatcacaatcatttttggagtatttagtgtgcgtcaggcttgtgacaagatcttcacctgcattttcttttataagcctgacaacaaccccaagacagaagttattatctccattttagagatgaggagatggcaacacagacaggcagatcaccttcccagagccactcagctgtggccagcagtgagcacaagagcaccgtggagtccccttccccagtgccctcttctgcctctcaagaaagtcttcaactgactggagcaaatgcccaatcagagggcctgaagcggccccttcctgctgctcctgatccgctgggcaagtgaccagtgggcagggcagcatgccaggggaggaggacagcttccctgcttactctgggcgagactggctctcacaggccttttctgcacacggcctgcaggcctagcaatggcaccaagctagccctcaagaggaaggaccacatctcttgctgggagccctgagaagcctctgccagtagaaattgacctgcctctgttttctctctggaaagacaacacagagaaccttacacaggtcaccctgttgatgggatgtacctaccttgtccacagtaaagtcttcctcacatctaacctcaatctctcctgctgtaacaaaatcgtatgttccaagaagagaagaggagggctgttcacaagttccccaggccctagaagacccaccttgtcgatgaaggaggcgaacttgttgttcagagccttgatctgctctcgctcctgggcacgcactttctggatctcggggtccagctccacgttgaggggggccaggaggctctcattgacggtaacctggtggatgcctccaggtgggcatacagttgggcacacaggccccagggccacactgccaaacatgcttccagcaaagccactggcccggccccggccaaatccatagcctccactcttcccgctgccactggccacattgaggctccggacaccccccaggctgtagaggctccggctgccaaagcccccactgagccctttgctccctgcccggaaggaggatgagctgccccctgagagcacagctgagcagccactgaagccccccttggcggcagctcccgacttgcaggtgaattggcggctcatgttgctggtggagacaaagctcagatgcaggagggaggaaggcaaaatcccaaaaggttctgctggttgtagtgaggactggcaggtgcctttatatgtgcttggcactggggcttgtggatgggcagtcaagagcttaattcgtgggtttggcttgcctgggagcaagaagtcattttctctatgctgagctagagatcaagccctctccacctctgaaacaacatgaaaccttcaaattgctgggcttgcaagctttgctcatgtaatttgggtcttatctaattaacctgctgttatagggtaatttgccccaggccctggcctctccagggggatgtcactggcactgcaccatccctatcctgattaatcttctctgggttgttggcttcctcctggggatgcagcaggtgaagacaggatggactttcctggatagttcaggacactgggtagagtactggggcctccaacttctgttctcctccttcctggaaagggactgatcaggcattacctctccccaggcctcctggaaacataacccatagagggcagctgctctcactcatggggtattaggaggtggagtgaccctctcgctagcatgggacagaagcagcccaggccagagccaaccacgggcactatcctcacttctcccccctcaaacacccataataaagcaggctggaggcttcaaacactggagaaaatgaggacgagaaaaggaggatggagttggggcaggtggctgagaaattcagggacttgactggaaggaggtacagagaagacaaagacagaggctggcccatggcctggagggttatggagattcctgggtggtccacttcctcatttctgtctctcctccaatgtgtatctgctaataagactaggaacaacttgaggacagtaatcatctgtttagagttcaaataaagaagctgttatcaacatgaaacttaactcctattgcctctgtccaggcccaagtgagccaagaacaaggctggctgagccctccccaggagtgcaagcctccaggcaggctcagaccagaaagacccaatgggggcgacccagtaagcacgatgtcattctactccaaacagtcctttgatgccagccccagagactctggctgcagcccctgcttcctagccactggctcctgtgttgggccccagctactcccatgatcgccattgccactgtggccctattcaacccaaggcagctctgtccctgaagatcacccttgcccagagatccctgctggagccccatgggtgaacagcagctctttgctgggtggggcacaggagggaagaaaatctggagacaggctggtttggggctctctctcatattgtttaggggaagagcctggactccagtccctcccaatcctctgcattccttcctctactcttgcccctgccattttgtcttctttgctcttactgaaactacccgaattttcctatccctgccttctctctttctcaccttctctctccatccctcctcatccctcccatccatcttccctccatccttccctctcagcctttcgccatctcttgttctgtcacttccccatcctgctctcctccaggaggtcttcctgcacccacacaggccaggtctgagctctccttacctccctccgctctgaacacatccttagcatgtgctggtggggctgcaactctgtgacagctcccatggggatcctctgaagccatgtcacatgtcatcttagtttttctttgtaaggctagcagagtcttctccagattagagaccacctagtgcactctgagatggagcagggacgccctcgtaggggccttcaggtcccctcaagcatggaaataaaggacaatcttgagttccttcaagggaaattctgggcaccttgctagcctggagaaataaataagcaacctgacaagcaagaagataacagtagcccaaaacaacagccacgaaagctggaatcgtgggatgtttggttccgccatagaaactaaagatagcaccttaacatatgtcccag

SEQ ID NO: 916391 - DNA, 4001 bp, Homo sapiens
tgttcacagcaagttaccacatcttcacaaagttccttcatacttgaccagggtgcacatttttagactcaataactccaagccctctgccacacaccagcattcctcttctcacctatctttcagcttgaggggcagaaggaaacatgctagggaacaacagacataaaagagcaagagaatgctctggcctctggaatagctgctgtgtttcttccatgcagacctgtgccctcccgccacctcaattcctcttccctagcatagtggtgacactcggtccaccaccaactgtcctgtccaaggtgagctcatttcttagcctcccatgtcttaatatcctcatctgcaaggcagaacaacaacagaatcatgggttgtgattgtaaatgagaatcacttgggacggcaccataaatgtcagctattgttatcaggctgtccccttatcactcaccgtctagaccttccatccaggtggagacaagagaagtccattccctgtctcctctccactcactggggtcattgcctcagaagctccagagacaacttccctattaccccaatttctggatgccccaccctcagcacacacctgtaactttacatgcactctttccaagtgcctcctcagcctcacccttcagttttctggcccttttctctcacctcctctatcatcttcctggctacacacttaccccactcctcaagcaccaagcaccatgtcctgcaacgtctcttggcctctgttcctaatgccctgccctgaatgtgggtcccatctcctcttctgatattgggagctctcaaagtgcccattccttggacatcctgacccctcccttctcacagtcttgtctcatgcaagaaagaaatgaaggtccttgatacgttttggctgtgtccccacccaaatctcaacttgaattaagtctcccagaattcccacgtgttgtgggagggacccaggggggaggtaaatgaatcataggggccggtctttctcctgctattctcctaatagtgaataagtatcacgagatctgatgcgtttatcaggggtttccgtttttgcttctgcctcatttttctctggccgccgccatataagacgtgactttggcctcccgttatgattctgagacctccccagccatggagaactgtaagtccaatgaaacctctttttttttttcccagtctcgggtatgtctttatcagcagcatgaaaatgggctaatacatcctgtttattggaagtatgtgccaggcactgttctgagcacttcgtaaacatcccaattaagcctcatcgcaacccactggagtaagacccattattgtgcccattttacaaatggaaaagggaggctcggagaggttatgacccgcccacgctcccacacagctcgccagtggcagagccagcaccactgtgcacatgcgcccaacgcagggacaggccaatgcccgaggactcaccttgtcgatgaaggaggcgaacttgttgtttagcgccttgatctgctcccgctcctgggcgcgcaccctctggatctcggggtccatctccacgttgagcggggccaggaggctcttgttgacggtgacctgagggatgcccccgggtgggcacacggagggacacttgggccccagcccggcgctgccgaaggcggtgcccacgaagccgcccaggcggccgccgccccgccgtgcagcagcgctgagcgccaggcttcggctgcccccaaggcaggagaggctcttgctgccaaaggaggccgagcccttgacccgggcccggaatgaggcggagctgctgccgatcccgccagagaggaccgcggagcaaccgctgaagcccaggcgctccccgcgggggaaatgggtcagttggcggctcatggctcgcaagtaccggtgctggccgcgcgggaggcagaaggggcgcaaacagccgctgcgttctcggcccagctcgccccttaaatagcctggctggctggagtcagcctaatttgtatgtcgacaacaccttttagatcccttgaggcctcttgggttcttcatgtaggaaattaccatgcactcaccgagatttttgtctgttccaccgtgaactccccatgaatccctgtaaagtgacccagaacccagcatttacttggctcacctcctgcattatcatggcttagcgaccttatctccacctgctggcctccaattactggggttatcactcccaagatcacccctggaaacttccagtggggctgaccctctgggtgtgtgtctggggagacggaggtgtgtgaagcagaagtccaggctgcttctgcttcagaaggccatgaatagagtcaagactatcgcagaaaatcatccttagcctgtcctcctcctgcctcccaggcttctggatgaggacagctctgtcccttgtgcaagaaggaagttcagaaggaggagattttggccccgtctgcagagacctctcagtctgttggagaaggcaggacacagagacctctggtcacaagtgttgagggttgactttggaccagagcgaaaagatttctccactaagcatttctggactaagaatggggaccatgctatctgggagggagggaagaaggcctggggaggtggtacaggaagactcaggcatggtttagcagatggtgtttcctaaggctttcggttgttttcatttttgttttcttttaatagcagaagaggcttatttatcccatccagcaaacctctgctcaggtcatttgccacccagtcatttctgattcagcatcaaaatgtgatcagttattaggaagaggtcaagactcttcagatctaaaaccaagaactagattctagaacttcattccctttaagctacagaggctccttcttccacctaacccgatttccttttctcaaacttaagctgccttcaagtctcctcctctcttagcaacagctctcctgttcctctggcatgcaggtgggattatttcattgctcttatttcttaagctgccagagtcctgggtgtgtgttccatttcctctatcagattgacagggccccctggattcacccttccctcctctgctcccccagtgctcagcccaggccttggccaaagggacatttaggatgattgtgaaacagcagagtgcttagggcaaggcttgttactgcaccttcagtgataccctgaaggctgggttccccttggggacctcatgggttggttaaatggtacctgggggtaattggctgacatagcctccactgggccaatgacaggacataataacagccgaagcgtttactccacggggaacaaagttgtgagggcattgttaagcgctggagatggcaccgatcacagatgaacagataacggcatctgggtgtcctaggtgggagagagggtgggctctcagtgctgcctcagaggaggggctgtagtcccttccctctgaagaggagaagggcagtgtcagtgtggctgggtgacagcagacccttcaagaagatcaaggttatgttttttattattacatgagattttccctctaccccgtaattttagccagttttttttccacaagcacaaaaatgaatttatttattccagccattgagaatagaaaagcaaggaatggattacactgaaagaggagaatttttacgtaggattgactgacaaagggtgtctttgaaataattttttttttcttcctagaaattttctaaggagttgagatatcctgggaccagggctcttctgcccagggttagggaactgtaagatgaccttttctcatcttcctatgaggggttgactggctggatgaataaggaattcctcaacccctgaatcacctttattacagatcatgaggagacacaagtgacacatgcagatttcaaaggcctcagatgtgtggggatgtcagcagatcaaagggggttgaggcctg

SEQ ID NO: 916392 - DNA, 4001 bp, Homo sapiens
aagttctcactctgaggcagcccttaaggttgggaggggcaccaatgtcttcatttccctctcaaactatcaagatctagatctcctgtctcctctgcacttatccaaacctgcctggaccgatgtccatgttcagtccaggccacctctccaaggcagccccttagacacaagctggcctgtgctagccttcacactgtcaggccttctgctcggggtctggtggcccgtgctctgcctagtctctccctccttgtgcgtgggctctcccagcccagccagaggcagatgttcagcttatctggggtctccggccctcctaagttgctttcatgtctgaatctctactatctcaatcacagcattgtcccagcagcagaacaagcattctcaagttgcaacctacaaatatatcattcccttgcttaaaaccctcaggtggttccacatcaccctcagggtcaagtccatattccttatcacactcttcataatgtgcccagccctcctggcttccttctttactcatacagtgatgtcgtaaaccgaaggtctcccattccccagacaagttctaccatgctgcacgtgctgtctccctagattgccttttccccacctccatctgaaaactcctactcatgcctcaccaccctacctcactgtcgctccgggtgagcttcccctgctcctctaagcttaggaagtctctgcttcccaataccttcctaccactttgttcctcagtgattctcaaacctgagtgtacatcagcatcacctggagagcttgttaaaatgcagggtgctgggccctgctgcagagtctctgattcagttgctctggggtggagcctgagagtgtgcattctaacaagcgtccaggtgacgttgctgctgctggttccagggccacctttgagaaccactgctctagggcaccgtgacctccagctgccttgcctcataggctgtgtgtgttacggactgagtctgagctttcaggggacacaggaggaacagctgggtcgcatggcagtctagatgccccaggctgtcaagggcatctccttcgcctagcttctaagtctcacaggctgtcactctgctacttctcaactcagagaccgctctcattgcttcctggacaccttcctgggctaggctgctggctcctctcacccctccaaccctggtcccttgcctctgatgtccaggctttgtccagttcctccctgggctatgtctgcatcctggggaggtgtcctgccttcgtctgcttcagacagggagcaccccaaggacaatgaaggcgggggaaggaaggggctctacggcatgagcaagccttatgggcccagcacctggggagctttcaagttgtttacctggtgtctgattttgctgggagaaaatgatttcttgctctcaggcaaattgaaccacaaattagggcagtggctccctcctgagtccttaaaaggggagcccaagatcagctttctccagaaagacccaccttgtcaatgaaggaggcgaacttgttgttcagcaccttgatctgctcccgctcctgggcacgcactttctggatttcagggtccagctccacgttcaggggtgccaggaggctcttgttgatggtgacctgatggatacccccgggcgggcacaacgacggacacacggaccccaaggccacactgccaaacatgctgccagcaaagccactggcccggccccggccaaatccatagcctcctgcccacccactgccactggccacattgaaagagatgctccgggcaccccccaggctgtaaaggctccgactgctgaagcctccactgagccctttgccccctgctcggtaggaggatgagctgccccctgagagcacagcggagcagccgctgaagccccccttggcagcagctcccgacttgtaggtgaattggcggctcatggtggggaggccagaaagtggggataagatgctgacccttagctgagatgcagttcaccagcctgtgatcctgggctcccactttataggactcaagagggagccatgggcctaatttgtgggttcagtttgcctggaagcaagaaatcattttctcccagcaaaatcagacaccaggtaaatgacttgaaaactcccaaagtgctagtcttgcaagtcttgctcatgtaatttgagttttatctaatgaacatgtgtaattagcatgggcacattatccatagaaagatcttaggtgggaggtttgtcgcagtctcaattgctgttccccagggagtggtggggcctgggattgtaggggtacagaggggagacctttaattgacagtgtcatctgttagaaatctcacaaccatgccagcatcagatgggctgcttcagggaccctggctgagctgcttttatgtggttaagaagaggctgctgctgcctggcttcccagagttcctggagacaggtttgatggctggccagggccataggagaggagcacactgggaatccaggaccagcctctggctgccagccccctgctgtgccctcccaggcagctctcctgctcctctgtgccagccgggctgccctgctcaccttcctttgcacacactgacttctttttccctttaccatcccactaccctgactcttgaccttgaaattatggtcattgcaccattcacgatggctgacactggtgcagcactttacagtgtaacagagctcctcacacaagaagctcatttaatccacttagtctgcatggaggggaatggtgatgatccacattacacaaatggggaaaccaaggttcagataattgaggatgtcattcctttagcaaacatttagtgagtcctttctttgtgtgaatcccagagaatgaaaatgcccccaaaaagcacaggccccagccttgaggactcccttggctggtcttctgactccacattcagagctatgcccgccttattcattcgtccatctatccgtccaaccagccagccagccatctacttgttcattcatttatccattcgtttaacagacttctcttgagggctgactctctcccaggtactgtgctaggctcttgggtcccgaattatgaagaccaaacctagctcacaattttggagatggggaggtaggggaagacatttgaatttcatggatccttgacattgccaaagtatgtgacccaagagtttcccaaatcccaaatcccaaatatatccatagtatagaatttcctccataaaaacacaagtatttcactagctggagtacttgaatgaacagttggcccatccttcttttctatttctgtatagaggttatgatatgcctctaaaattgttgtactaagcaattgccaaattcaacctcccctctgttttatacaatatggttgttttctagttaagaataatcattttctttgatgtcttcaatttcactaaaggcaatgccacttggaagtcctttaatcttttttagctaacatgaagttctattcctttttttctttttttttttttttttttttgagatggcgtttcactcttcttgcccaggctggagtgcaatagcatgatctcggctcatcgcaacctccacttcctgggttcaagggattctcctgcctcagcctcctgagtagctgggatgcaacaccacgcccggctaattttgtatttctagtagaaatggggtttctccatattggtcaggctggtctcggtctcccaacctcaggtgatctgcccgcctcagtctctcgaagtgctgggattacaggcgtgagccaccgcacctgacccaaagtttctattcctttgtaagtttctttgtaaggcacaaagaagaccaacaaaactgcattgtgatgagaatgcttagtattccagccagaatcactccctaattggctcatttcagcacaccagcactggggtggaggtgattcaggcctgcat

SEQ ID NO: 916393 - DNA, 4001 bp, Homo sapiens
caccagccccctcaccaggcaccagccccctccccagcctcctgggctgaagtcctgagcagagttgttaagatgggggtgcgagagaccctaataaggaggctcctccctctcttaccttcttaagcaccacaaactcattctctgctgtcgtgcgccggttaatctccacttcatatctgccagcagggagagtagatggccttagcccccttagccaaggaactttctcttcctgctggccaggcaaatgtttgggatacagggtccctgcagggtctctggggtgagcagtaagaggctagtgacaggagtaagatatccctgagttgcttcacttgtctcctagtttttgcatgttaggaaaacacccaggtgcctattgggctcccgacaccagcaactgaacatttcagtgggtcaaggagcacaggaaccgcttcctatcaactaggcaggaagttatcatcaaagaggataggcccttccccctagccagagaaagggatgtgagctcctgaccctggtgcatactcccccatctcctaaaaaataatggcacagagatcaggtgagcccagaggcacgggaaacatggtctgtgaccctcgggtggagcctgctcacctcttcttatagtcctccaccagatccctcatgcttctcagctccgagtccagcctcaccctgtccccagacagtgtctccagctgcttccgcaggttgctgatgtagccctcaaggatgggctccaggttcttcttgcagttgttcaggtccagctgctgcagcagctcccacttggtttctagaacctggttctgctgctctaggaagcgtacctggaacccaaatcaacagacacctggaaccacaatgggtgcagtcatgccccctggacacacaccattgactccccaggtttgccatagattgttgtagtcatttttgctcatgtcttgactctccacccttgccattccacacaaactagatcctttacaagtgctcatttcctagccttctggacaaggcatcactgagaactcactcaaggagtttccacagctttcttctattgctcggccctggtcccaggagatgtccttccttatgtctcaactaagtgtctcttcctgtaccatgagcccttccctctgaacactgctggattctattagcctttcatgttcttggaagatccagctgtcctcaagaaactcatcacttttttgtcaaggaagggctgctctttacccagcttcccatccttccctgcaaaatcgccaaagaagccgatatattcatgtattcctttgtcctccgtggctcacagacctactctccttccctaatggtgaggaagcccttcctgaggcccagctgcacctttccagccacagtgtgcagtccattcccaggcagcaggaaaactgctcaggcctcagggtgcggcctcatcctcctcctatgagacccaccttgtcaatgaaggaggcgaacttgtcgttcagcaccttgatctgttcccgctcctgggcgcgcaccttctggatctcagggtccagctccacgttgaggggggccaagaggctcttgttgacagtgacctggtggatgcccccaggtgggcacacagacaaacatgcaggccccagggccacactgccaaacatactgccagcaaagccactggcccggccccctccatacccagagccaggcctgaagccgtaacctccagcccgaacgccgccaccagccacattgaaagaaatacgccgattccctccaaggctatagaggctccgactgccaaagccagcgccagcccctctgccagctgcacagtaagaagccaggctacccacagccttccttggcaccactgccgaatgcacactgaagttgcccttgtcaccactggacttgatgttcagttgccgactcatggtgggaaaggttgagttgacagagctggagaaaagcagtctccaaggggtagagaacacactgatggggcacccagagtgctgcctccttttatccctgttgagcccaggacaccggaaaagggcgtctctccactatctcctttcccctgctgatgggccaggggccatgggcaatttgtagaacagagatctccaagccctttgcagcaacaaagctcttctgatagcaagtggaatatgctgcccttgcagagtggagtggtctaatttggagtttatctgtgctccctaattaaggacctgaagagttatcccctgaagagatctcctagctttatttttccagtgctacctccttcttgcttaaccatcagcaaggagcaggggaaatgcctggctttccccagagtagactcacctgaaaaaccccaggtttcttcccaaaagaaaccatctctctattatagggtcttgtgtggaagctggaatttttacctcagggaaaagaagacatggaaagatgattcttcttggaaagatgtcctcaaagatctggatctgggtaagaagctccagggtccgtccttgggccatgctaaggaccacagctgtctagcagtgaagtggaccccaggaaggaagaggaatgactctgcagcatctgcatgcccccctagcagggatattgtctagggccttctgtgttgggcagggcctgggtggtggtgaccttgacattgccttacaaccatgagaacctttccagtcagctgcatttcctccagttggattttctctcctggataagattatttgtcctactctaggaagtcaggcaggagctgggatattagcccctgcactccctggggaaacaccctatggctgaagtcaccaaggaacaggaccccctgagtttcactcccaggttcagggtgggctgttctgccagtttcctggcaacttcagggagcactcaattttcaaacaggaagtatcactgctttatagctcaggtagtgtgggtacagtgcaatgttaaaaaattatttcagggctgggcatggtggctcacacctgtaatcccagcactttgggaggccaaggagggcagattgcctgaggtcaggagtttgagtccagcctggctaacatggtgaaaccccgcctctactaaaaatacaaaaatcagccgagcgcagtggtgcatgcctgtagtcgcagctactcaaaagactgaagtagaagaatcacttgaacctgggaggcagaggttgcagtgagcctagattgtgccactgcactccagcctgggcaacagagcaagactctgtctccaaaaaacaaaaaaaattatttcaaagctaggtatctggcagctgccctcatgcaagactctgaccacttcctataactaaactgagaacacttggcttgtttggatccagccgagggcagaagacaactgctcccactgctggggagggaaaaggagaagctgacctgggcagggagcgtggagcttaggcctggaagctgccccggaagaatttccccttcacagggtgttttcctctcagcccctgaggtaacggtggaaggtccttccccagggaccctgtctcggggggctttcccggcagggcctagccctacagcacaggagcatgtaatcgaaggggttgcttgtggttttctaagtcaggttgcaagggcagcagcaggggtgccgccagatgctgggtttgccgccctcctgtgctggagtgtgcaagacaaaaaatggcgtgagttccttaacctgggggtgactgtcctagggccccagccaccaagaagcctgcagaccaatgagaggaatctacacaaagaacttaaagtagagccaaagctctggaatgacagaaaagcattatgaaccacgaatcagaggtgcactgaggaatggctcatcttgattagggtttttggggatctccagaagccaggcttatattcccaacaacgcccactacaggtgctggctcagagtagtggctcagaggt

SEQ ID NO: 916394 - DNA, 4001 bp, Homo sapiens
ccatcttttgatagatatgcaatgctaatctaaaatgtttttccacctcaagtgtctaccgaaatcgtggagtaaactttatctgttcagcaggctgtttcgggtagattttgatatattttcactgaacctcagggtggcccctgagaaatatgctttttgtaactaggggtagctcaagcttagaaataagggcaagctggctaatgggttagtctggaccaaatccctttccactggatacctcacctactgcagcctggatgatgtgcagtcaaaagtttccccccacaagaaaagtcagattgccctcctttaaactcttccttgttacctctcttcactctacagtgaatgccatcctggaaatgcaaaccatctcaataattgagcccatgtccaatggaattaaacaatatgctgactgtgaaattacattatgatttctagagtgagtagcaatattttgtcggatgatgttgatatccctttgcagtcatgtgaacaaataggaataggatcttcatagcaatacacaagatgaaggtccttgtgctaccccacacagtgctgtctccaccttgcaggataaaggctgcagttccaaagctcccggctgatatcggcatttgctcctttgcacctctctggtcctcacacaaaggagccttcagatggctgtgtgtggccagaagccagtctcccacttacctgactttgaaatcttccacaacatcctgcatgttcctcagttcagcttcaagcctgcccctctcggtggtgatgctttccagctgccgtcggagctcactggtataggaatcaaagaggggctctaggttctgcctcacagtcctggagccctgctcctgcaggagggcccacttggtctccaggaccttgttctgctgctccaagaacctcacctggagggaagaagagagaatgaaaccttgagaagttggagaggcagagttagacactcctattaataagggagagaagaaaaagatatttttttcacttggcacccattgacaataatgtaactgacaactccaacccaaaaggaggcagtccatggagctaccgcaaagttccctagggcttgcataggattcgggtggtggggcctagaggcttctgttggggagctgctcttgggttaagtttctcaacaccacctactctgggttagggtagtttgctgagcagcaactctcctgtagagaatcaacaaaactcttcccttggtgttgactgaaccagcccatgtggctccgaaagagaggaaatttctaccaggtcctgtggggcaagctggcctgacttggaagggtctcagcccctgggagcccgtgctgaacagtgctcattcccacagtggggtcattgcattattgctctccccccatgggatggcccttccaagagtttatttgatcccaaacccaagggggtggatgaagcccctgcttaccttgtcgatgaaggaggcgaacttattgttgagggtcttgatctgctcgcgctcctcggcccgcacccgctggatggtggggtcgatttgcaggtgaagaggagtcaggagactctggttgacagtgacctcttggatgcctccagggggacacacggggaagctggggccactgaagcctcctccaactccacccccatagccaaatccactgttgactccaaacctgttgctggccctgccaccaaagccacttcggcagctgctgccacacccattgatggagacccgcttggcaccccccaggttgtagaggctgcggcttccaaagctggccccagcactgctgatccttcccaggcccccactccctgctgcagagcgggccacagagacagagctgaagcgggagcggccagctgccggggtgatggccgaggtggtgctgaagcccctgcggctgccagactggaaggtgatggaggactgccgagacatggtgggtgaggaaggccggcgagaaggcacctgaggtgggctggtacaggcagtggagaagacaggtggctggagagccctggtctcgtggcttttatgagcatcctgtgggggcggggcactgctagtggagagggccttctgatggcattccctgggcatccgccaaccctgagctcacactcggcatccctcgggaaatggtgtaagggccactggctggttccctggcaccccctccccacaacgtgcaaactcctttccagttgcaacttgatcagcatatgagtaagaagcaagttaattgctttccgtcatgtgctaatgatgcatcttgtaaaggactcagcaaacactgcctcatttctaaaccgctttcttaggcctgggaccaactccgtcctgtccaaacatcttgtgttaatacaagccactacacttcactgtttccttggggtgcttcctattccctaagcattttctcagcacctactgcctggttccccaagccccatcaagctgtctttccaaaccttgaaggtcgcgctctgtaatcatcttccttaggaatccaccccattttgattgcccctttattctgctcttaagcttccgtgtctattgtgtaggtcacacatggttttctggagtgtatgtgtgcctgtgccctgcccactgcaatataatgtgactctcaaggccagccagtgctctgtctcctgggaagagaggttgtgagaggagaaagactcgggtttgaatctcagacctgctcatagttgtgggaccttgagcaagccatgaaacttttctgtgcctcaactttcatgtctgtaaaatggggtttgtaatgaatattcacatgtgaaaactttcgcaatgcccggtatatgtaagtgctgagtaaatgtctattgaggctcccctctttctgatacaatcaagtaatattaaggaagtgccaaccatgtccatcctgtgactagtcctgtgggaattcaaaagaaacacaatgcacattatttatcttcaacaagctcatggtcctgttgggaagataaaactgtacaagatggtgtaccatgaatcatcacctccaagctgcatttgaggctgcctatcccagaagtctcccaggcagtttcctcctcctcctgaggaccaagaattcctagctctccagtccttcatcaaaagagctccaacagctgcacctagcagaggattcgttccttccctgtttctcctgttaaccttgtagactgtgccctacattctatattagtctacaaaccgcaaagaagacttcaaggcacctcatctctctgttctgcaactcattgccccatctctaccatgggaagagtcaaaccaaaacattgctgaatcttctttttttttctgccttgagacagggtctcactctgtcacccaggctggagtgcagcagctcaatctcggctcactgcaaccgccacctcctgggctcaggtgatcatcccacctcagcttcctgagtagctgggactacaggcatgctccaccatgcctctctaatttttttactattttgtaaaaactgggtgtcgacattttgctcaggctagtcttgaactcttgagctcaagtcatccatcctctttggcctcccaaagtactgagattacgggcttaagccaccgcgcctggcctgaatcttcttttatcttgctgcctgctttcttcttgctgtggttttgaagcctgggagagtaagagaggaattaatcagcattcagtctccatttcgtggatgagggcattgagcccagaatggttaactagtcagacagacccacaagaagcagagccagattccatggtctttccacacaggtgtccttttaggggcacactggtaaccgaccatttggcagatgttctcacctgcctggaatggcagcttggcacttggagcggtagttctttgttctctaaactgtttcctccttgggactgaggcccgggggtaagcctctccccc

SEQ ID NO: 916395 - DNA, 4001 bp, Homo sapiens
ctaattccccagaaggggaaacttcccaggaggagccctcacttctttttgaagtcttccaccaggtcctgcatgcttttcagctctccctccaggttccccctctcccctagaagtgaatctagctgcttgcataggaagctgatgtaggattcaaaacaaggctccaggctgctgggccctgagcctgtggtctgctgctggagcagttcccacttggtctccaggaccttgttctgctgttccaggaaccgcacctgcatgaaagaggggagaaaaggagtcagccccttgagttgggcatgtggggctgcccatcccaaatgtagaactgtggagaaggaacccagttcttcaatctacaatttcccctgttttttaatttgggaaggatgaagatttagcaaagggagagctagaatttgttgagtgattatgccttacctgttattttcatgtatttccgtcacatttaatcctcacaaccacctataaaggagttgctgtgatccccattttgtagataaggaaactgagactcaaagagtttaagtttcccaaagtgacaagtctactgagtgacaaagctaagaatcaaacccaggactgtcctgggtctatagggatccttcagaataccactgaaggaggtaagcacaaataaagtttgtcattgttttttagatgtaagcttttttcagctccataaaggcagtgaatacagtcaatgaggtctaacatttctttagaagtttcacataggaagacctcctttcagttattcagcttgcagctgaactagaattcacttcagatcctgggctcagtcccacacagacccagaacaccctcctctgccccagcatggacagctcagtttaattattggctgaagcacagcatcatctggaaggtaaggcagctgccaatgcacctcatttagatgcagcctcaagatctgtgctaacacaaggttttgattaccagctactttggattatcaagcaattgcttttcaggagaaattaaagtaactgcaataatttcatgactaaaatggctcattcttcaaaaagctaagagcatgtttggacccccacttcatttaccctcatctcattcttagcaggaaaccaggaccaggaattcttccccccatttcacagctggaaaaagaaggcccaaaaagtgaaaggggcatgatcactgtcctgtagggaccaagacagcaccaggacaagagccaagcgcccctgccctgtgtctcacaagtccccatggcatctttctacaccgacccctgggcaccccaaaccctccacagcacctcttggccttgccctcaccttgtcgatgaaggaggcaaacttgttgttgagggtcttgatctgttcccgctcctgggcctttacttgcccaatctgggggtcgatctccacattgaggggctgcaggagactctggtttacaatcacttcctgaattcccccaggaaagcccccagggccaaagccaccaggaccaccaaagctgccaggcccaccaaatacaccaggaccaccaaagccaccagctccaccaaagccaccagcccctccaaaaccactacctactcctctgccaccaccaaagccaccaccatagctgcccccaaagccacctccatagccacctgcaaagccacagctgctccgccctcccccaaagcctccagcccgggagctgccagctgccacgctgatggagatgctcttgttgctgcccaggttgtagaggctgcgactgccaaagctgcctgctccgctcctgaagccacaggcccctccaccagctcccccagagcgggccacacagctcatcctgctgctgccggagaccacagcagagcggccagagaaaccctggctcctgccactgaaggatttcttgcaaacttgtctgttcatagtgagagagcttggaggcaagctagtgatcacttagcaagagctgagagggatagggacaagagaggagactggcctttatataacagggagtttggcttggcaaaaggagaggcgagcaattagttgagaatcatcttgggtttggtttgcctcgtaggcattaagttacttcttggttcccaacacacctcagagataatcctctgggccagagtggctttgctttcttagcttaatcacctaaacttgcctcagttgacaaaatgctggagctctcctccctccctttttgtgctgtcctcaagggtttcagggaacccaagcagcacctgatccagcaggaggaagcagctttagacaccaggtgatccggagccatgagctccctgacacaggggggtgaggaccaggcaacctcttctgagtgggctgggtccctccctgcagcaccacagtgtccacaggctcccacagtggctgcgcccgtctctgccatcattaggccttttcttccagtggcatgtcacctgttcccaactcttcagagggcctggagtgggagcggaagtgagaggggcccagacccatagagtctgctctgccagcacctcagccaaaggcatccatctcagcaaacctggagtttgggctgagaaatgctacttatggggaagaaattacagtggaggtaaacacgtctagctcctggaacagggagcaaacaagtatgaggtttgggaagaagagggggcatgcactgtggagagcctcagaccaagccctccccccaccatcctagactgacagcaggcaatttctggacccagaagcaagaggagacagaatctggtaaccctccagctggctggtagagtcggctcaagcaccccattcatcttaggaggacagtgtatcttgtgtctaggccccaactcagatcttctggaggggatcccctccctgctttaccccctggtctgggtcagatgcccctccttgtcttcccaccataccctgtacttttcccatcgtgaacctgacataaagtatacttacctgcttacttgtccatacccctccggtccctgagcttcttgagggcaaggcttgagtcctgcccattctaaattatcctaaatgtccagctcctagcatagggtaagcacagcacaaacgtgttaactgactgatgactgatgtctaagaatgcaaatacctaaaaccagctcccaccccagccctatgaatgaaaatcttcagaggaaagggttgagagtttgcatttttaacaagccctccaggtcattcttataatgcggaaagtctgggaaaccctggtctagaccatggctacaccatatgggccaggaataggaggatggaggacccctgatggcagaacgaatgacacatgatgagttactgctgtcactgccaagagctcagcagaccccaaaccccatccaacccacctccgcacccaaacacaccacacagggcaagaccaaatcctcaggttgtcgtctgcataggagatttcacacatatgacaggagcaggtggcactgattctagactccctgagaaattggtggggggtctatctccagaattccagccaaactggcagtgggcgctctgtctttctgagtttctggtttctgaacagtccagtctaggggagagaattggtctgagaaccttggaaccaccttgagttgagtgacttcaagagctttgcagctaattctcagctctctgctctgcagcttatctggcgtcagatcccagatccactatccaccaacttttaggccttggacaagttacttaacttttatgtgtctgctttatcaattgtaaaatggggctaagaatggcaagtactttatggggttgttgtgagcattaaacaagttaagtaaatataaaatgcttagcccagtgcttgacacatagcaagcactatatgtttagctacttgccagtactctatttgggggaatggagaagcaataacatgtttggccctggctgttctcaagacaactt

SEQ ID NO: 916396 - DNA, 4001 bp, Homo sapiens
tagccacagctaccctgcagtcaggccacaggtcaagctctggcctcagcactgaactcccgtggggactgagggaaagtcactgagtgtgcaagcggccttggtgctctgtggggcttcccactgcatccctgaaggcaaagttcctcctggggaggtgctagtggccgctgtgcctcgacctccagacaaaaggagatgctggagggaggtcttcaccatggcgagttctccagcctctgctgctgctttggacctaatctgaagtttcaacagggaactagggacaggggcttctgtgtctccatctggcccatccttggcccttgatgagccaaaaggggaaactcagacagaaccctacattgcatgctattgactttagccccaagagatacccaccaccagggcattcaccatgccctgcctgcttctcctgccctggctctgtggcttcatctccacttctctcctccaccccttggtatcccattttctccaggaattgtaactgtttgaaattccctaaacgcgtcacgctttcatgcctcctggtccttctgcctgaaaatcccctctgccctgagaacccatttaactcgtgctcacttcggcagcacatatactaaaattagaacccatttaacttttcatccgccttccagactcagcaagcagagctcatgacaccctcctttgagctaccatggcccagagagtactacccctattgacacacttcacatacactgtagtaattctctcccctttagacgtgggctccttgatggcaggacctgtgtcctagtcacctgtagcacctggcacgatgtctggcctatcatagattcttagaaaatatttgtgggctagatgggtggatggatgcatgagtggatagttgaatggattgatggatgagtgaatgaacagatgaacacgtgtgtgtgtgtgcatgtgtgtgtgtgtgtgtataaatggattgtgtggatgggtgggtggatggatggatggacggaagggtggatagttgggtggattgatgaataagtgaatggatggatgtgtgtgtgtgtgtgtgtgtgtgtgtttgtgtgtgtgtgtataaatggattgtgtggatggggatggatagatgggtgcatgggtggatgggtggatggaaagtgaataattatgaatgagaatgagggtactacaccatgtatctgttgagtattttaacactgcttatctcctttcctgccaaaaggaaaagatggaattaaatccctgcaagaagacaaattgaagcccaaatgggtaaatgattttctaaggtcccaggtcaagctgaaacagcacgatgtggtgagaggtggtaaggtgtaatctctctcagtcatttggtcagtgaccaatgaccctccctgcccctgaggtgctcaccttgtcaatgaaggaggcaaacttgttgttgagaaccataatctgctcccgctcctgggtcttgatcctctgaatttcagggtccacctccaggtgaagtggctctaggaggctctggttaatggtcacctcttggatgcccccaggaggacaataaggaccaaagcccccaagcccaaaattgctagtcccaaatccagcacccccaaaaccacctcctccaaagccaccagccccggtgctgccaaccccaaagcctctgccccctccaaatccccctactcccccaccctggcagaaaccactggtgctcctccccattagattaatggagatgcttctactgccacccagattgtagaggctcctagagccaaacccccttccatggatcccatatccaccaccaccacacctccctcgagcataacacacagaacccactgccggactcccaccaccagagcctgcagaagagctggtactataaacccgcctgctcattgaactaaacgcggactgagaactaaattggtggctcatgtttgctggagcatccagagaagcaggcaagagaaagagcctggcaggaaggaggcagagaccagagaggaaaggagctctgactcctttgaaaagatctggctccggctctatatatatacacacacacacacattactgggctgggcacctttacaatcctgaaaggggagtattaatgtttagtttgcctgccagcaacatctgtttaaaacctcacacctgtgagttgcagaaatcagattgcagacaaacttccccaactcgatcatttatcattcatctcttgccatttagagatcagaatgcaagaatctctcaggatctcattgctggaaacttctatacagattctccccaaatcatcagttcatctcttcctaagaaactccaccatcgagttgtttgtttctgggatgtgcctgggagatctggggcaaagttagatggtgtttagagacctcaggaccatagctgggacagaggtggaaacactttctgtcacagcatcgtcctggtggggcaaaagttttgttccaatctccccacacactgcttctgctccctgcagttatcatcaccatgagcacccaaaattttatcacatggaagtgcaatattgtggtcactgagtacaagtggaggcccacagattctgcccaaggtcattcacattgtgtgctgcttgataagcctcagacttctcaaacacaaaaccacacaaggtacttcagcaccaaaagtctgtggttatagatttgttgagcatctaccagtacctaatattgtcttctagaccagaagacaaaccatccctaactatctctctttctgttttatcatttccggttctttatagacaatacttttgtaaaatagaattaaaggaattacctcctaaagataattttttaaaaaagatatacaaaatgcaagcccaaattttttttatttttagattcagcaaacaaaacattgtttaactgctaaaaatagcaacaataataataattttctaaatggttactctcaaattctgtgcttaccacaaggcaatagcaaagcacggtagaccagcactaatctgtgctcaccctctgagaagcacgtcccagacagcatcctggggaaaagctcattcagtgagcatcagtgtccgccaacaaaaaaatgtgcgttttccctctggactcaaatagctgtggctttcatccaaaatgtaataataatttttttaacttggggaaaaactctccagccttagaaaaatggctaagcgatggcttgcccaattggatacaattattttaaatcatcttgttggagactctgcagcagaaccggcaaccacttgtgatactatgtaccatattaaagggaaagggcagactacatgatggagtctgcgctgtgaactcataagaattaagaatgcagaaggccgggtgcaatagctcactcctgtaatcccagcactgtgggaggccaaggcaagcagatcacttgagcccaggagttcaaaaccagcctggccaatatggcgaaaccccatctctactgaaaatacaaaaaattaaccaggtgtggtagcacactcctgtagtcccagctcccacgggtcaggggggctgaggtaggaggatcacttgagcctgggaggtcaaggctgcagtgagcccttatcgtgccactgcactccagcctgggcaagagaatgagaccctctctcaaaaaaaaaaaaaaaaatgcagataagacagactttgtgagtaactagaaagtgagttgatttatttagagactgtgggaggagttttcctaggttcttttgtttgtttgcttatttttttgagacagagtcttgcactgttgccctggctggagtgcagtggcacaatcttggctcgctgcaacctctgcctcctgggttcaagcgattctcctgtctcagcctcctgagtaactgggattgcaggtgcctaccaccacgcctggctaattttttgtatttttaataaagacagggtttc

SEQ ID NO: 916397 - DNA, 4001 bp, Homo sapiens
atccacatcctggagacaaggggagagagaacacgtaaccccctcttcctctttggggtccctactctggctcaggaattctgttcatgcactgctcaacacccatccaccatgcctcccaagaccccctccttcctcctccagccccactctgtcctgctctctcctttgcccaacattgacccaacatcaccttcaggaagtcttccctgattaatcacaaccagttctgcttcttcctctccctccccgccctctcctgcagtgacatcaagagctcgtcaagcagtcctttagtcagatcttgccttggggcccctgtgtctaggcagatgtcccattttcccaggggacccctgcaggtagagtgatagcctgtcctaaatcaggacctcccaccttttccctcccagcctaggactaggctccgtgcacagtggatgctcagaacgtaagtggagcactggcccccaccctcaccttcttgaggaccacaaagtcgttctcaagtgtggcacgcctgtgggcctcctcctcatacctgccaaataagtagagaaggatgcagtttgaggctccacggtcagagctcatgcccccatgtccgagcatgacctccctgaaaaggactccttgccttagaatgcccccaaacaagacaataaccagcccttctctcctttcctgccacgtcctagctatgtacctgtgccaccctttcagcccatgtccttttgatgacgacagccacattgtttcagtttataaggcacattcgaataccttttcccacttgctactcacacccatcacttgaggtaggcagtttgggttttatcagagagattagatgatttgaccaagaccccacagatgactaggtagacaaagcagagccagcccaggtcttctgaccccaatccagggctccttccagaaccttccttcctccacctcacatcccattatcccaatagccctgggaggccagaagggcaggtgacatttcccaagtttacagaagggaaaccaagtccgggagagatgagatgccttgcccaggatgcacagctacccctcactcacagttgccccaacccaagccccctattagtccagggctctctccactccaccaggtgacctaggcgtggagcccagaaccacagcccatctgtgaattgtgtcacaggcctggggacagccccactaaattgattcccttccctctttggaaccagagaacatctgaatcactttagcccacagcccgctgaacaggaatttctcaagaataaaaaaagccactggggcattgtttaaataagcccttcccagccttgaccggaaacatgggcccttgtagctggggcatgtaggacaccggtctccctgcctttcctccaaggttctccagatctgcttggggactgcgggacacctcgtttacctgtagcaggtgggcacctgagagcctggggaatggggacgcggaggggtagaggggaggccagtcatgtgcctctgggtgctcagtatgtgggacacctcctggctgacagacccaaactgagtcatcccagaccccgcccacatggcatggggaaatttcagtgtgcctacttggacttatactcctcctcctggtcccggcaggccttcaactcagcatccagagcccctcgttctccctggagctgctccagctgcttcctgagctgatccaggcaggcctcaaagacaggctccaggccctgctggctgccactcaacccctgttgctgcagcagatgccacttcgtctccaggaccttgttctgctgctccaggaaccgcacctgcagcaaaagcagaggatccctgaggctcctgtgggactccctgtgcacagcctctggaaagtaaagcctgagggaccctcccatcagcctcacctttcccctgtccccctgcccaacctgggcaggggaagcctcatgaccttccatgacactctgaacacaacaaaatgactggactgactaatggggcagggccttccccccgctggctggcagttctctgtccctgagccccaatcatggaacaacagggcctcagcatagccagagagagtccagttagtccacaggagggacttctttgctgcagaagttattagaaaagtggtagaaggaggccaaacttcccatttccaagtccatcaagagcagctcctccaagggaggcacagagacaggggcttggctgagttgaccctcaccttgtcaatgaaggaagcaaactggttgttgagggttctgatctcctgggtctcctgcgtccgcaccacctggaactggggatcgatctcaatcttcagtggggtcagcagattctggttgatggtcacttcttggatgccccccggagggcacagggagagcccaggcccaccactccactccccaaaccgcacccccagcctaccccctgacccccaggtactcccacgagagccttccaggcaccccccaaaggaattaaggctcctgctgctgaagccgcccctgctgctgaagcctcccctgctgcggccccttgagcgagcagaacaggctgagcgagcgctgaagcccctctgggcccggcatggggagagagacatggcagagacagacagtcacgcagctgcagacggacagacagattgtcaaggtgtgtgagtttctgccctggggccccagcacgagacttttatccactcccgtacctgggctgggccttggagagcaagatactcttgacctgactgtgtctgtcacttggctccagctgacttactctgacgtgcctggagaataagtgtccggcacgtgcagagccaagggagaaggaaacccagaccctgccctcagagctcccaggctgttggagaaataggcatgcccaaagacaaggaagcaggcaggagactgggatgtcagtgctgagggacagggagggatggccggagcaaagtcactgaggccctcagggaaggcttcctgaaggagacagggaagcgagaggaggttgaagaggaaagaacgctagaaggggttcagaggaagcatcagagtgccctggattctcaagggagaatctgcctcaaggagttggagaaggaaggcacttgcagcgccacaaagagaggaggttagtggaggtgttattgccatagttggctaaaagacactccaggatttggaaatgaaacagaaaaacagggtttccaagtccttcctcttgcccaacccagcaatcatccatgaggcaccacccactgaaatcaggcatctccatccaggatcgcatgggacagcacgtttctgacccagcctgtggctctgctccttccacaagcacttggggccaggcccatccacctgccatcaggctccgcttcctgaggttacaaatcagagccacccaggctctgaaatgaaatgtgcatttagggccgggcacagtggctcacgcctgtaatcccagcactttggaagaccgaggtgggtgggtcactggaggtcaggagtttgagaccagcctgaccaacatggtgaaaccccatctctactaaaaatacaaaaattggccaggtgtgatggtgcacacctgtaatcccagctacatatgaggctgaggcaggagaattgcttgaacccaggaggcagaggttgagcagtgagccaagatcgtaccactgcactccagcctgggcaacagagtgagactccatctcaaaaaaaaaagcaaggtgcatttagaaaatactcctaagctgggaacggtggctcacgcttgtaatcccagcactttgggaggcctaggcgggtggatcacgaagtcaggagatcgagaccatcctggctaacacggtaaaaccccgtctcttaaaaatacaaaaaattagccaggcgtggtggcaggcacctgtaatcccagctaatcgggaggatgaggcaggaaaatcgcttgat

SEQ ID NO: 916398 - DNA, 4001 bp, Homo sapiens
ccaccctttcagcccatgtccttttgatgacgacagccacattgtttcagtttataaggcacattcgaataccttttcccacttgctactcacacccatcacttgaggtaggcagtttgggttttatcagagagattagatgatttgaccaagaccccacagatgactaggtagacaaagcagagccagcccaggtcttctgaccccaatccagggctccttccagaaccttccttcctccacctcacatcccattatcccaatagccctgggaggccagaagggcaggtgacatttcccaagtttacagaagggaaaccaagtccgggagagatgagatgccttgcccaggatgcacagctacccctcactcacagttgccccaacccaagccccctattagtccagggctctctccactccaccaggtgacctaggcgtggagcccagaaccacagcccatctgtgaattgtgtcacaggcctggggacagccccactaaattgattcccttccctctttggaaccagagaacatctgaatcactttagcccacagcccgctgaacaggaatttctcaagaataaaaaaagccactggggcattgtttaaataagcccttcccagccttgaccggaaacatgggcccttgtagctggggcatgtaggacaccggtctccctgcctttcctccaaggttctccagatctgcttggggactgcgggacacctcgtttacctgtagcaggtgggcacctgagagcctggggaatggggacgcggaggggtagaggggaggccagtcatgtgcctctgggtgctcagtatgtgggacacctcctggctgacagacccaaactgagtcatcccagaccccgcccacatggcatggggaaatttcagtgtgcctacttggacttatactcctcctcctggtcccggcaggccttcaactcagcatccagagcccctcgttctccctggagctgctccagctgcttcctgagctgatccaggcaggcctcaaagacaggctccaggccctgctggctgccactcaacccctgttgctgcagcagatgccacttcgtctccaggaccttgttctgctgctccaggaaccgcacctgcagcaaaagcagaggatccctgaggctcctgtgggactccctgtgcacagcctctggaaagtaaagcctgagggaccctcccatcagcctcacctttcccctgtccccctgcccaacctgggcaggggaagcctcatgaccttccatgacactctgaacacaacaaaatgactggactgactaatggggcagggccttccccccgctggctggcagttctctgtccctgagccccaatcatggaacaacagggcctcagcatagccagagagagtccagttagtccacaggagggacttctttgctgcagaagttattagaaaagtggtagaaggaggccaaacttcccatttccaagtccatcaagagcagctcctccaagggaggcacagagacaggggcttggctgagttgaccctcaccttgtcaatgaaggaagcaaactggttgttgagggttctgatctcctgggtctcctgcgtccgcaccacctggaactggggatcgatctcaatcttcagtggggtcagcagattctggttgatggtcacttcttggatgccccccggagggcacagggagagcccaggcccaccactccactccccaaaccgcacccccagcctaccccctgacccccaggtactcccacgagagccttccaggcaccccccaaaggaattaaggctcctgctgctgaagccgcccctgctgctgaagcctcccctgctgcggccccttgagcgagcagaacaggctgagcgagcgctgaagcccctctgggcccggcatggggagagagacatggcagagacagacagtcacgcagctgcagacggacagacagattgtcaaggtgtgtgagtttctgccctggggccccagcacgagacttttatccactcccgtacctgggctgggccttggagagcaagatactcttgacctgactgtgtctgtcacttggctccagctgacttactctgacgtgcctggagaataagtgtccggcacgtgcagagccaagggagaaggaaacccagaccctgccctcagagctcccaggctgttggagaaataggcatgcccaaagacaaggaagcaggcaggagactgggatgtcagtgctgagggacagggagggatggccggagcaaagtcactgaggccctcagggaaggcttcctgaaggagacagggaagcgagaggaggttgaagaggaaagaacgctagaaggggttcagaggaagcatcagagtgccctggattctcaagggagaatctgcctcaaggagttggagaaggaaggcacttgcagcgccacaaagagaggaggttagtggaggtgttattgccatagttggctaaaagacactccaggatttggaaatgaaacagaaaaacagggtttccaagtccttcctcttgcccaacccagcaatcatccatgaggcaccacccactgaaatcaggcatctccatccaggatcgcatgggacagcacgtttctgacccagcctgtggctctgctccttccacaagcacttggggccaggcccatccacctgccatcaggctccgcttcctgaggttacaaatcagagccacccaggctctgaaatgaaatgtgcatttagggccgggcacagtggctcacgcctgtaatcccagcactttggaagaccgaggtgggtgggtcactggaggtcaggagtttgagaccagcctgaccaacatggtgaaaccccatctctactaaaaatacaaaaattggccaggtgtgatggtgcacacctgtaatcccagctacatatgaggctgaggcaggagaattgcttgaacccaggaggcagaggttgagcagtgagccaagatcgtaccactgcactccagcctgggcaacagagtgagactccatctcaaaaaaaaaagcaaggtgcatttagaaaatactcctaagctgggaacggtggctcacgcttgtaatcccagcactttgggaggcctaggcgggtggatcacgaagtcaggagatcgagaccatcctggctaacacggtaaaaccccgtctcttaaaaatacaaaaaattagccaggcgtggtggcaggcacctgtaatcccagctaatcgggaggatgaggcaggaaaatcgcttgatcccagaaggtggaggctgcagtgagctgagatcatgccactgcactccagcctgggtgatagagcgagactctgtctcaaaaaaaaaaagaaaagaaaagaaaaatactcctgatggactgggagcagaaacaggacatttggggttccccacaggacagcctctgcctctggcctgaaagtctggtgggtgaaggagcactctagggtatctgatacttcagtacaacctctcccgagtggcaggactcctggaaggaaggcatccagtagactccacttaagcccctccaccactggccggcagagttggaccactctgatttggggaagtatctaaaatttcttatttacgtggcaagggggctatttctccctgtccccctcccctcttctagagcctggcgcatttgcaagcaaggacaccggggctttgacaatgcaactcaaagctaggacaaacgagggctcagaatactgaacactcaagagatgtgctatgaggaagtcactcttagcaatttgaacaatcccacagatactccaccccaaagccagatagcagtgagtgcacctcacctccctccagaggattaaaagccccttcctccttcccctggccccaaccggcagcacgcctgaatgaaactgaatggcaggtgacctcaagaggaagaagagacagggccttcagtggggagaacaaaggagt

SEQ ID NO: 916399 - DNA, 4001 bp, Homo sapiens
aattggtgaactgggtgaaagagtatacaggagtatgttgtactattcttgcaacttttctgtaaattcaacattttttcccaaaaaaaactttttttaaagtaccaatgtctgagcccttcctctatagactcagaaggaggcttacggtgtgggtttaacaggacccccgagagttcttggcccagctggggttccaagacaatctctcagacctccagctcccaagctgtgattctgcaatcctgagaaaggttttggcttgtttggcctctgggacagtcccacaggaaaaccaaaagtcactaggggagagggtgaggaggcaggcaagacggcttgcttcatattctgtcatccaatatctccaggtcccatctccacactacctgggcctcagtcacatgccctgggagcatcatgcagcaggtgtgcctattgtgagcagtaacaactcttagtgccaagaaccacagagtccaggggcctgggtcccagtcccgcctctgcctccaactccttgtatcatcctgggcaaatcacttgagctctctagacctcaattttctcatctcaaaaatgggcacaatatcaccatttctgagtcttcatagaagcactgtgggtacctcaggagaaaagggatgtgcatgttcttcggaaacacacaaatcactgaaccaaggtacatttgtctgccagaccttccccatcatgacccgctgccttggctcaggatcgaggtggacaatgccagcgaaacagaccaggaaatcccagcacaagtgttgctcccatccatctggaggcaagggcaaggttcagggcatgcctatgggcaacaggtcaaattccacattcccagagcttggtgacctggtgaccaccctcctcattgtccaccccaaattgagcttcttcactcagagtgtaaaaaaaggagaagcggaagggagcctacccctaggaccccacccacacacaactgtgttttgatcacatcttgcccttaagcctcctccaagcctgaaagaatggaacaaacagggctccatgctcttagccttgaacaactctttcaactcctgagcattgtttccccagctgtaaaatgacaaaaggcaatgcaggccaccccactaagaggagctatgaggacaatccattttttgatgatgaggtaaggctactgtgcaatcaatcgtattaatcatggtggtaggacaggcttcaacacgggcaaggtggacttggcaaaccggactcatgagtagactggagactccccccgcacaggcacggtgaagacctgaaggccgcctccagccacccacgtctcggcatcccaggctcagaccgggagagctccagagctctatcaaccaccaccctagtacaagtgggctacagcagccctggcccagcccaccctctattagaggtcccgcttcttccccaagagctcccttcctccttcctgcttggcccaccttgtcgatgaaggaggcgaacttgttgttgagggtcttgatctgctcccgctcctgagtgcgcactcgctggatctcggggtcaatctccacatggaggggggtcagcaggctctggttgacagtgacctcctggatccccccaggaggacaagcaggcccaaacgtctgcctgccagccccctgtcccataaatgccctgctgccaaagccaaagccccccagagcccgccccaacaaggcccctccggccacactgacagagatactcttgtggccccccaagttatagaggcttcggctgccaaagccacctgtgccggggccacagtgggccccgccaccactgccactgctccgagacaccgtcactgagctgaagctggtgcgggcctgggacccactccctccgctggcagagttggagctgaagcccccttttgtggagtatgtttgccgagagacggaggacctcatagctgcagaggggccggagggcaggatgagagggcaggaagggagtgccgtgagctgctgggccactgtgggctttttatcttttcccaactgggccggctccccagctccacagacactcctgccccatcgccccaaggggagagggaggggtccttagggccacggggagtgccctctccccaagcaggagggaggggccctcccggttatcacctgtgctccagagctggggctgagccgagactgtctggggcaggatgccaccttctccccctgcccccaggctctcctcggttggcacaggatgatacgggctcccatggccacccccaccacccagtggctggcttgctgtcctcccacccagccccagaggccactgtcaatagggctctgttctacggggtttgtcccaggcccctgttgtaagccaaggctgcagggcctggggctgtacaggtggtaggagaaggagcattgggcaatgggctgccagagagagcatccaggcctgctcccatcccacccccagccaacggcccaccactcctcccaggtccagggtgtgtgacacaggtgacagggcgagagtggggatagcctgtgcctctgccgtacagtggcagagccttctgggaagtgagcctatgctggcaaagtgaattcaaggacagaaagaggatccctgcccaatcgtggggcccaggcccttgatcaggaggtagaaaaggcctggggtcctcaggcagggcccagaagcctgggagcaaaggacattcttatggaggctgaagagagggcaggggatttaaccaatacctgagatccctgagcctctaccccacagcagagtccccacagaaaggttcagccactttggagggagctggaggtgggtcaaggacacagaccaccctgggtggagacaggcacagctccaaaaagcaggtgttccaaaaaagccccaggaggcccacgcagcagccccgtcactcccatcttcccctgccccacatgcaggagcccatgtttctgattcagaggggccaggggagctccttaaatcacctcatatggtccccgccgcccacttcctattcacctcagtctgctgggaccaaacacagccccaagcaaagacagagacgtcaactgtcagggccgaggggtgactgaggaggtgactttagacactggccctccccacccccttctctcagcaagaagatgggctcaaagtgaacagagacttgcctgaaaaaaaggagcgaggacagcatcgctgtgctccccacccccatcagatgagcaggacaaccagccaggctgtgtccccaggatcccaacagagaggacatgggactgccacggagaaggcttggcctccctcccatgttccccacagcccagcaagtgaagagacagcctgctccaggaccagagggagctgtgggatcttctcctagggcccctgggaggctgtaagtggctccccgttgcttgaagaggttgaacccagctcccacaaggaatgggagtgagagcacttgcagaactagtcccttaatagccaagaggagattttggagttaggacactgggcatttcagggagccaagccgagacgtctcccacactgagctgtgtgtcctggggcaactcgcaacttctctgagccccattttctctgcctataagcagggccctccgtggaagacctttcgaaaagtgatccctggatgaagccgccccttcccactgaccttcgtctcctttccccaggctgagatcactttctcagcctcccttatctctccctgggtggcgtgggaggaggaaacagtcatgagtgggccctagcctccaggatgtggctgtgggccccctgggcaaggaagtgttgtcagccctctgagtcacagggcagccaggctggtgggagtgagaggcagtcgataaacacaagtctcacctcaccccagacacgacactcacgccagtcccttgcacacatttaccaagcacgctctc

SEQ ID NO: 916400 - DNA, 4001 bp, Homo sapiens
acttgatttgggctctcagcttttgttctctcatatgtaaaataaattagattgaggctgcagtgaactatgacaggccactgcattccagcttgggcgacagagccagaccctgtctcaaaaaaataaataaaaatttaaaaataaaataaattatatgatgataatgtttgtaaagataattgtaaagataattgtaatttgtaaagataattgcttgtataggacactactgtataggacactactgtgatgggaaaagaccatgcactcttctctaagaattcaccgttccttctgtcttttgccttcctcccctcagctaaagggctcctggagtgaagtggaccctcagctgtactctgtggtctgcggcaacagccaacgcacagaggagcatcctctccttaactaagcaccgaaagggagtgaaagggtagactgaaggaaggacttactaattcaaggagtcattggagcagaaatgagtgaccaggaatggggaggatgcgtctgtggaaaaggaacagggctgggcccccttctcactggtcctagatgggatcaggcctgcccagaagccaagaaaaagatgttgtatagacctcaatggggcaaggccgggatgattgaggggataccttcaggggaggaggtgctaggcagttttctgaaaatggtgcgttcagacagctcactatttcctgtagtaattccaggaaaagactgagtaagacaaggtcaggaccgggaggaatgcagctggaggaggtgtgtatgcacagtctccccagggtgagcctgtccagagccataaaccttatctccttcctctgaatagctgggatagctatctctggctcccaggggctcaggctgagtcagggctggaggctgggagagactgtgggccccgaagcatacctaaaactgtgagaccactcagcacttaggtatgaatggcgccatttagggtctgaaatggtcaccattttcagaaacctgctcaacacctcttcccctgcaggtatccccctccgtcatcctggccttgccccattgatacctgaagtgtggcacattcaggaatgagattggagcaaaagggatctctttggcggaggtggggtcaaagagatagattaggatgattcatctccacaaaggctaaggctttagattcctaccagccagccccaggccagaaatttccccttcaaggaaagttgggctccagggctgggcaatactatcacctcaattatccctctgttcctgagttctagggtttatgcacagttcttaatggggcctaatagtttctttgtctcttccagccctctatcttagaggacaggaggtggagcctaccaacaaagggacccaggttccagttccagggctgcgtttctctccccctcagggcccattactctgagctgggccccaggtaggggaggaaggaggagaaaggaggcagtgttctcatgttctctgtgtccctgagaaattccccacctccctttcaagctccctcctagcaggctggtgagacctgccctggagacaggctggtgcgagaggccccctctgcagagtggaagggggtgacataattgcctgtcctgagacttctagacatgtacacactgtccctctgcctggtgtgtccctgccccccgccccccaccacctctcctgctcgctcaggtatcctctccagtgcccagccagactgatcttctacaaacactgctttgatcctgtcactccctagcccagagcttcccgttgccttcagaataaaggtcaaattcctcatctggtggctgaggcttagccttccccacctggcactagctgccctccccaccccacccccaggactgtgccctcctctcctgaagcacctccttgtcacctgcacctgttgaaaccttacccttcctgcaggtcctggctccagctcaccccattcattccgcaaacatttgctgaatgaaaatcatgcatcaggcacctccccacaaagcctgccccagtcacctctgccggaagtggccactcctatagagaccccaagaatagggctttgttacacccctgggctgggttacacttgctgtgggcatgtctgagctcccctccctgattgtaaacctgatccacagtcatttagcatgcactgaacatccactattaatgaggcattttccatatttgtctcatttgaccctcacaaggaccttgggagttcagtcttcttatccttatttacagatgaggaatccaaggctctaagaagtaatgtgcccagcaagtagtagtcagagctcaaaccggagtcctgtaccctaagtccagggcccgcacatcagcgccaaggcatcttcctcaaaagtaggggcgtgtcttatacatgtttctgcttccctccacacccagcacaggaacttgtttgattcactgaatgaatgaatgaatgaatgaatgaatgaatgaatgattcaattctatcccatgagtcctcttctctactctgaccctatctcctctctcccacattgcttttttcctatcttctgtcccttaccctggaccccaaggattccccccaagggaggaaagaagctgtgattgtttcatggataccagagatgggagctaagcctcagaagggtgtccacagcctggacacaccccagggaggagattcaggacaggaagaccccttcaccttcaccaccactcagtttgatagacccaggagagttccagtccttctctccacccctccccaactccagcaggaaataggtgggcccaagggagcagcaggacaagccagagaacagtgagagggtgaagaggggcccagattcagtgactcaccacccttgggcctcccctggggaaagggtggggagcctggacacttggaattcctgcctgtccctagggagacacttgggtgttaggaggctgaacaggaggaggaagagctctgtttgtcccaaactaaggggtggccatggcaacaaggccagagccatcagggctgggagcaaaggtcctggccaggggtggagtcgcgagggccctgctgcctgcctgccaactgggccactgtccacaccatgccagccaggccttctctgactgagcacccccttgtgggcagagccgagcctgaaatctggggatgggcagtcctgagggggaagccacctgctttacagacacacatgttcttgtcctctcccagtccctccatgtgtcttctcaactgcaaccagagacagacagcctctagaacagggagtgctcagccaggcgcgatggctcactcccgtaatcccagcactttgggaggccaaaacaggtgtatcacctgaggtcaggagttcgaaatcagcctggccaacatggtgaaaccctgtctctactaaaaatacaaaaattagccaggcttggtggcaggcacctgtaatcaaggagaatcgcttgagaggcgggaggcgcaggttgcagtgagccaagattgcaccattgcactccaggctgggcaacaaaagcaagactctgtctcaaaaacaaaaacaaaaacagggagcgctcttggcctttgtgctggggaaaagaaggcatggagaactgagtctgctgctgggaagtgagtagattggaggtgtcagtctgggaaggcttcctgaaggaggatgtctcaggctaaggaaaagacagcaaaggcttcagagcagaagagtgtgtctcctctgagagcccaaagcaatgtggctggagtcacagatgacaccatcactccttctcttctgctagtcacaagaatcttggtgtcccaaggagcccccagtgcaccaccaccatccttaacaatgcccctaccattatgcatgtccattcccacccttacctccccttggaggtggagatggcacttcctctgcccagggccagacctccaccagtgctctgatcca

SEQ ID NO: 916401 - DNA, 4001 bp, Homo sapiens
catctctgtgagagatttttggtctcttttgtcaccgcccttctctcccagctcctagaactgggcctggctcacagtaggtgctgaatgcatactggttgaattgtaaatgctcaggatttgtttaattaaggatgcaggaaaggtgatataccggtgtgcagaagtcaggatgcattccctgtccaaatcacagtgttccactgaggcaaggcccttgggagtgaggtcgggagaggggagggtggtggagggggctcagagactgggtttgttttggggagtctgcacctatttgctgagtgaatgtatgtgtgtgtgcatttgagagcacacctctgtatgattcgggtgtgagtgtgtgtgaggaaacgtgggcaggcgaggagtgtttgggagccaggtgcagctggggtgtgagtgtgtaagcaagcagctatgaggctgggcattgcttctcctcctcttctccagctcccagcctttcttccccgggactcctggggctccaggatgcccccaagatcccctccacaagtggataatttgggctgcaggttaaggacagctagagggactcacaggccattccacccgcacaccaccagacccccaaatttcttttttctttttttttttttttttttttgagacagagtctcactctgtcgccaggctgcagtggcgcgatctcggctcactgcaacctccgcctcccaggttcaagcgattccccttcctcagcctcccaagtagctgagactacaggcgtgcaccatcacgtccggctaattttttgtattttagtagagagggggtttcaccatgttggctaggatggtctcgatctcctgacctcgtgatccgcccacctaggcctcccaaagtgctgagattacaggcgtgagccactgcgcccggtcaagactcccaaatttcaaactcgccagcacctcctccacctgggggagaagagcataataacgtcatttcctgccctgaaagcagcctcgagggccaacaacacctgctgtccgtgtccatgcccggttggccaccccgtttctggggggtgagcggggcttggcagggctgcgcggagggcgcgggggtggggcccggggcggagcggcccggggcggagggcgcgggctccgagccgtccacctgtggctccggcttccgaagcggctccggggcgggggcggggcctcactctgcgatataactcgggtcgcgcggctcgcgcaggccgccaccgtcgtccgcaaagcctgagtcctgtcctttctctctccccggacagcatgagcttcaccactcgctccaccttctccaccaactaccggtccctgggctctgtccaggcgcccagctacggcgcccggccggtcagcagcgcggccagcgtctatgcaggcgctgggggctctggttcccggatctccgtgtcccgctccaccagcttcaggggcggcatggggtccgggggcctggccaccgggatagccgggggtctggcaggaatgggaggcatccagaacgagaaggagaccatgcaaagcctgaacgaccgcctggcctcttacctggacagagtgaggagcctggagaccgagaaccggaggctggagagcaaaatccgggagcacttggagaagaagggaccccaggtcagagactggagccattacttcaagatcatcgaggacctgagggctcaggtaaggggtaggagggacctcaactcccagccttgtctgaccctccaattatacactcctttgcctctttccgtcattccataaccacccaacccctactccaccgggagggggttgggcatacctggatttccatccgcgcacctagccacagggtccctaagagcagcagctaggcatgggagggctctttcccaggagagagggggaaggggacagggttgagagctttacagaggaagtggacagcatggagggaggtaaggaaaggcctgtaaagaggaggagacactggctctggcggaatggggactattggagggttaagcggatgtggctaaggctgagtcatctaggagtaaacaagaggccttcctttgggaggagccaatccagggtgtagggggcccagagtgaccaggtgcactagggaaaaaatgccaggagagggccaggaagaggacttgttagtagcgactcacttctgggcaggcaggccagccagctagccagcctgctgaggcttcccaagaggggcagagtgctgggatctgggaatccaggaaaggagggaatggggtggggctagatgaaaagggataggtgtccagggagagcctctggctattcctgggaccaggaagttttcactaggatacataacactttttacacactcaccccacccatccctggctttctattcatggaacaacctctctctacaatccctccagatcttcgcaaatactgtggacaatgcccgcatcgttctgcagattgacaatgcccgtcttgctgctgatgactttagagtcaagtaagtttgggggctagagagctgggggtccaggggtggagctaagaaggatctgctccccaggctgggtcagttaggggctcacagtgggatcctgttaggtgtgggtggatgagagtcagggtccatcagtgtattcatttaactgttcatttgtataaccccgtttaagaatactgtcctccaagtgccaagaatggtgctcaggggattaccacctaattgctgactcaagttgctggtttgcaatgggcacagaacttctcttagtaggtggcatgagttgagaaggttctggatcagagataggggcccctctgatcacctccactcctataggtatgagacagagctggccatgcgccagtctgtggagaacgacatccatgggctccgcaaggtcattgatgacaccaatatcacacgactgcagctggagacagagatcgaggctctcaaggaggagctgctcttcatgaagaagaaccacgaagaggcaagcaggggccactggccaggccagggattgaggggccaagagaagtctgggtcggagaatagacaagacaaaccaactgcaagtagccttgctaagacgtttagaaatagcagcctgggctcttcttaaataagaccgttctgatgaagagcattctcagggggtcgagtacaccctggctcacctgaattacaggtcaaaatgatatgggttagaaaatgagatgagaacagaagtagaagcagctaacactaggagctgggggtgataaaggaatgacagcagatggagttggcagcgcttcctaaaagatggtagaaggagcaggtttgtgaaggggagggtggataaaggaacagggtgaagttacagagaaaccatcagtgagtgggtggcatttctacccactggagtagaaaggccagaactggcattgccctgagtgcaagccaaggggttcctcctgtctcttctccaactgtaggcctcctagaagaggcaatcacagaagaaaggccttgttggagctctgaccctgaaccctcctcacttttgcccctgtcacctttaggaagtaaaaggcctacaagcccagattgccagctctgggttgaccgtggaggtagatgcccccaaatctcaggacctcgccaagatcatggcagacatccgggcccaatatgacgagctggctcggaagaaccgagaggagctagacaagtactggtctcagcaggtgcgtgaggggaggggatggctgccaaggtgtgggagggaggcagacggaatgaggggcctgatggactgtccccatcctgcagattgaggagagcaccacagtggtcaccacacagtctgctgaggttggagctgctgagacgacgctcacagagctgagacgtacagtccagtccttggagatcgacctggactccatgagaaatctggtgagtgcctt

SEQ ID NO: 916402 - DNA, 4001 bp, Homo sapiens
cctccaccactctctgcaaatcgctttcttccccaggtcattctgccccaaaattattttttaaaaaaaagtgattataacatcttatcctaatggaatgtgggccaagcactgctgaactctttacatatgtaagtttgaataggcaaaaacttttgcctatatggatttaggggctctcatattcattttatagatgaggaaataagacttggcaagggagtccataaccaggaaccggcagagcagtgcgaaccaagaattcagattccaaagcctatgcttagctgctctctataaggaccccagggctagcaaaacgcagtcaacaagtcaagtccaggcgcttggagcgccaagggcccccgaccactgggttcctggggctccggttcctcccggcttactctgccccaggatttccctcctcccgttcccacaatgcctcccaggagccagtcagcgtgaagggcccaatcctcggggccgccgggggcccggggcccctcaggcagcggagtcccagggctgcaaaacccggcctggctcctgctgtgtgaaagtggagccaggccgctggggcggagcagggacaggacgcgagaaagggacacgggctgaatgggcgaggggcgttggtgggcgaccgcgttatctgaagccataaacttaacaggacgtaaaccccgggcggggcgtcccacgcccgcagactttgaatcctgcatgggctttccgaggccaggccctggcgcctcctccaccccaccccagcccaccccaccccaccccaccccacccacaccgcccccgacgccgagctccgccaggtggaggagagcgtcccgagactgctgcccgcagcccctcaccccgccctcggccccgcccacgctgccggcgcaggggccggggtatgactcattctgtgacccccgcactcaggcctccgggcgccaaaggcctcaatcaatatttgcccgtttgaaccgagacacccacttccttctcctagaatgctagaatcacaccaaacccctatgtaaaaaaaagaaaagaaagaaaaaaaatcacaaaggcaccactggggagcccttggggtagtgctggcgaagaggcgaacctggaggagggtagtccccgaacagctgggactgccgcagggcgatagcttaaaagacggtcagaactcgggttggggtgagaacaataaccgctattattttttataatttggggacagaatgacctgaggaagaacgggatttgtagagaggggtggtgggaactaggctgtacccttaagttgtctctctcttccaagaccctccagtttaaaagggaagaaggaagccccaggattcatcccggctgtccagaccctctccccaccctcacccagcccaaaccaaggtgcacgggaggggtgagtcggaggatggaagggagagtgtcgccagggcgggtgaggcccagcaggacgccagctgggggctggagatgtgcatagggaccgggactaccaggagaaaggggctgcgggcacagtcagccacgcaggggggaccctcaccttgtctatgaaggaggcaaacttgttgttgagggtcttgatctgctccttctcctgggtgcgcacggcctggatgttggggtccacctccaggacaagggggctcagcaggctctggttgaccgtaactgcggtgatgcctcccatgccgctggccccaccatagccgccgcccaggccaccgcgaaagttgctgctgcccactcgggagaagctcgaggagctgatgcgggaaccgggcccactcgtgtaggagcggctgctgaaggcccgggggccagaggtggacaccttgtaggacttctgggtcaccctgatggacatggtagaggcaggagtggaggcaggcgggccgaaccaggcggagatcctagaaggagcggagaagctgcttcttggtgaggagagctctcaggaatggccttttataaaagagatcccagccccgggggatgggggggaaaggcctcgtacctgagtggctaggcccagagggggctgggcctaacccgtcacctgccacctccgggcaggactcaggtgggggcagcagagagctgccgccacccaagggcccgttccaaccctggagcccactccagcaccacccccagaaacccaggaaaaggcagttcagtgaatatgaaactggaagaaatcctgtcctggcacaagtgcctgtaacaagcagacttgcctgggccgcccagccactacaaccctgactcctgggtcttgtctccctccctcctgggggaaataaactggaggactgggaagcatgggaaaaaggggtctcctagtatttgggtctcctctgagctgccgacaccccagagaaactctcctgtgttctccctgattgaagcgattatgagggcctgcctgagctggatgacagaacagctggagtccaaagccttgaatctgaaatcaaccatttgcctcatctttccaggttactgttctacccctagcacctggtgcagtgccaagagggtctgggtagatatttgtggaatgaatgaatgaataaataaatgagtgaataaacatcacacgcgcacacacacacacacacacacacatacacatacacacacagtggctgtcgtccctctacatctgaaggtgcaagataaaaagagatccaaggccaggcacggtggctcacgcctgtaatcccagcactttgggaggctgaggtaggcggatcacgaggtcaggagttcaagacaagcctgaccaacatggtgaaaccccatctctactaaaaatacaaaaattagctggccatggtgtaatcccagctactcaggaggctgaggcaggagaatcacttgaacccgggaggcagaggttgcagtgagctgagatcgtgccactgcactccagcctgggcgacagagcgagattccatctcaaagaaaaaaaagagcgagatccaacacagcacttttcctgaacataacccaggggcttcctctccttccaagatcctaggatcccctgggccaggtgaacactgtaggcctcactgaagggcctagagaatgatgaacagggctagaaggcagagaacgcaggggttggggggggcaagaggagatgggagctatgtcagggacttcatagttcttgctctttgcgggagtcactcccattgctcccagtgagtgaatcatgggaagtgagacaggacggcagggggtacagtggagtggtgtggcactcgtggtgctacctggaccctcctgctttacccaggctcccaacgggccagaggaaatagaggaagagtccctgcacctgtctcccattatcaaagtgagtcaggagggcaggttgggacgtagcacgcacctgtgggaggttggagattggggagctgagcaaggcaccccaggcctgggtggggccaggcagggcatgctgtgggtggaaggcaggaggtttaggtccccaaggcagagattccacctgcaattacctgatggctggggctgggttctctggaagatactgcagggtgtgatgtggggactggatgaaactgaactcagaggaccaacagatgacagccagatccccttgaggagagggacaggtgacatagccctgacccagggaagggggtgaccacctactgggaggacagatgtacagtttcttccccatccttctctaggagagacacccaggctcacagaaagacaggcacataggacccctacccagaaggacagagagacccagaagccccctccttggaggacagacaaacttaaaaagacagacacacagacaagctctcttcacaatgcacgcgtgcatacacacacacacacacacacaccccacacattgaagtcccttccagaaaaatgcatagatcccaagagcgggcacagtgagtggctccttcacc

SEQ ID NO: 916403 - DNA, 4001 bp, Homo sapiens
tggtcaggaggtggctctttagggacctgcctccccagggcagctgggctgctcttagagggagaaccagctcagcaatgcaaggctctgtgcagttagggctgggggaagggatgctctgcctcagtggactgtggtccttcccctctgggtacccaggggtaccccaggtgtggatgatgaaactctggtctaggcacatgaatggaagaaggaaagaaaagattcccaccacagagaccactgacttcgtgtctcaacagacctgagttcaaatccagactaccatttgctggttgtgtgatcttgggcaaggcacttagccttgctggtcctcagtttcctcatctgcacagttgggaaaataacagccactgcagggtggcagtgtggcttgaatttcattgcatttgcaatgttcctccagagggcaaggcataagtagatgctcaatgcatgttactttcttccctctgcccctctctgtgagctcccacctcatgggggagaccagcaacatgcagaggaacacagaatcagaggccaagagcagacaaggactgagccaggggctgaaggctggacctctggtttactggcaggttcagaaatgtacagttttccttatctgtgaaatggacataaaattgtcttctcccataaggttgttgagagaaatacagataaacctgaaaagcatcagcacagtgcctggcacatagtaagcaattaaccaatggcagctggcactatcatgattattcttgagggtgcaggagggtgcagagtcaggaggagtttcttggagaagatgagtaaagaacagatttgggaagtggataacttccttgggagctcccttgccctgggagcagaggtggacacgagtgccccagacctgttgcaggccatgggtagtggagtctaggaagtgtggttgtgatgctgaggatgcacctcccgcagtcaggaggggcgcagggtgcaggaaggcccaactggcttccctgttctgactcgaggcatcgtcccctgcattcctatctcctgacacctgagctgcaccctcacttgcagcagtctgggcagcaacctccttccagcagccccgcactcaccctccaccctgctggcttttctgactggggcagctgagagagatgctgtgggaccagaggcttgagggataaacaggagcgtggtgcctgggaggccatctcccctgtccacttgcctcagagtaggaccgcagagcatgcctccatcagccattcctgcgagagggcacccctggccacactaggtggtcctccccagtccctgcctgggtggtgggtgaccccaggtcatgcagcatgttattatcaacacatccctcaaaggccatcctggggtccctttctccccacatgccaggatggatcagggacttccctcccccagcctctgctcagagctagcctgtcgggttagcagtgccatctccccattggctgggtgcaggggtggggcgcggtgatcgatgctcagggaaacacagagctcagctaccggcccaggcctggcagcccttcatgtttgggaccccctacttgtgctcaccttgccaattagggaggcaaatttatcattgagggccttcatctcctccttctcctggttcttcagctgctgaacagcggggtccaacttgacatccaggggcaccagcaggccggggttcacagtcaccttggagatagtgccagccgaccagcagcctgtgaggctgcgggagctgaagcccggcccgggggccctgcagctgtcccatcctgaggttccaggccgggggctgcccaccggggtcacctcacagctgctgaggctgctgaagccaaccacgcaggagcggcaggccatggtgcccccggccggaagcaggagggcccaggggggtgagcgagtgagcctggggttgcgtcgggtggcaggctctggttgctctggtcacagctggggcgggctggggactgaggagcagacacctgttgcacagtgctcattagctgcaggagggcgggacgcctcccagcctgaccaacctgttggatgatgtgggtgctcccgcccctcccccagcagcatgtaggtctccctcccaacaggtatctgcattgcttagggggctggtccacagccccctgccccaaagaaagcaggcctagctctggggagggggccaaggctggactggccgggtgggttgggggtggggagttggcaaaaggaaggccattcaagggggcaggagagaagagagagcgcctcaccgcagacctcactgcatacttgaaggctgacgtatctgggctcacatacttctggaaaagatgagtcaagcataggccttgagctcccgagtgtagggcagctatcctgggcaccgtgccagcctggcactggaaaacagcacttattatttattttctggctgccaaagagtctccctggcttatcttcccccttccttctaccccctctcccttccttccttccttcactttaactagcattgattgaggacctactatgtacaccctactgtctcagaggctgggaggacatagacggtcaaggccaaggagctctcagcattggaaatgtgagacctggttcaagactcagctggactgctcaccactcatgtgacctcaggcacgttacttgacttttgtcttcatttgtaaagtggggatgaaaacacccacctcacaggaggtagcatgtacaaagcacttggtagaggacaggggacaaagttggcctcaatcagtggtactgccttccgggtgctgagtctagcaggggcgatgggtatggctgaatgcagctctgctctggggcaatgagaatccctgccttcctcacactctttcctccccactcttctttctcttctctgcctcctttgacctcttttacaccatctgtgaagtagaaatagaaaagaccccattttgcccccacagagcctctgacagggcggcagaggcccacctggcccagggcaatgcctacctttccacagttcctgagaccccactctcccaccccagggggttaccagctctcccagccctgcgtctcctttcctggcctggtggtcctgatgttctggccctggtggctggatctgcatgtctttcctggacctggctcaatcctgctctgggtggcaggggccagagcagagagaggagtgtgtctgggagagtcacagatggtcagagatagaaggggtagcagccccctctgggcccagaggaagagagagcccctgagcggggagaaccatttgccagtcacatcgcggaccctgggcctccacctccagggcagacatctttttcacacactaggcacttctggctcacaagggcacaggaccctgtctagaggccacgggtccatcctaagcctgatcccaggatctggtgccgggtagggtagcgaggcactggtgggtgactgacgtgcgccacgctccccactcaacacccacgtgtggggccaccttggcctcccaccgtcctcactctggcctggcatccgaatggcatgtggtcaagcacagcaccttgccccccacccgtcacccctgtgtactctgtggggaagggagggggcagcagtggcgtctgggctctgccaaggccagaataacagctgatacatcagatatgtcccagatgctttgcaggaattagctcctcaatcctgacaaccaccacttgaggtggacactttaattctcatcactccaaatgacagaggaggaggctcagggggctggagtgtctagtctaaggccacacgattatgatggatgggaacctggacagttggggtgaggagctctttaatctgagcctctaagttttaggacccctagaaagggtagcgggttagagaaggaagctgccttcttactgtctggggtgcagtttagggcagccccg

SEQ ID NO: 916404 - DNA, 4001 bp, Homo sapiens
aggggctctgaggtcccccaggaggcaaataggactcagcccccagccccatcctgggagtggacagcgtggactctcagggcctgtagccctagcctcccctcactggtatcaatcccagctcaggtatggggcctcctggacccgcagaccctcaggacttagaacctaaggcagtgggacacccagagcccaagacctgtcactcatgagagaccctgggctcacatctgacaggtgctacaagtataggggctgagggtcaggagagaaggcctggaccctgcagaggcttcctccccacccagcgcaggggagagctgctgggtgatgtggttcagggagagaaggctgaagtgggacagagacaggtcatgggagtcacagccctcctcttacacaggtgtctgggcaaagattccacaaaggaaaagaccccgccaccctcggtcaatctagtggtcatggccactcaccctacctgggagttcttattgtctaatccagtgtatttaacctaaaccccattcctgtgcccagcatccctcttgcccgcactcacttcttcttgtagccctccagcacctcctgcacgtggttaagctctgaggccagcctcccgctgtcggcctccacgcactcggcctcccgccgcagagtctcgatgtagccctcaaacaggggctccaggttgctctggcaacactcgcggttctggtagaactgcagctttgtctccagcagtttgttctgctgctccaggaagcgcacctgccattcggtgtgggaaggtggggcagatggtgtctggtgccccaaagccagctctgggggctcgcaggggaggtgctttaatgggaacccccaaatctggagcttatctgagattgagtagaggtgggcagtgggagacagacaatttctggatttcctggtcatgatctgtgtctagatttcccactcaggagtggagcaagggctgggtggtgtcagtgcctgctccctggggagttgagtgaccccccccccccaacccaagcagatgaacagaagtggaggctcagtccctcactatgaaactaggtgatcagcaacccacacaggcagagtactcaggttcagatcacagatgaggtttctggggatggtgccaggaagagggtgtcacaggccatctggaagggagctcagctgtcccagcccttcccctgtgtcatctggaagtcagtgcaccctactctctcaccctggggctgcccaaacccctctgagttcagcagcagtggtcacatgcccccctcccccaactccctgatgtctagcttgtgccccagagcagcctggccacacttttccttcacaagctccctctatctgaactgtcagctgagtctgcatcttgagtgcctgtgtgtgtgtgtctgtgcatgtgtctgtctgtctgtgtgtctgtgtgcctcgcccatcagactgggatctcaggcaggcagaggtctttgtgcctctgactccatccttagtgcccggccctggctgtgtaggtggtgggggttcaggaagggtgtgatccaggacacccaccttgtcgatgaaggccgcgaacctgctgttgagggacttgatctgctccttctcctcctgcttcacgcactgcgcgttggggtcgatctccaggttgaggggcgtgaggaggctctcgttgaccgacacggtggtgatgcatgggggactgggcccgcacacgcccccggagcggtagccgaagctgcgtccgcaggagccggcccgaaagcctccgcacacgctgtggctgccgaagcccccggtgaggccgcggtagcaggagatgccacggtagggggcggcggtgatgcagcagcggccgggccgcggcccgcaggccgagatgcagctgaaggcgcgcccaccaaatcctgatccgcaggtcatgatcctcctggacgtttgggttgcagaggacaggataggggacctggagtcctgatggaaactccaatgtgctcctcagggcaccgcagccctatttatgcgcagattctgaaggggcttggctgtgaagatgatgttggggcaatttgcgctttatgggcttgggtggttagccgggtctaacgcctctccagaatgtgctttaatgggggagtggcctgcaccctcttctttgtaaaagatgtcagtcttgggctctgggggagtcagcatgtttcatcttcaaagtgtcttgccagcagggcattccttcatctgcaggcattggggagggaaggggaaggcagaggagaggacgagaaggaggagtagagcctggcgaggggaagagaagggaggccaggtgctgggagaaactgggaggaggagacctgtgtgttaagtgtgatgtggggagaggggtttcaggaaaggctgaggcattaataaataccatctctcatttccatcacagctgtggctaaagtgctcctgaaacacaaatctggatttccccatctccagatttttcagttggcagctgaaaaccatctcacttttcctaccatgggaacagtcagcagattattaaatatttgtcttttatcttttttatgatgaaagctttcaaatattgaggaaaattggaataatacaacacacatgcattgatgctccacctgtttaccccgattcaacagttaacattataccatatttgctttcacagttgcccaattatttgagtggcagaaagcatggcatgtcacccttaaatacatcagcaggaatttcttaagaataaggagagtactattttcttattcaggaaaattaacaataattccaaagcaccacttactattcatctcagattcaattttcctaactgtcctaaggattttaaaactacattttacataatttaatttgtggctctagcccttgtattttctataaattagaaagtaaatcttgagctgggatgtccaatttggtagacaataggcagatgtggctacttaaatttaagttagtaaaaactaaataagttaaaaatctagttattcagttgcactatccacattttgagtcctcagcagctacctgtaagtagtgcctaccttattagacagtgcatataaagaacacttctttattatttatttttattttatttattgtttattttcacataaaattctgttggacagcactgggctagaggctggattaggtttaaattaaacattgttgggacagaatacttcataaaatatgctgtgtaactcttattatatcaccccaggaagcataaaatgtcagattggtgatgctaaattgaatcacagctgggcgcagtggctcatacctgtaatcccagcactttgggagtctgaggggggtggatcacctgaggtcaggagttcaagaccagcctcagtggaggagtttaagaccagagatggtgaaaccccgtctctactacaaatacaaaaattagcccgttatggtggcacgtgcctgtattcccagctacatgggaggctaaggcaggagaattgcttgaacccaggagatggaggttggatcacttcagtacatttccccctgtattaggaaaaactgtatagagaattagaattagaaagaactgtgtagagaaacatggatcttagtttgataagaatatgtttctttttaattggtcacctactatgtgatcatcattatatatcgtaaatgatctctaattctcacatcaatcatatgaagtatgtgccattatccccattttactgatgaggaaaccaagggtcagggaggttaaataacttgcccgaagtctcccagctggtaagtgatggagccaggagttgcattgccttctcacttataagctgtgacaaccccttgacttcctaatctttggataagttcaagagggtagtgaaagttgtttacaggggagtatctgtgaatttagggtgtgagagagtccatctaaggaa

SEQ ID NO: 916405 - DNA, 4001 bp, Homo sapiens
gatcaagggactctaagctcttttcacctactgtgctgcatcctacatggctgtatctgaaaaaagtccaggtcctagtaatgtggacagctgctggcctcctcctcccttttcgtaaagtggaaactgagattaggagttgagtaagttcaccatggccacccggctggacattgactaagggaacgtggtctccagcccttgctctggaattttccacatcgtgcattgtctgtcaagaaaactacagaagtatcattgccctacttctggtcagtggctgcatcaacaggaggctcccagcctaacagaaggtggtgtgatgttgttgctaattcgggcccatgtttttggaataagtttatagccagaacttaataagctttagaaataaaactgtaagtttgactaaacaagttcctctgtgaagcactttggcatatattacctcctctaatctcccaccgtcattcctccccttcctcactgggcagcaccgtccaaaggccaagaggtgaatggcttgcccggggattccgggtgtaggagtagagtcaatgccagtggccagggctcctgacctctggcccaggactcttgcccctaaaccttacggtcaccagaaacaccagctcaaactgtggaatgaatcctcaccccaagagcctccctggggcgtgggatggacccagaggctgttgagtccttcagcaccttcagaaggcatgccacatcttttcctgcagtgggtgctgtactgtagatgtgggaatctgcgctcttcctgcagtgggtgctatactgtagatgtgggaatctgcactgttcctgcagtgggtgctgtgctgtagatgtgggaatctgcactgttcctgcagtgggtgcagattcagttcagcaccttctgaaggcatgccttcctagcagcctttcagtggctctggagatgacagatgtaagacttttgtgaccgtcaccctgtgcctctagctctgactgtccactttcctctcatcccaggcctaaaatgattggaaactctgaggtcacagtgtccatcctcaccttcaggctcaagagttgtgacacagctcaggcacacagaaggcggttctactgttaaagcctcatcaggaagggcatttctctgcctctctggtcattcctttcagtattgctttggaagttcctcttatagtctgacctcaggcaaccttggtgattggtgattttgtcagataatattcagagaaagatgatatattttaagaaagacaaggaagcagaaatgtttagtgcagaatctgatctaactggctttcaaaggctggtggtcgtggaatgtgagggaggccactggataaactgaggcctcctcaatgtcagtctcctcctggttcccttggaccagaacaagaccagaccccagatctgcagtgggtcctctcacggccctgggccactgcccccttaccttgttgatgaaagatgcgaaacggttgttgaggcacttgatctgctccttctcatccctctttaccctctgcacagtcgggtctatctccagtgccagtgggaccagcaggctctcattgatggtgacaggggtgatgcaggcagaaggcccacaggtggctcccagtcggtacccgaagccaggcagggtacctccacacctggaggctacccggggcctcccaaagcccacgttgcacaggctccgtgagccaaggcagcccagagctcggaggcccctaccacccccgggccggcatggccccttgctcactgcatagtgggtgaccatccggggcatgacagccgagtatgagctgaaactctgactgccacacctggagcctggctggaaagagtggtacgacatggcaggagagagaggcagagaaatgcggccctggaggaaagaaccggggcaggatgatcaagtcaggctcagcttccccccttttatctggtagggggatggaggactgagatgtgtcaaaccccaaatcaccattaaactaggtttatgagcttgggatattggcagagctaagtagcaaggtggataattagggtagcgaagagcaaagagaaggggccaatggtcagtgctggtgggccctataaaaatcctatttgtcctccttccttgattgtgggggtgatgaaaggggccaaccagacagatatgttccatgtatccagtggctcagcctcaaggaaagggagagttgggactacgtcatttcataggaggggaggcgtgccatgaattatacaccctggcttctctgggattagagggcaagtcccatatgcttaaagatgctctggctctttccccaaggctgctcctaggcttttttgcagatcctcaacccaagtgccctctgtgggctcctaggtgagtcaggaagttcccaggaggaaggcttttggggtgggagaatcctccctacaacaggccggaccttaaccctcctgagctctggctcagtgacccactgtcccatgagggtcttgaaggtagacagactccaggcatagacacttttctacagggcccatcagtccacaaaggctgcagggaactcaagaggagaggcctggtgcttgagaagggcagaggaagggacgctctcctcaacacttctggggcccccagaaggcatgatttcagcatcaggtctcggcttccatgtggctgttcctttccccttttgcccaacccagcctgagtgtccctgaggtcaacagagccagctttggcctgaggatgtctctggggagagttgttgcccttgggaattttcaggtggaggtgggattcaggttttctttccagctcaggtcgcagacacagctctttggagatgtctgaagcccccgcctcactctctttcctcctcttttccatcaatttcatcagtgaaacttttgccatggccgaatggcctttcccttccacactgagacttatcaccaggtcaaaatcaaaccaataataataataataacaataataaacatttattgggcatttattgtgtgttgggaccactccgtactctttacatccatggtctcatttaattctctgaccacacaatgagatagttactatgccacagacaggaaaatgggaagcacagcagttaagagcaacatccccaagtcacacagcttgtggctgatcagctgggagtccatcctgttccttttgacttcaccctgccatgctgctccacagcagggaagcccaggtgaggaattgggaatctgctgcccataaatgttctgttgtccctgtccgtcagccttccaacctgtggattaggagactggaactcaaaggtttcctgagcctcagaaattctcagtctcattgtgacatttcacactccctgtcccctttttcatagtcctgactgtgggccccagagtagtggaggaggaggggtgcaaggcgagaccacaggccacaatgggaggcagaaggttgggtgagggggtccaattgcagggtgtcaggggaagaagaccacactcttccctggactgagtccacagagggggcccaggatggtgtgaatgttgatggagacactcagaggccccaccagagagcagattcccactagagggggtgagggagacagtgagctgcaccggagggcaggggtcactgcagcagtggacacagcagagtctccccgccatgtccaggccagaggagggcctcagtgagcatgttgggctcctggagtccagaaccagagctcaggagcagagggcagggcggttccttggattcattgtgggagggaggcacctgtttcctgagccccccgagtccagggttgccctctgagtgtgagctagggcaggactcagtcaagacctagacagtttggcggcattttatgaaagtgggttcaggaactagggggcataagggagcaggcagttgagaagggtgtgattttcttctggag

SEQ ID NO: 916406 - DNA, 4001 bp, Homo sapiens
ttgcagcatcagaggacaaagaggggttcccagcacgagggcctgaaagcccccaactctctgacccagagtcttccctggaaggcgttatgtcatctctctcaaaaatgccaccagggcttaaccagttcaccacctggaagttcttcctgggagttaatctcttctaagtcagtttacctggtgtcatggaaaatgcttgaagagtccagattctgctgccacttgttaacattgtgcccttggataaagcactcacctcctctgtagagtggcgaggttaaagctcaccttactatgaggattaaaagaaccctttaacagaaaggcaccccacactgaacagctactgctgttcaatcacaccaagccaggtggacctttttagaaaggcaaactgtaaaagttgaaaaataaagcatgtgccaattattcaaaccctacaacaacaatgcaattagaataatagtcacctgcaatatgagagtaggaatgtcctgtgctccaacccccttattttactgatgaggccaaggaggttccctgactgcctgagagctcacagtggcagagaagagctcaaactccgatcttctgcgctgcagggggtgtcttctctccctttgacaattataggaacatccctctcccagcgatgaggttggcccactactccactcagcttcttttgtctaataacttggccacacccttggtaggtcctatcttatgctatccttggtctctcatgctattagaaattccacatttttttttcccgatcctttctggtgggcatctctctagtgtgactcctctcttgaggttttggctctggagggctctttccaaccccagaacatgttcctagtcagagccttttctcccagtctctcacatcactgccacatggtggttgcctggattcagtggagaaggtggctgcaaactctagttggacactgactacacagatggtttcaaccaaacccagactgtgcactgcctgcctccccataaagcctgtgaggatggggaccatgactcttgctcacccctggatcctgagccccaggaacagtggcttggacaaaatactctagaccctgctcagtggccaaatcactgtgtggtatagaaagagttctgtgccatccacgagacccacttccagacagttttccagcaccacacttattagccctgccttgatggagacagcatctccttggcatttaagcagttatttggcttcaaatgccctgagcgcccacacagtggtcctttgctcactaggtgatattatcactcagtgtggaaggctctgcccctcgttctgcttttgtgttttcagttaatctcccccatcagtctggtagctcccggtcccatttttgtctttctgtctgtgtcctagaagtatgactacctttccctttggcctgggaacttctgtgggcaagttcttgcctttgacttccctgtcagtgcccagcctgagttctgaacatgagtaggggttcaggaagggtgtgatccaggacgacacccaccttgtcgatgaaggccgcgaatctgctgttgagggacttgatctgctccttctcctcctgcttcacgcactgcgcgttggggtctatctccaggttgaggggcgtgaggaggctctcgttgaccgacacggtggtgatgcatggggggctgggtccgcacacgcccccggagcggtagccgaagctgcgtccgcaggagccggcgcggaagcccccgcacacgctgtggctgccaaagcccccggtgaggccgcggtagcaggagatgccgcggtagggggcggcggtgatgcagcagcggcttggccggggcccgcaggcagagacacagctgaagtttccagggcggaacccacagcctatggagttgaagccacaggtcatgacggaggttaggaggtgtctgaacagtggagtagatggcagaggatggaaccaagggcctgtgctccctggctgatggcaggcccttttatgtgccaggggcagctggtgttaaaagagggagcaaagagacaatagctgaattttattggcttggcatcaccctggcctcttaagctagaaccctgcttgcctcttcagtgtggctgcatcaacaatccctggccacgggccctgtttcatcttcaaagccctttataagcttcctccttgctcctgcccctcccactggcactgctgtggagcggggagaggggttcctgaaagcattagttgcattctgcggtccaagcgaggggaatgggtgcagtgacctggggtaaagcctgctctctgaaccctgttctgaaaggggcagagctaggctatgggccctggacccatggccaagccctggggtggagtggctggcctgtcccaaggagggggctgcctctgagacaacctcttgctgtaggctttcctgtctttttctcaaaggcgggttcctttcctcattgtcaagattggccgctcctatcctattcctgctcagagcctggtcaaggatgggagtgggggtagagatttggggtgggaggagggcatgttctttgcactttgggtattcctagtgcagggacaccatctgggacatggaagaaactgattcagagagttcaggacagtgccagggctatgcttcagagttccaggtgtcattgctgatgggatcaggagcggggagtgtggaatacctcagagctccagggactcatggaggagagtggggacctgggcttgaggaggattggggtggggtagtacaggattgagagatgaccagaaaagagtctggctctgatttgcagactagactatgtgtattcatttattcatttattcatttattcatttattcaggaaatacttatttggtgcccaccaactatgcactagccactgtgctaggttctggaaatcctacagagacctggggtgtttggaggtagcatgcatgtgggggagccaacatttggctagggggaaagatgagaagccacagatggggggaaggccctcacaatgtccaggctgattggtgttctttaggttcccagcagggaagctcagtgatggggtcttggggtgtatgtactcaccaggaaggagggaaggtgcgggaggtgagggacatcagcagggtccttaaatgagatcactctctcacctcagagaacacactgggtgagagaagggtgctagctcatgtggctgttcctaaagccaagctctcttactttgggcccttgttcctttgggttaggacaggcaatggctttgatggatggacagtcggaccgagccaggaggtttgccttaacccgaggacctgagcccatcaacccttccaaacacacatctctggactgctttcgtcaggagaggatgaggaggactccactgatggacctgtgtcctgacccagccacaacccaacactgacccactctgggctaatagtaaccctcctgtgactctcatcttttgcccttcccactcccgctcaggatgagtgggccagttatatcccagagtggggatctggggatgatggaagaggggcccatcttctgtgggcctgagggagggcaggcgatggtgctgttgaaatctcttagggagctggacatctgccatggatccaaaaaaaggactctcctagcctctcttcttgggtcctgtggacaggcttccagagtcttgtgtctggggcaggaactctgggggtgtgggctgtgtgataggggatcctggtgtgaaagacacaccagggaggcacagcctgagggtacctggggggcctgggggtggctgactgcagctgagtggctagtgggattttgggagcatctttgagggaggctgggctggctggtgctgtcatgttcagtcttggttgggtcaaacatctgctagacagccaagaaagaccaggctcttcacccacccacactggaacca

SEQ ID NO: 916407 - DNA, 4001 bp, Homo sapiens
agcctggagccgggcctgatcactgaccagcacctccaactgcctccgcaggttggtgatgtagctctcgaagagtggctccagattgctcctgatacatttctgctcttggaggaagctccacttggtctctaggagcttattctgctgctctaggaaccgaacctaaatccacagggcacagaaatggcatttgaagtgcttgatagggttcatgccttgaccaagctcttgagatggccagcgatgacttgaccacatgtcgacagggttctctcctctgctgactttcattcctccactaactcagcagaagctggaagggcaggttgtgactccctccttgtgctcggctaggcctagttaccaatatggggttttgaaccatagcacttcagtaccattcccctatccagtctctaagaaagctgtacactggtacatcaggaagttggaagggttgattctatttaagctctggtttgcctatatctgaaaactgatgccaggcatccctggcagagaatggggagcagagtaaactacatttggggtgggatatggtactgggaggtaggaattctcagattgtaagtcctatccaacatcgcagatattccattggctatgtgtagagctggaagagaacttacagaccctttaccccagcccctcattttagagaggaagaacccaaaacttacagaggttatccttcattctcagacataaccattccatctccacatagacatggtgtgtgggatgtcagttcttttgggttatccacatcactgttcccactcatctgcctggaagccagtgactaccagtggtcattccctgcaatttccctgaatctaggcaacttggccgaattttgataccccatgtgggggtatgaattcttcttctttttttaattactcaactccattctctacttttctaagcctgaatagatgaggccactcagcctcagaaactatgaaaacttcataaggaacaaaaggatctcaaagaataaaacctcttaagcatataccagccaacacctggctaaagtcccagtgtttccagcctgtttcagagacatttctaagtgaccagatgcaacatcttagtttgtcgagatgccctcgagtttggctggatgctcctctgtcctccagaagatatcaacactgtcggaatctatcccaccatgcagctcgtcctctggcttggccttgctctgcagcagagcaacccataaagcataccacaatgcctgaggtaggcacttgaaagatctgaggtcaaggtcaagtccccagaaccgggccagttctttttaagggaaagagcactctagcgcattttggctgtaatattcctagacccagagattcagctatcataggtaccttgtcaatgaaggaggcaaacttgttgttgagggtcttgatttgctccttctcatccttcttcaccctctgggcattggggtcaatctccaggttgaggggggtcagtaggctcttgttcacagtcacagctgtgatagatggggctgctgggactccaacccctccaactctgtaaccaaagccagggccaccaaagccatagccaatgccactgccagctccaaagcccagaccaacacagctgtcagccctaggccccagaccaacacctctcccatcaccaaaacccatcccacagccagcaccaaagcggactccacagtggatgggccgagagcctacagctgctatccggggtgagtacgatccaaaggtgatgacactccgactaccaaagctgccaaggccccggaatccaggcccactccaacaggagacagagttggcccggaagcgattcaggttctgtggtgtcattgctgaacaagagctgaagttgcccacccggtgaccagagctgactcggtaggagcggcaagacatgatggcttcctggttgggagcaaaagagcaagtgtagaatgggtgagctggagctgggagtccctctgaggccagtggaacccttgcaccccttttatgtgtgtggtgatctgaggcttggccccataaaaatgaaaaaatccatttgcaggcatttatgagcttgggtagttagcagaaactctgcatgcctataacctccttgacaatgagttaactcagacacacctagtctcattgggatgagggctgtaacagcaaaccaataaacattaaaaacacataaacatataaacattatagtcttttttttccctataagtctaccacaattgccattaaggggacattaatttgctttggtcataaatgcaataggttttttcactgtgagtgtggctaaccaccagaaagttaggatggcgacagctccagcaagaggctcacatgggatgcatccatgaagatataaccccctaaagaggtgggagtgtgtgcacatctccaagtaagaagtgatatggagaaaatacagtttgttgcatttctgcaaatcaattaaatcatcaaaaaaccttctgccatgttttatccaatatggctgtttagtatacaagagttgaatctacagtaaagctcatttgggctagtgtagacacatctgtgatttgagacactcagagatattcattcattctacagttttagagtgcctgctatgtatccagcagtgtgcttgctgctgagggtacagagattacaaagacagtctctatcttcatggtagtaggggaagatttatcttaaattttttttttttttttagagacatgatctagttgcccaggctggtcttgaactcctgggctcaagtgatcctcccgcctccgcctcccagatagctgggactacaggcatccaccaccatgcccagcagaacatttatcttgaggatttccagcagtcaacactttgtggcatgatttgaggccaaagcattggaaagtttctgtatagaaagctaactacatgatttttagcccccaaatataccataggtgtgatttatgggcctgtccatttaggttccttgaattattgatgaatctttggttaggatagagagacacaaagcaatatacatctggatagaaaaggaaaagttctcagcagctgaatattatcattgttagcaatattgcagctcttttaggaccctgagccaggctggtgtttaccttttctattctagtgcatcctttgcccaggggaactcatgtttgactggacgcttgagattctttgggatgcttgcaattccacttggaaggggatgtatgcttttgaccagaagcatccagctcatttgtgcggtattttctttttccagctatcagctgtatgtctaagggggaaatgaagcagaaaaacaataagaagtgcatacttctcgtcaagaccaccagtggcctccatgttaaattcaatggtctgtcctcagttctcactttcttcacatagctgaccatgccctttctcttgaaacacgctcttcttttgattttcggacactacactctctcgatttcttgccacactcttttcagtcttctaagccagttcctcctcatatccccaacctctagacactgcagagtccctggctcaatccttgggtatctattctcttctttagactcattgccttggtgatattatacagactcaggactttaaataccatctgttcattcatgactgccaaggcacaactctatcccagacctccctacccctaaacgccacacatatattttaaccaacatctctatttggatatcagataggcatctcaaacttaatacagttgtcccttggtatccccaggtagttggttccaggaccccttgtggataccaaaatccatggatgttcgtcgagcctccgatatacaatggtgtagtatttgcatgtaacccacacacatccttctgtatacttgaaatcatcactggattataatacctaatacaatgtaaatgctatgta

SEQ ID NO: 916408 - DNA, 4001 bp, Homo sapiens
agatgggtgggcttttcatcatctctccttgatggcggtcacagggtggccaaggaaggggctggatcctcctttggaagtcagtgacatggtctgattgctgtgaaatatgatagagcccctcccttccctctgggtccctgcttcctcatgggcacactgtgaagcctgattagggccaggtgctgcagcctgcctgtgctgcgtatttgaatcctccacagaccccacctggcacttggcattctcaatctcggccgtcagcctctggatcatgcggttcagctcgttgatctcctccttggtgcggcgcagggtctccccatgcctgatcaccgtggccttcatctcctcacactggaggaagtagagatgctcatgaggctcagggtggggccccccatccattcaggacaccacagatgactatacaggttgtacggtgctcagcctgtgcaaccacacatggcagtcctgccctgccacttcaacctgagaactactggcttttctcatactgtcctcatgggtcagaatccccaggcaagagaaatcttttctaatagatgcctaacttccctcccactgccatgcttagcaggcaggtgtcctgtgccactcaccttgctacggtaccaggactcagcctcggcccggctgcggctggcaacatcgtcatactgagccttgatctcagcgatgatgcagtccatgttcaggtctcggctgttgtccatcttgactatgaccgaggtgtctgagatgtgggcttggagaacgcggatctcctgtggggccaacagccagtgcatttgcttctagtgcctgatctgggccacgtgatccaccccaggggacaatgtccacttcccagaccgggcactggtcatgaaggttacatgactcctgctcctaccaccttcactcatgcacaggctccttaaaaacaacaaagctgaaaggggctgtagaggccatctgggaacagtgtctgccttaaaagtgggaaaactgaggcccagagggtgaaaaagatctggtccaaagtcacccagcaggggagctggggtttggaggctaggatgagtgattagtcagtccattaatgaggaccatgccctatgtgcgaagccatcctgacccccaccacacatgcacactctcttgcccatctgtagactggcactcacacaggcagcacaccaacatgcagagaggtcacagacacagagcagcccaagaacatgtacaccccatgctcctctcacacatgaacgtggacatggcctctgtattgtgggccccagcacgtatgtgcaagctcttttcacacttacattgcacattggcaaacataggcacacacatgcacccttgcctcactgctcccctgtctccaaaacacccctccacctgccctggctgggtggcagttgcccccttacctcttcatagaggcgcctcaggaagctagactcctccaccagggcctccacattggcctccaggtctgatttccgcaggtaggcacagtccacgtcctggccgtgggacaaagaggaggggacatgcatgtgagaggagaccaaagaaaggtgcctttggtcagcatggtgaccctgcccctcgctggagtttgcactgatgggccccctcctccttgccccatgaccagcccctcaccttctttagaacgacaaactcattctctgctgtggctctcagggccacctcctcttcatacctgggtgtgggagagagaaggtctggagctgagaaactggaccttgaataccatcccaactcctgggcaagttcttccggggattgaaaagggattaatcccctccagatgttgtcttggcccctccaggatctattttttgtattattcatgggccagcccttgtcctagcctggcttcattccgccgcagtccttctgcctctgagatggggttaggaatgcacattccttcccccaagtctaaaatcatctgtgcatcctaggtcccaagagagctggttccattggcagggagatcacagagcccatgtcataaaggtaagctgtgaaggacagggacatagagagtgctagaattccactggatttcctctcttcattcccccagaagtagctctaaggctcacaggggtggagtcttagaggtgaatcccaggaatctgaagaaatctaggccccactggatatctgctctgggttccaggcagcctgctagaggaatctgaaagaagctgtggcaagagggctatgggcagagcctcccagcattctctctgagtttcccctgagtccccccagcttgctgcactcacttcttcttgtagccctccagcacctcctgcacatggttgagctctgaggccagcctcccgctgtcggcctccacgcactcggcctcccgccgcagagtctcgatgtagccactgaacagtggctccaggttgctctcgcagcagcgctggttctggtagaactgccacttggtctccagcagcttgttctgctgctccaggaagcgcacctgccattcaggtggaaagaagaagtcagagggagcctggggggaggcacctggtcccccacagtctctctgccctcgggtgctggctgaatgggctgagccataaagctgagtgtctgcggctcaaggggcccattcccaggcccccagggaggcagttgtgggtgtgagggaaagcagtctgactcaaagccaaaggtctgtttcgagccccagttttgatactttagagagcaagttgtttaacctcctggggctcagttttctcctttccaaaatggagcgaatagtgtctgtcttagcactgttgtgaagcttgaacaagttaatgcatatcaagtgcttagaacagtccctgacacgtagtaaatgctcagtctatttaactattattataattaccagttgcccttcacttgctcatttatgcaacaaacacttattaaatatttactacttagtgccaaggcctgtggtaagatatacacatccatgtctaatgtctgtgtctatgtctatatcatctaactatgcattccattcaattatcacagccctgtgggatgtagatattacttaccccatgttgcacatggggaaattgagacccccaaggtgtgaaatgcccagctcatggtaagcgatagtcttgagataggcatgctctgcctccccctacagcatgtctgagatgctcgtatacacccccttagctccaagttgctgtctgataagtggagacgctgatacccactccaacccgtcactgtgaggatggactcagatcactaaagaaagagtgaaaacgtgaaggtgactgcctctgcccccaaaccctgatcctaggcccccaaagctgctccttctgctctgctagaggcctgtggacacaggaggagcctgtgaaggaggctcccagcctcccccgacaaaactttcttgggaggcagcctcacagctatgcagcgttctccacactctggctgcattagggggcctcctcctaccagcctggccacctccctgtctgcatttcagccctctctcatgaaggggctgccaggcctgggttggctgtcacacctcctcacctaccactgtccttggaaaataatgatagtagcagctaacatgtattgagtgctgactatttgccatcatgtttcatgcatggactcattaattcctcacaggtggatgaggcagtcctgttattcagcagagtaacctgcctggggtctcacactgctgagtgatgcagcaaggacttgggagaggcagcatggctgtgggcattaccccagccccttcacgggctgcctggctaggagccacaaggtcttttggtctccccgttatctcccactcttccagcacctgctgcccagtctggtttttcagacacagttctgatagtcctatgtcgtcttggctcaagaaacacacacacgct

SEQ ID NO: 916409 - DNA, 4001 bp, Homo sapiens
ctgacacgtagtaaatgctcagtctatttaactattattataattaccagttgcccttcacttgctcatttatgcaacaaacacttattaaatatttactacttagtgccaaggcctgtggtaagatatacacatccatgtctaatgtctgtgtctatgtctatatcatctaactatgcattccattcaattatcacagccctgtgggatgtagatattacttaccccatgttgcacatggggaaattgagacccccaaggtgtgaaatgcccagctcatggtaagcgatagtcttgagataggcatgctctgcctccccctacagcatgtctgagatgctcgtatacacccccttagctccaagttgctgtctgataagtggagacgctgatacccactccaacccgtcactgtgaggatggactcagatcactaaagaaagagtgaaaacgtgaaggtgactgcctctgcccccaaaccctgatcctaggcccccaaagctgctccttctgctctgctagaggcctgtggacacaggaggagcctgtgaaggaggctcccagcctcccccgacaaaactttcttgggaggcagcctcacagctatgcagcgttctccacactctggctgcattagggggcctcctcctaccagcctggccacctccctgtctgcatttcagccctctctcatgaaggggctgccaggcctgggttggctgtcacacctcctcacctaccactgtccttggaaaataatgatagtagcagctaacatgtattgagtgctgactatttgccatcatgtttcatgcatggactcattaattcctcacaggtggatgaggcagtcctgttattcagcagagtaacctgcctggggtctcacactgctgagtgatgcagcaaggacttgggagaggcagcatggctgtgggcattaccccagccccttcacgggctgcctggctaggagccacaaggtcttttggtctccccgttatctcccactcttccagcacctgctgcccagtctggtttttcagacacagttctgatagtcctatgtcgtcttggctcaagaaacacacacacgctcacacacatgtacacactcacatgcatacacacacatatgctcacacacatgtacacacacacatatacacaccacacactaacatacgtacaggcgcacacaccgctacacacacacacatgtacacacacacacatgcacacactttggatcacaggctcaatttctagaccacacctggacctcgttaaatgctgcgggagttaagtgatggaaactgacccttccacctgtatgggtctgcacgtcattccctctgctgcctcaaaccggcagccatcctgtctcctcagcagactgggacctccccaagggaggacagggctggaggcttctctgggccgtctcaggcctcacccaccttgtcgatgaaggccgcgaacctgctgttgagggacttgatctgctccttctcctcctgcttcacgcactgtgcgttggggtcgatctccaggttgaggggcgtgaggaggctctcgttgaccgacacggtagtgatgcatggggggctgggtccgcacacgcccccggagcggtagccgaagctgcgtccgcaggagccggctcggaagccacctacagctatccggggcccgcaggagcccaggttgcagaggctgcggctgccgaagcccgtcagccctcggtagcaggacacccctcggtagggggcggcgctgatgcagcagcggttgccagttttgggggccacagctgagcaggagctgaagttcctggtgaccccgcatcctgagctgatcctgtaggagcggcacgacatcgtgtgaggctgagcagagtctgagaggcagcggaaggtggtgcgggcggcagagtgcgaggctcaggatccttctgctctctctgatcctccctggtccttttattggtggggagagctggggttggctgcataaaaggagtggaaagccattttatgttgtttatgggcttggggagtttgccagcaactccccacggactcatcttaaaggtgagctcagcagcgactctggggctccctgaagtcttgaagatgttattaaggagactgcatttgaacttttcatcttcaaagctcgtttacatacattaagtaattaattttctcacagtctttctgtgagatggcctcaacccacacttggagacggatttgaactccacaacagcctgggggtggctgggtttgggatacaggcaggagccattgtctcaagggagaggttggagggtcctgggttaggtgagacttgggggatcattgcattcatctatctggttccacagaggacacattctcaagtaaatcattgcatttcaggggccaataggtcaggcgaatcccaccccatctaggcagcattgcttggaaggtggttcaggaccagagcggtcattttgaccatgcccgtgccaggataaaaggctggggcagatgatctcttggaaccttctggattccagcccagaaggcgctggtccagagctttcacttctcacccagcaaaagtgcaaaccacagaactctcagtggccacaataatggctacttgcggattatggggagactccctctagccactttcttccattcggtcaaaaggattggagaactcaaccttgggataacctgggggctataaatttgctgtgggcacctttgctttgctctttaagaagaaacaggtcatgtgagtctcccttcccagaccaccagctacaagaggtattccttctgttggccagcccttgaattgtcatccctagaggagtgtttagagactgcattgcacaaagctggaagtgggatagtggtttattcttgtctaaggtggctatgacttctggctcctgggggttctgggagccccatccttctagtttctgcttccctgtgtgtccttgggacacttattaggataacaagtgctattcttttaatgtttatggagtacaaaccttggggatgtgggtctgcccccaggaaggttagccagacacccaagtgttaggaacttaaggaagaagagccgatgagcttcctcagagggtgactcctcctccaggaagccttccataaccaaacactgccatcatgctgctgttctcataagtccttcacgaaatgccctgtactctgtcctgcatctgctctaatctccacagccagctgacctcacccaggaccttcacccaggatcaggctgatcgattcccacctcacctccacattccacattgttcttcagggcagggtagagagaccttggcagctggtgggggaagagcaggtggtctcaccagctgaccctagaacatatgcagatcataatcatccatggaaaagcaactgcgtttggcaacccgggcaatggaatcaaagctggaagacctggttcaagggccagtttggatccttcctagctgtatggttttggaggaagttcttaaactctctgagcctctgtttccttaactgtaatgtggattcatccttaccttcccgggctgttgggagggtgaagaggatgatatgtgagggaaagctctgtgtaaaggaaagggactgttgctttccacgagaaacattcccacctgcctcacccagcagaaagggctgttccttgccctgccacagccttcacctcctctgcacatttatgactccttcaccctttcaagactgcttttaatgtttttttttttagtctgatttcacttgtatagcaattttgggtggagtctggggacagagagaggaggctgtatgggggagctcagtgtggggcctattgctgggatacagggatgtttggacagtgagttcactgactgactgccatgtagacctggagctggtgtggtatgggccaagagggattcctggagaagggtgggg

SEQ ID NO: 916410 - DNA, 4001 bp, Homo sapiens
ctctgaggtcccccaggaggcaaataggactcagcccccagccccatcctgggagtggacagcgtggactctcagggcctgtagccctagcctcccctcactggtatcaatcccagctcaggtatggggcctcctggacccgcagaccctcaggacttagaacctaaggcagtgcgacacccagagcccaagacctgtcactcatgagagaccctgggctcacatctgacaggtgctacaagtataggggctgagggtcaggagagaaggcctggaccctgcagaggcttcctccccacccagcgcaggggagagctgctgggtgatgtggttcagggagagaaggctgaagtgggacagagacaggtcatgggagtcacagccctcctcttacacaggtgtctgggcaaagattccacaaaggaaaagaccccgccaccctcggtcaatctagtggtcatggccactcaccctacctgggagttcttattgtctaatccagtgtatttaacctaaaccccattcctgtgcccagcatccctcttgcccgcactcacttcttcttgtagccctccagcacctcctgcacgtggttaagctctgaggccagcctcccgctgtcggcctccacgcactcggcctcccgccgcagagtctcgatgtagccctcaaacaggggctccaggttgctctggcaacactcgcggttctggtagaactgcagctttgtctccagcagtttgttctgctgctccaggaagcgcacctgccattcggtgtgggaaggtggggcagatggtgtctggtgccccaaagccagctctgggggctcgcaggggaggtgctttaatgggaacccccaaatctggagcttatctgagattgagtagaggtgggcagtgggagacagacaatttctggatttcctggtcatgatctgtgtctagatttcccactcaggagtggagcaagggctgggtggtgtcagtgcctgctccctggggagttgagtgaccccccccccaccccccacccaagcagatgaacagaagtagaggctcagtccctcactatgaaactaggtgatcagcaacccacacaggcagagtactcaggttcagatcacagatgaggtttctggggatggtgccaggaagagggtgtcacaggccatctggaagggagctcagctgtcccagcccttcccctgtgtcatctggaagtcagtgcaccctactctctcaccctggggctgcccaaacccctctgagttcagcagcagtggtcacatgcccccctcccccaactccctgatgtctagcttgtgccccagagcagcctggccacacttttccttcacaagctccctctatctgaactgtcagctgagtctgcatcttgagtgcctgtgtgtgtgtgtctgtgcatgtgtctgtctgtctgtgtgtctgtgtgcctcgcccatcagactgggatctcaggcaggcagaggtctttgtgcctctgactccatccttagtgcccggccctggctgtgtaggtggtgggggttcaggaagggtgtgatccaggacacccaccttgtcgatgaaggccgcgaacctgctgttgagggacttgatctgctccttctcctcctgcttcacgcactgcgcgttggggtcgatctccaggttgaggggcgtgaggaggctctcgttgaccgacacggtggtgatgcatgggggactgggcccgcacacgcccccggagcggtagccgaagctgcgtccgcaggagccggcccgaaagcctccgcacacgctgtggctgccgaagcccccggtgaggccgcggtagcaggagatgccacggtagggggcggcggtgatgcagcagcggccgggccggggcccgcaggccgagatgcagctgaaggcgcggccaccacagtaagatccacaagtcatggtgctttttggggaagagaggaggttctgaggatggagacgtccgaatggagagcacagtggtcggggcgtcaggcgttcactacttgcacctctgtaggccttttatataagtggggagactgtgaccacgtgggtcggagcaattagaaggctttatgggcttgggttgtttagctgctgtcgctccccacttaatgtacttaattggtgcccagaagcagccagatgttatgatctcttgccctaaactgcagttttcttcttcaaaggaccaactcacgtcccgcacacccacctcaacctcccaatacacagttgaggaaactgacgttggacgaaggagtgggcagtgactcaggttggaatggaagggaaggggcggggctgctgctctttctgtcctgcggggtttgacatggtcaatgccgctgtccgcggtgctcataggactagccaggaatgttgggagggggaatcccttgatgtggaacttggggggcgcttggtggtttctccgaactagatgacctgtttctgcaccccaaaagacccacgtttacagaatctctaacttagtcaccttctcagggacccagttcctccacacctactcccaaatcccttatctatacctatcaacatgtttttttctctctctctctcccactctctggtgcacacacacatacacacacaaactcacacacaatgcactcacatgctggccttcctactcacaaccccccctctctctttcacatacacactcacacacacaatgctttcacatgctggcctttctacccaccatctcacacacacacacacactcacaggtcctcacctgcacattcaactagcatgtagactagtcctcaggccaccttattaggtcatattggccagcctcggctgagaggaggcattccctccctcagagtgtcccatgcggcctcaggagcacacactagcccactggccccaggaaagcacaattacctcccacaaggccctagacaaggattgaatgtctggatgtcctctcaggcctctgtgtaacctccagggcctagaaggtctgggatgagcaccactgttatgcatctatacagtatctggctcagaatatgagatcaaatagagccacatgaggagagcatccagcccctgccatcatcccctgagtccctgctgctttctgcactatactccttgaaactcctgcacagaagtttgtcagtacccttggcaggtgccagagaacagatctatatttgtatgtgccatccatccagtgtgaatagtgtgggtcttaaactcacaaaggctgggtaggaaccaaggctctgccctgagtacccctgtgtgatctaggggaaggcacttgactctcctgggaaataggttaaggctttccctcctactactgccttagagttacagaaatgtgtacatgctcagtggactccagagcacagagcagatgggcttcattacaatcattaggaagcggtgggctcaggggcagtgtttattcagaattcatgttctgacccactaattgaaccaaccagaattttattttaatgaaattgattatgagaaaatcaaatagagtagaatagaccagaaaatagcagattgcaccttatgtcatgggaataacttgttacatgccctttttgtttcagttgtatggcctatgtatatgtatgtgcatactcagtcaccatgtaaaattatttcttattatagttgcagcagaaaagttgaaatatctatttctcactgtatacaaaaaccaaattaaaatggattaaagacttaaatataagacctcagactatgaaactactagaagaaaacattgaggaaatgcttagggcattgacctggacaaagatttcttgattgagacctcaaaaccaaaggcaaccaaagcaaaaaatgggcaaatgggatcacatcgagctaaaagaacttctgcacaccaaaggaaacaatcaacaagttgaagaaatgacctacagaatggaagaaatatttgca

SEQ ID NO: 916411 - DNA, 4001 bp, Homo sapiens
acttcgaagaaacttacacaggaatacacaaactagcatttgggactcctgattcagaggaacagaagagagctcaggtggcttttttggggttatttattgactgcatgcaggtctgaagagtctgctcttgggcactgttcaggcagagacagaaggctggatcagaacatcccacactttttcttccagcaacagagctccggcctcacctgctctcccaagctccaggaaaggcaatacctgtgcctcccaacacaattcccactctcccgatacaccttgacattgatcttatttcatctctgaggatcacatttccagatgacaggtgcacacagacatgcatcctagggtagcaaacagcatgttctctctctctctctctcacacgcgcacgcacacacacacacacacacacacatgctgtctctctctttctctctctccctccctctctttctccctccctctctctctctctcttctttcaaagggatgacctcctgcatgttgacatccagccaaatttaaaaatcacggaaaaaaaagaaatacccaaagcgaatccgagaaaagcacccatccaggctacaacaggggcaggagggccacaagattcactacggactgacgagttcaggccttgggaactcatgtgccaggaccaagatgaacgtctcagtactgctcatgcccactccaccacagagggaacccctgttctctcagccccactgcccccaccctcggcggatgccagctaatggaagttcccaaatttaatcaacccatgcgtatagctgggttggtttgggagaaggaagtgagctgaacccttcaaacattttgaacaatgcagatgtccagtgatctcgtggacaccaggcatttggcatttcctaagcctctttaaaccttcctcctttgaccaaatggccttcagaaaaaaataatttctgccatcttctttctgagtaactttgcaaccacccttcatcccatcccactcccccaaaaaactgtttcaaactccccctcaagttctgccggagagaatgtcacaagaagccaaagataactcctcctccccgacccctttcctctttcctcacagtcccactgagattcaggagtattctcccacaccacctatgtgtgctgattgaggcatatttttttttcccttttgtacgttttaggcctgcaacagctcactgcatcaaaacgattggattggaaatgggtagttccataggaattttttttttcatgcatcttgcctcctgacatgtatatcactgatttaaaacaaaaaatctaaggagcaaaaggagggaggggaagaaggccaagagaagaagaggtctacactgacaggcggccccattctgtgagcaaaaaccaccttttgaccacctgcagaatgcgcaaggtcacgtgggttctctgcagctccttaatgtattacccggcacacaagcccccgtggcatataaacaaatccacaagcggaaaaaagagagaactccctcctcagcgaggaagcgaatgacaacggtaacagccgcaacaataataataaataaagaataacaattactactactactaccaccacccagccaagcgcagacgacagcagcacagtaaaaggatatccaatgcaggctttgcaaggagagaaatcacagaaaagcaaaccgtgcccaccttgcttgcccacaccaccacccccagcccccaataaacagaatcagagggaaaggggaccgtggggagaaaggagggggaaagaaggattgcttttttttttttttttttttttttttttcccgtaggcaacacctacctccagggtccggatttctttttgtgtgaggtcgttggaggtagcacatttggtcctaagcccttccaggttggagatgctcaagtctatcatgttttggaccagttcgcactgctgtaaggctttttgcaaactcagaggctgctgctcctcgcttttcgtcatgttttcctcatccatcgcttgctctgcaacccccttcccctcctcctcctcccagagagaaaaaagaggggggggagtagaggtagtctaccctccgcctctccaaccactgcgacttctcaacaatgtctcatgaagaagaaatccaacatctcacacagggttgagggggtgggagtgggaggaggggacaagagccaaaatttattattttattttgggatatcaagcggactccattagaatgtctcctctctctctgagtctctggtccctgaaaaggagagatgctgtttctcagaagcaaaccaggtgatgtgatgctgtctgtacacttagggaggaggaggaggaggaaaaagaagaggagaaggaggagagagaggaggagggagaggaggaggagggagaggaggaggaggagaaggaaaatagcgctcactctttacacaccggctccttgaaggacaaaattatatatttttggctggcttgcttttatgtcaaaaaaaatctggttttcccccctcccagttgcagggacacggcatggtccacggtttggagtgctttagcgcgttctcaaggtgctgtctgcattgctcccgcggctgcggcggctactgcggctggctgctgtctcctccccgcgctgctgctgctgctgctgctgccgccgccgggctccgggggtgacggttgctgcaatcgctcctgcctcgctccacaccgacatcttgcctgtcaatcaaagggcgggggggagcgagggagcgccggagagggatggagaccaagcgagggacctgcaggggagcgggttggtggagaggcgccgtgcgcgcagccgccccagccgggccccggccccggcgcgccagggacccgtcggaggaggcggaggaggagcgcgcagactcgcgcacctggccggggggcgggatttctaggggctgcggagctcgcgtggcaaagtgaaattactaccgggagtgcgtgcgagcgagcaagcgagcgatcggcgggcgggggcgcggagacagcgcgcgcatcgggcccagcctgctcccgggggcggcgggggaggccgggagtgtgcccgagcctggaggctgggcgagggggcggggagagggatttggtggcggggagcgggtgggggccactactcctgcaccgctctcgcgagaccgggccggagtgctgctcagcaggtgcgctccggctgggagcaggtgtgcgcccaactttaaaaccctcggtgcgcgccggagaggcgtcggcgtgaacctgggcacatcccgtctgtctttagctcgggggtggtgtgtgtgtgtgtgtgtgtttgccttttttgttcgtttgtcctttgggtgtgtgtttgtgtgtgtgtgccttttttgttcgtttgtcctttcttgttactggggaaaaaataaagcgaacctgatgatcttccgtgaatttcaggaagctgcctcctagacttggtagcctggcccgccctgatggctttccatttggcgaggaaaagggcctttgccttattctgagtattcccatgtcctacaagtgtctgtgtggcctgaccccagcatacctaactgacgttatatcagcaaacgatggctccacagttaagatggtttttaccttttgaaatttttggaagcctggtgaggtggctcatgcctgtaatccccagaactttgggaggcagtcaggaggctcgcttgaggccaggagtttgggaccaacctgggcaacaacatagcaagaccctgtcgctactaaaaattcaaaaattaaaaatgtaaataaaatggttggaaaaaaatgaaaataacattttgtgacacgtgaaagttatgtgaaattcacatctcagtgtccacaagtaaagttttattggagtaccaccacccatctgtttattgtctgtggttactcctgcgttgtaaagcagagttgagtagctgcagct

SEQ ID NO: 916412 - DNA, 4001 bp, Homo sapiens
atgccatgtgagacattgcccttaccacttaacctcatgtttctctcccttttattcacaataaccttttccccatgctccctattgtccttgcctctctgggtcatcctcttttgtccttagccttgtaccatttcaacccatgccaccttctttattatattacctgcccctccccattaccaccaagcacagaatccagatctcctcccactggcttcttctcccagccaccactcacatccctaactgttaaaccttcccaacgagggctagggcagcagggagaggaggactcacaggtcccagcttcctgggcaggatcagcacccgtcgagtcagaggaggcatcttctgcaatgggggaaacatgccagatgagagcaaggaccgaaccggacctactcgagccaccctcccctcccattcccaaagcttatctcctgggaatgctcatggatagaaggggatcaatttccctttgggttggacatgcccttccaccatatcagcgggtctactggggcactctctgatgtttaactcctgtggcttttgaaataacttcccctctgagaagtgtaatgtctcttggaacagtgccttcctcctgactggcccctggcttggtaggcttccctgaggtgtctgtcatggagctggccatggtcagaggggctcaacctcctctgtggtggaggaggacagtatgtgggggttatggggccatatttgagcgatttgcaggattgagaccccagccttgattccctttattctttcaacacaacatttatgcaaagctctgtgccaagagatggaggtgcagtgctgaagagggcagacaagacccctgccctgacagagcttacatctgtccttttacgaaattatttaatggctggtgtgacagtgctggaagggaacgtgcagcctggtgcgagaagggcacatggatctgatttgttccgcatgtgcatggaaggcctttttggggaattatatgtaaactgagattttctagatgaaaaatcattggccaggtgacattagagttggttgggggaaggggccagggagagggaaagcattctagacgaggaaaggacaagaaggaagatcctgatgttcaaggaacagcaggatcatcatggcccaaatagtgcttctgtggatcaaaaaaggcatcccagcagggcacggtggctcacgcctgtaattccaacactttgggaggccaaggcagtcggatcacctgaggtcaggagttcgagaccaacctggccaacatggtgaaacaccgtctctactaaaaatacaaaattagctgggcaaggtggcatgagcctgtagtcccagctacccaggaggctgaggcaagataatcgctggaacccaggaggtggatgttgcagtgagcagagatcgtgccactgcactccagcctgggcaacagagggagactcggtctcaaaaaaaaaaaaaaaaaaaaggcatcccttcctcctaagagacacagccaggggccaggctcactgcttggcaagtagagtgtcggccagattttagcttctaccactccttgcctgggcaccctcgtgtaggggacaccctgctcaactacatgcaggggacaccagagaagccagtgtagctgaggcatagtgggtaaacaatggtgtgtgaggagatgagctgggagggcaggcagaggccagagagttctgggttcctctggccagtggggtgcagaggccacgtgtggagaactgggagaggagtcacttgcagaggcagggaaaccagaatagcactgagagaggaggagaggggtgaaggcaggagtgaggggctccttggactgggaggactcttgtggggcgcagaggaaaggccatactcaccagcatagaccagggcccctgctacagctgccaagaagaggagagtggtaaatttcattctttgggatgaggagtgagtataaccacagaatctgcagaaggtctggggaataaggatgctgaaattgctgggcccttttaaggatatcaagggccaatgggaaccaagcctggagaggtgtgacttccgcatcctcctccccttcttccccaaactgtcacctgctaagtcaacaagggctaggttgggctggctgatacctgggatccttgcaggcaggtcctggataggagcctttctctaactcccagccatcccttttctttctccctcctcccttccccaccacacctgccctctgggttcacacccctgggctctcagggacggtaggtagagcacatttcacttggggagattctgggatgtgtctgttgagggttctggtagagaaatcttaatcttgtcatctctccaggaggaggttgagggctcaggggattacattgtccaccttctgtcccagtctacataggactcagtgcagggtttgaaggtttccccaaactaagtgagcccgtttccttgggagaccacacctagaacacttgaggcctgagttcctggctgctttctccccatgaggggatgggtttgaaggcgtgtgtgccttctctggagttgttctctgttcttgacattatccagcccctaaaaagaactcctccaggctcacataggcctgtcaatctctgtcttcaggcctactcaatgggaccccacatttctgagagaatctcctggtcaaagcatgatggtggttcactgaaattggagcttggttctgacttcaagtggggagctgacccatggtgtgaataatccagaaaagcagattattctaaagaagcttctctttgacttggcgtttcttcctttcctgatctgggactctagaggtctggattttgagttctggctttgtcatatgaaaatgttaggatttgaaaagtgataggatttttatttgttgtctaggagttgtggctcctatgtacagcatagtggtggagattaagtgggataatatacggcaaagcatttttttagacagcgaagttctatggagttgtgtggggttcttgtaccatctttccaagtaggtttttgtccaggctggtgctaaatgctagatattaatagaacgggccgtggagcaggagtcagttgaggggctgaagggtggagaataaggtgctggatgtcaatttgtgactttccccttgcttggtgttggcattcacccagccccatgtgggctgattccggaggcttctctgcctcatggtagctctgaagatgagtgtgagaagggggtattgaagagttttcaacatgagggtgttttgggtgccagggtttagaacattaatcttttcaggagataaaggaagataaaattaatggggtgggacattaaagccttggcaattgctacctgcctgagggtctgggcctgggagccttgaaggtggtggtggccttacctggaatggggaaggctgaagaacaagagaaagttttgatggcaccagtgccctgggtatgtgcacatacgtgtgtgcacgtgtgtgtacactgcagaaggagaagtcctgcagatcccaaacagatctagatcccgagcagtctccatgagcacattaaaaaagtcaacaggagcaaattatgctatttgcacaagacttttctaagaggaaatgagaactttggcgtcaacactagaactgtcacagagcagggtctttccaaatgtcaccgcatagccctttcctctcccaaatcttcctcctggcctcagtaattaaagaggcaagcatttacataaatagggatgaggtgaaagtaaggacatttgttttatagaaaattttcattattctataacagggcccagagaaatgttaccccaaattatagagcctgggaaagaattgggtgcatagattaaagaggcagacctcatggatatgggtgagaggctgctctgtgcaatgtcttgacggacctcatggatatgggtgaggggctgctct

SEQ ID NO: 916413 - DNA, 4001 bp, Homo sapiens
cacctggctttagacttgtcttctcctctcccacatcaccctctccccatctcagcttccagcacctggaggtgcataaagtggatccccaagactccccaggaccactttccccgtccctggcctggagtttacttggcatcagccacccttgccgttttcctggcctggaaccccgcgaagcccaccccctgagctacagatatctgaaatgaatcactttagccccatgctctccccccctccccctccctctgggcactcccgcgtgggtgggagaaggggagctcgggggtgacacaatctctccacagggccccccatacacgtgcttcgggggcaccttccactccagcaggccgcccacccccttcctctactcttctgggagctctccgacagggcctagggcgcagcctctgccccagcccttcctgcgtcccgggaggcaggggatggggacccacctcccagcccttctcccatcgtcccgccccacatactcgaggcctggcccaggcgcagacggaggcggcaggagagggcgcggtccctgaggtgcaccgcggcgcggtactcgccggcgtccgcgcgccgggctgggcgcagccatagcgagaagtccccgcgctgccggccgcgctcatccagctggacgcggggctgcaggggcagcctcccgctgcgcaggcctccgggacccacgctcagcaccgtgtagcggcggggcctgggcccccaggaggagggcgccgccgggtgagggccgggggccaggggatggccgggggcggcagcgggcgggccactgggcgggaaagagaatggagttgagaagctccaggggtaggaagcccgggaggatgcaggcagccacccgttgaggatgagaaagcccgccccaagagttctcttgaccaccaaccgtcccctcacgcccgacccctctgttggactggccgcatccacttctggagagaagggatgctggcgtgagggtcgctgattgcagagcaagggcaggaacggtgcaagcgagggcagggagactgggtcactggcttcagagggagtgacacctcagggcaggggacagaggaccggcacgggtgtggggttgagtgctggattcggaggtcctgttgcccaagtttggggtgcatacctgtctggctgatgctgccaagtgacccctgctcttcgcagaaggctgagatcctggagggggattgtggggctgcaggggagctgggcaggagccccctcctgggcccacaccaccgggacctcagcccctggctggagaggcttcactaggtgagcaaaagagaggccaaggggagggggcgtgagccgagaggcaggggtagagaaggagcctgggtgtttcccgagggagaaacagggtgcaggaagaacttgggtttctgtttcttctctgcccagagaggctttcggggtggaaggactgcccaaaaaagggattagaagaatccacagagctaaggacctcaggacctttgtggccacagagatccctgctggtcccctcctgtggggctggaggtcaaccctcccgccatccccgttttacctggagccacccaaagcggctgcagaaacagcaagcccaggaactgagcctcccacatctctcctatggtctgggcagcgctgagccctccaaaaggaggtcagaaaaggaaagggggcagtggtggggggtggggggtaaaggagaagttctgcagagagggaggtggaggaaggggttctagaagaagggagaccaggagagggccttggagagagggtggggagggatgaccagaggccggaatccagaggaaagctggaaagctgggcagatcaggcagcctgaggaggtgggggcgggggtgtcccagggaacagagcagggccgtggcggagagcagacagagcaaagtggccgtcgtggctgggatgccgttctgctggtctctgggccttcacccctgtgcccggccttccctccaccttccccacttcccctcctcccggcccgccccccgcaccccagggcttacggtttcgcttcgcagtggaaagtctgagggggttgattcccagcagcagcaccctccacctctccacctctgtggtggcgctccccttgtttacttcctcagtcctgggtctccccacctccccctcctcgcccctgccccaccctccagactgctccctctcccagggaccttctgcctccacgaaccatttctgcctggaactgcccccttgcccatctctaagctgcctcctcagtcccaatattcacacctccttcttggcaagctctttccttgttgctcaatctccttcctcgttcccttaacctcccagaacttcgtgacccctttagacctgcctttccacccatcagtacaatgtccctgggaacatggtggacaggaagccttactgcaccccaaaaaatggtaggtctgaggctaggcatgccagctttgtggggcatggagaataactacattgtattgaggcttcattacgtgctaagcactgtattggacactttacttatagtaattcatgaaatctaatgcttttccccattgtacagatgaggaaactgagcttcaaagaaattgtacaatttgccaaggttagggagcgtgaagataaaagctgtgagtgtacctgtgtgcgtgacagtgtgtagtcctgaccttggatgagttacgggcgtctcctgggagaaatgatgctgttgatgagtcaacacccctccccactccaactcaggtccccatgccctcagaagcatcctccagtccagaggttccgaactaagaggagaaggcaagggccatgcggagatggagaaatgcagaaatcttagaaatctcctaacagagatcaaactcaggggaaacagaggcagtgggactagggaaggcccaagactgacaagagtcatacaactcccgctccccagcccagcccagggagagttggagggcaggtgacgaaacatacagccgacctggggatgacacgagacccaggatttccctgcttgactggaaggagctcgcttccatgccaggcagagggcatctctgatgccaggcagctcactccagatcctagcaggctgagacccaggactaccagccctctcccagctcaggggaaggacttcctgtttctgggctgtttctctgtgcctggttcagcacaatagagctggtagctttccactgggctcagcagtgtctaggtcttgtgtgggttagcagggaagtgtgtattgctggggaggagcatccctgagaatccaaaacaggacataagtcagctctcagaagagctgggctccaggccacccctggagggctgatcttgtcttcttgagtcgtgggtggtaggagtgtgctgctgcttttgtatcaaagggaagggtcctggcagaatgggaggtcagccaccctcctccctctctacccttttgtcgcactgactggagcccccgggaaagcaggagacaggttaaaaacagaagcgcgaccatttctttattaaattatacaaaaagggaggggaggggggcagctgtggggctcggccccaaccccggccccaccccggcctggcgctgtctgagaagaggggatctgagggagatccagggatcaggcaggatagggatggggcaggacatgaggctgggggatgcagaggttaggtgggagaggctaccggaggaagaatgaggctggtaggggagggagaaagagagcaaagagagagaggagcaattgggggccagctggagagctcagatggagcaggtcaggaggtggaacaatggcagagtgagggtggagggcgcagtgtctggagaggcggaaatgagaaggctggggagaaagaagagggtggcagctctggtgcagggcccagagcagggagccaggtgaagagtggctggacttggc

SEQ ID NO: 916414 - DNA, 4001 bp, Homo sapiens
ttagctgactgaatctttacattcattcccaggagggctgaagtggaagagcgtggacgagaattacagaaagacattcctggcctgatgtcaagcgacacaagccatcaagtggaatacagtccataaaaaatatccaagaaaattgtagggttaaaaaagagatgcaatgttaccaacagcttgctttagggcatagaactaaacaagtggaattagatgtccaagtctaagtgaaaggaggcctgggtctgagccctccattaggcaaccccttattaggaaaattgctaccaaggagcggagcgagagaggcttaataacagaaacctgagtctctaggtaagctttgtttcagacactgtattctagattaaatgaccaagagatagggtaagaggaaaggggtgctgggctaatggggtaaggagaaggaggatggggaaatagaaaatagaataaggattcaccagtagtcaattcctttaatatccaggatcttcttggcacacattatgtcatcagtaatgtcatcatccaggaactctggcaggagttacagggaaaggattgagacagctgacaagtattacccagaaaggcactgagttcccctaacccctggatccagtgggttctctaaactcaaggcttgtgcctgttgtctttctatatgaaaggaccaatgtggtaatgtctaaccctgggtagggacttccttcatttccctgggatatctctggaggaatcatcagcttcatcaactgacttaccctgaaaatgcagacaatcagattccaagactctcagacagctccgattgtctaccactgaacctcaaggaactgtctggggatttgatgaccatgaaaaatccaaacagcttcttactcagtactgccaattcaagtcccacaatttttatagagcccagccaaggcaatgaagcctgaggtctgcttggcactaaaaaggagattatcccaagggcaggcctcagaaaaacagagaaagagggttataggggctactcactgtcacaggagatgtcacagatgttccttgactgagggacctggctgctcttgcaccaaagcttattactgatctggaagagtccatattccgtgctttcattgttttcaactatggcttgtgtgtcataaccactggtgtgaaacatggtacagatcactgagggaaagatgagaaagagataccacagagatgtacaggatctgcataaaggaggaactgtaattctcagacaaaaatgctttccagccaatctccaaagatggcaaagctcagagtttcttgatgagatggagaattccaaaaaaaaatcagacaataagagaaagaaaggataggaaaataaatggggccaggcatgatggctcacgcttgtaatcccaacactttgggaggctgaggagggcggatcacctgaggtcagaagtttgagaccagcctggccaacatggtgaaaccctgtctctacaaaaaatacaaaattagccaggcatggtggtgggtgcctgtaattccagctacttgggaggctgaggcaggagaatcacttgaaccgaggaggcggaggttgcagtgagccgagattacaccattgcactccagtctgggcaacaagagcgaaactccacctcaaaaataaataaatacatacatatatacatacatgaaataaaagagtatgcaaatgagcagaaaagaggatgattagataattaagtaaaagtggaggggcgaagtggaagaaagaggggatggaggagagaagcgtatgaggaatggatgaaacacagaggcagggaactcacattcaggcaaagcgatgcctccataaccatctatgtctttcagcagctgggacagctcacattttgtgaattgcttggccaggatggcagggaacaggatgcccaccaggaacagagggacaaagaacctcattttggctacccccaagaacctgaaatggaagcatcactcagtttcatttatttatattcatgcagaaagcctcaggggctctggtaccaagccctacatctaggaagagaatgaagagagactggtcatgccaagacagaaacgctgagcctgccagcttccttccataattcaccctacttttcctttccctctcccagtatctagtccatagcaggtattgttctctggccagaaagagttcaaaccatgatcctgcttcccatttggctttgtttagccctttgtttcttgtagggttggttctgggaagcactgtctctggttacttgaggaacaaagaagggcatgggggcaatataagaagtgaggcaatcagaaaatacaataaagttctataccgagcttcccccttcccccctagagacatgcagaatgtggagagggggtgtatgtcatcacatgccacagtcccaggatcagagctggcacttgtccaaccaatccagccatgtaacaaggcccagaattagttctttaatatggtagctcatgactgaaggctcagaaataggaatagaatatgggaacgtagactacaacaatccgatataacttggatcttaagacttcctacttaaggaaaatgcataattgaaaagcctgtatgaaagcatctaggccaggcacagtggctcacacctgtaatcccggcattttgggaggccgagtctggtggatcacttgagcccaggagctcgagaccagcctgggcaacatggtaaaatcccatctctacaaaaaaaattagctgggcatggtgacatgtgcctgtagtcccagctacttgaggggctgaggcaggaggaacacttgagcacaggaggtcgaggctgcagtgagccatgttcactccactgcactccatccatcctgggagacaaagtgagaccctatctttaaaaaaaaaaaaaaaaaaaaagaatctagctatcctacgagctattatcagattccccacccctaaccactcctaccgtaaataaccaaatactacactggcattgagacattacataaatctaagaccaataacttgtagacaacctcagagttggccacagaaagtgggaaggacccaagccagtggaaagattggactttaaggctgaacaagcttatgtctggaatctctataaggtcagtgcccctgagcaagtagagttgaggatactagttctgaatagctcctttaatttgctggcatgaagcttcatgtcatggtgacaagtagctcttagctccttcatgccaccattcgtcttctttgtcctcatctctaaacctgatttcttcttcttcttccttttttttttttttttttgaccaagtctcactctgttgcccaggctggaatgcagtggcgcgatcttggctcactgcaacctctgcctcccaggctcaagtgattctcctgcctcagcctcccgagtagctgggactacaggcacgtgttaccatgcccggttaatttatgtatttttagtagagacggagtttctgcatgttggccaggctggtctcaaacttctgagctcaggcaatttgcctgcctgggcctcggcctcccaaagtgctaggattacagacaggagccgctgcgctgtttcttatgtttcagggaacatttatcccaaccaatctatttaagacttacatactgaaggtcttccatatcgttatctcctacatgtattcagagtcagggaaaagtcctctcagttaaatcctgtcttctgtaccatggataaccagtatatgaagtggcatgagtgaagggaatgtggaggatcttggtgtgccagaagggatgagcagaaagttctgatagcaagagatacatgttcagaaacacaacagaagtggagccactccatttctccgcattccacccagaggcactgcaagggtacacgacaggaatgggaattctatcactctaagctttgttgagaatatggctgaga

SEQ ID NO: 916415 - DNA, 4001 bp, Homo sapiens
ggagtcggacaggcctgaattgctaacatcccgtccatgatttgacatcagcatgacctggatctaaatcccagttaaactactttacttttactaagtaaagttactttaacctctggggctcggttttgtcatctgtaaaacatattaagtatcgctttagagacaggagaagacctagtttaaacaataaatggagctgttattaaaacttacattttaataaagccaaaggaatcaatttggaagtcaaaagtatattgtggagttcctgtcaatataaacttcacaatctttcttctgcccagcaaaacacacacttaaaacctgtggtatttacatagcataacattccttaaaaaaactggctggcactggcttaaaatcttatctgatttcttattctgcctaaggaaaacaacaatgaggacagaaaacagtaaacagaatgagttcagtaattttaagtcttttcatgatttccccggaatgttccaatgaatgtttattatgaatgttagatacactctaatgtagcagtcttttaaaaaactaatttaaagatatcaagcttatcggcgacacaatatcagttagtttaaagagaaaaaaaaaccgtaaaatcatttatttactttatgctggaatattacggagtaagattttcccacaacccggaaaaaaaaatctgccataggctggccccggctcctagattcattatacaacccgtaaattccttccctcattgaaaagattcttcttatgggcatagttaacaaatgccaagttgcgaagttgcagctttgctggtttgacgttttcacaatgtaagaacaatatgatctggaatctactcaaagcattagccaggcagtcagctgacgctcactgcacacaagaggacagaattaagggaaattaaatttcgtatttctgtaaggcaggtatccaactctatcttgaaaactaaaataggccaacagcagacgttctagtttaagtaataaaagtgtctcattgttcaaataacattacaaaaaacggcttttcccggaataagtttccctcattcttggaattttccttgtaaagggcttttaatcggttcatagaaccaacccttcatcacgcagctgctgcttgagtaacttttacaaaaggtcaaagcggtgcctttcaaggcttccaaaccctactggcttctcctcgattcaaagtaactcgctttcacccacagaacgttccagagacctagggacggggcccgggcagaatttggtggaagttgctcaaaagaacttttcaattttcttttcaaaatacttaccgcatttcacctttctccatccgtggccccacatgttgctcgcctccctcccagaggggccccgcgaggccgcgctcggcccccggaacgcgcccacctgattaccctctcctccctcagactccgccccccaaccccccaatgctgcctcctttaggaggtccatatgggacactttccccttcctctgaacctcaccgccacaccagaacagccctccgtttttctccttcaattcttctccactacgggcctcacctcccatagcttcctagagtgttgtgagcgcgcagagggaagctgcaggcctgctcggcccaggtgctgtgtcagcctatctgccggttccgcggcgtgtacggcccggaaagtcacatggcggtgggaccggccggcgcctctacactcctgctctcctaagagcaggacgagactagcataatgcactcacctccacgaaaagcaacatgtcgtcctctgctcagcccaatcgttcccgccgccgcaactccaactggctcacaggcccgcgccccaattgctaggataaggacacacactcgccttgcccctccacccggcagtggacccggctcctcccctgccgtcagccgctgcggcctgacccgcccagtcccacctcccttgaaacaacaactgcttccgggtctagggaaaaattgtttccgggagaaaagagagccctcggcgcgctcaacttttgcactatcttttccagcagcagtgtgggatgtactatcatctgtcggggggaacgattagaaggagacgccattctgtggcacggggatgtgtaaaaatcgtaatgacacattttatcacttgtcagatagctacacagcactgataattccgcagttttcatagttcacaatctagatttgatttttaaagccgaccttggcgaagtgtactgaacaaaccaaccctgccgaaaagtggtggctcacagaagaaaagtagacaagaaaaaaaaaacaaaaaactatgatactagcaaatatgttaatagcagctaatgtatattaaatgcttacattgtgtttggcactatactaagcattttatgttaattgatcttaaaacaattctatgcaataaacactattattatcatccccattttacagttgaagaagccctctaggaggtcgggtttccctttaaagaactttgccccaggctcatttgaattaattacccatgtcaccgcttaatataccagtaataacacttaatctggacagtgtcttctttgacgttctgtcattaattcaaacgaaatacaataaaaacaaaatttttaaaattatctataatttttgttagatggtccaaattccttattgtctttagcaatatgtagtaggatagatcgctcccacttgtatgtcctagttcaaacactcatcttttgaaataatcatgtcttggctgggaagggtggctcacgcctataatcccagcaatttggaaagctgaggcgggcggatcacttgcggtcgggagttcaagaccagcctggccaacatggtaaaaccccatctctactaaaaatacaaaaattagccaagtgtggtggtgcacacctgtaatcccagctactcgggaggctgaggcaggcgaatcgcttaaacccaggaggtggagttaatagtgagccaacatcgcgccactgcactccagcctgggtgacagagtgagactctgtctcaaatatagtaataataatagtaacgaataaaaattggccggacaccgtggctcacgcctgtaattctagcactttgggaggccgaggcgggtggattgccttagctcaggagttcaagaccagcctgggcaacatggtgaaatgccatctctagtaaaatacaaaaaattagccaggcatggcagtgtgtgcctgtagtcccagctacgtgggaggctgaggcaggagaattgctagaacctgggaggcagaggttgcagtgagccaagatcacgccactgcactcaagcctgggtgacagagtgtgactctgtctctaaaaaataataataataaataaaaatgaaataatcatgtcttgatcttttccaatggatttttccattctattatttaaaaaatcttcccaaagtgaaggtttcattttcaccaaaccactgttacttgatttcaagactttgccattctgatctcatgaaatcctccttgctttgccgcaaatggaatctcctcagataccaaattaattccaccaccaaattgctgatatctgttatctcaggcccaccctaatgtggtcctcagtaaattcccgtgaagtcatctcagtgattaaaccaatctccttactttccccctaagatgcaaactcattagcactcaccgccaaagccatggctcaaggtgttgcccctacctggattgcctccatttgtcaatcaaccttctctctccataaggttttctcaaagattctgcttctacagatctcttcttcgtgtcccttattagcacttgattattatattctatcttaaatcttttcttttttgttttagtttcttcacaggaaccctatcatatattcttcagtttaggataatgtaagctgcatagtgtttcaacaaatgcttgtcgaattgaaagggaagcagg

SEQ ID NO: 916416 - DNA, 4001 bp, Homo sapiens
cttgtgccatcagataaccagatgtgttttctagataactgaaaaaaagagcaaaacttatcgaaataaacatcaattccatggcaatttatagtacactaaatatataccaccctgtcttcttgaacagagaatacagatggcaaataagccttttcttcacaattattacttataattgtagtagcccattgtaatgtccatgattttcacttgttttttactttttatgtcgcatctgaggtcaccatacctgtctcaaactgtaccagagcttcccagtctagtttttaattctaatctgcaatggactaagcaataagtctagtctattaactgtatacgtaaagtaagagttagcaggactcaaagttggaataaagcatctgaatttggagacaactgtgtaacaactattttatcttatagttttttttccaaaaaatatttcctcccatctgtaaggataaattaaaaggagattctttcgcctttacagatcacatttacagtttcctagtggacgttaaagagagaagatgcaatgttgtgcaagtgcctccacaaatagatgaccttaaaatgaaataaattcagacatggcctgcattttaaacaggctcagaagaaagaatgctgcatctctttttgaaggacgacacacatgaatagttgttctgcacttaagtttattgttgttagatggtctgtttacgaccgttttggtatacagggggcccaggaagcagtggaaaatgaaaatgaagaaacagtggctatataaatacagattcgttgttctgatagaccttttaatttagaaaacttcaggaagtacaatttaaaggctcgaaccagattttctttcagatatttctggagaaagtgcttttcttcaatttttccttaaaaagagttttaagaaatgagaagaaaatggtctgcatgatatacaggcctgtgccaacatcagagtgcaggctgtaaggaacaagaacgacaaacggtaaaaatctctgagtcttggtcccttatgtctcctcactgctgtggatataaatcattagaaataaaggagcgccttaatttcaggaacaaagatcttctttgcagaatctttctcaccgtaatcttttaaaaattcaggttttgcttttgaattcctcccctccccccattccccaggcccttactgcagcttgtactgctcgcggtgcgcacaaaccatcttttcctcagggcaccggcagcaaagaacagcagatcacgagggcatgcagaagctagagatctccccgagtaaggtctgtggggacaagtctaggacttccttactcggagcacccaaggctggtaaagtaaacgaagcccctaagcatccagaaaagaggccctgcaggaaagaactggcgcatggctcctggaaagaccgtcagagccgggtaaaaataagtgcagcgccaaacgtgctggtcatctaggtgcctttctcctcatcccagcgagtgcaagggcatttctctattaccgtggcaatatattcaaatattcgaggtaaagatcgtccagccttcataggccacctggttccgtccccctcccccagctactcgggcacgtgtcccgactcccgccagcaggccgtgggggtgatgtggccgccatgaacccaccaaggacaagtagggcctggttttagctgcaaatgcaacaagtctctccgctgagccgcagctgctaccctctgccttctgctcctccgccagggcacggccccccctgcgccccaaactgagcggcaaagtcagggcccgcggccggatgctcagagctaaaggccgcggaggacagatgtgcttcttcctccttcccgcgtctccccatacaagtactaccccgcacgtcccatcaggcttgcctgtgggccaggattcagggtcctgagccgaaacctaccaggagagagaaggctctggagacctctgtaacagtcgtgcggagaagacaaagtcagctgcgtgcgtctcctccggcgccggctctgcaaggagggaggagggggcggggccccacaaccaccgcagcctcttaggtttctccattgtgattggaaatccgagtaccgcctacccctcccctcggctcgctcaatccccttcaaggacaagggctcaagtatgcacactccctcccccaccctccagatgaggaggtctccttccagaggcttccgctctcagctggtctcacatctcgcaggctcttcaatgcggaggccaagttatttataaaacttgcccatccccgactcttctggactttaacgctcttgttctattagatttagtacaaatagaaataaatttctttccttcttttttttattttgagacggagtctcactctgtcgcccaggctggagtgcagtggcgcgatctcggctcactgcaagctccgcctcccgggctcacgacattctcctgcctcagcctcccgagtagctgggactacaggcgcccgccacctcgcccggctaattttttgtatttttagtagagaggggggtttcaccgtgttagccaggatggtctcgatctcctgacctcgtgatccgcccgcctcggcctcccaaagtgctgggattacaggcctgagccaccgcgcccggccagaaataaatttctatgttgcatttcagttaaactttaaaggacttaaaaaaatacatctgaatttagatcatctccgttttaaagttcatttgatgaaaatgactatttttttcaacctgtttcaacaaacacgcaatgattgcttactcgttgcctgacaagaccaatgaggctttgtccctgccatctgaagttcccctacaattccacctggtctcaaggtcaggctttgccctctaggggaaatgtgggaccactaagtgagatgcactttcttttttagtccctaatcgactccaaagctggatgttgtcattcattctgtcttcaacactcagccagtgcttggtacctaaatatagcattgatgaataaatgaatgaatgataaattggaggaattctgaagagtctggcttcagttctgttttcttataattaaaatgctttcaaatatagccatctcacaaacttcctgtatgtgaagtgtttttttttgtaaatgcatatttcttgtatatgaccactaattctataattattgcttcagtttattctcagtgccaagcattggtaaaaaacataaatataagattatgccctttgaggtgttcctagtccattggagacagacaagtaggcaacctatttcaattacaataagtggcaatagaaatttggttaaagtacaataaaaattcagagtaaagaatcactaagagaagggtttgttgagaagaattcataagcctcaaactctcctagcataaatcattcagctagtggggactttgactgaagatacagtccaattacaaattaaaatgtgatggtgaggaaaagagcttggaggataatctcaaaagtattacattaaccctaaatccaagtttgaagcaagaatagccaagtcagcctagcaagttatctagaaggtaccctagatttctttttcacttactttgcaagtcagatatttagactttacttctaaatatctttccacttattcctcttcttgccatccccattactgtgtaactttggagatgaggtaggaaaaaatgaaaagaggtatctatttccctcctctaccctcatttccattcctcgccacaaggtgttctaatctgattgaacaaagtgaatgctctagtatgtaactctaaatgccaggagagcatactacccctctcaaatagttgagaattgtataccctggcaagttatcttttatgtgtaaaacacaattttatatatacaatgatccagaaaatatatgccccataccattctattttgaaaaaaatcattgggaaactatatgcca

SEQ ID NO: 916417 - DNA, 4001 bp, Homo sapiens
cgaaataaacatcaattccatggcaatttatagtacactaaatatataccaccctgtcttcttgaacagagaatacagatggcaaataagccttttcttcacaattattacttataattgtagtagcccattgtaatgtccatgattttcacttgttttttactttttatgtcgcatctgaggtcaccatacctgtctcaaactgtaccagagcttcccagtctagtttttaattctaatctgcaatggactaagcaataagtctagtctattaactgtatacgtaaagtaagagttagcaggactcaaagttggaataaagcatctgaatttggagacaactgtgtaacaactattttatcttatagttttttttccaaaaaatatttcctcccatctgtaaggataaattaaaaggagattctttcgcctttacagatcacatttacagtttcctagtggacgttaaagagagaagatgcaatgttgtgcaagtgcctccacaaatagatgaccttaaaatgaaataaattcagacatggcctgcattttaaacaggctcagaagaaagaatgctgcatctctttttgaaggacgacacacatgaatagttgttctgcacttaagtttattgttgttagatggtctgtttacgaccgttttggtatacagggggcccaggaagcagtggaaaatgaaaatgaagaaacagtggctatataaatacagattcgttgttctgatagaccttttaatttagaaaacttcaggaagtacaatttaaaggctcgaaccagattttctttcagatatttctggagaaagtgcttttcttcaatttttccttaaaaagagttttaagaaatgagaagaaaatggtctgcatgatatacaggcctgtgccaacatcagagtgcaggctgtaaggaacaagaacgacaaacggtaaaaatctctgagtcttggtcccttatgtctcctcactgctgtggatataaatcattagaaataaaggagcgccttaatttcaggaacaaagatcttctttgcagaatctttctcaccgtaatcttttaaaaattcaggttttgcttttgaattcctcccctccccccattccccaggcccttactgcagcttgtactgctcgcggtgcgcacaaaccatcttttcctcagggcaccggcagcaaagaacagcagatcacgagggcatgcagaagctagagatctccccgagtaaggtctgtggggacaagtctaggacttccttactcggagcacccaaggctggtaaagtaaacgaagcccctaagcatccagaaaagaggccctgcaggaaagaactggcgcatggctcctggaaagaccgtcagagccgggtaaaaataagtgcagcgccaaacgtgctggtcatctaggtgcctttctcctcatcccagcgagtgcaagggcatttctctattaccgtggcaatatattcaaatattcgaggtaaagatcgtccagccttcataggccacctggttccgtccccctcccccagctactcgggcacgtgtcccgactcccgccagcaggccgtgggggtgatgtggccgccatgaacccaccaaggacaagtagggcctggttttagctgcaaatgcaacaagtctctccgctgagccgcagctgctaccctctgccttctgctcctccgccagggcacggccccccctgcgccccaaactgagcggcaaagtcagggcccgcggccggatgctcagagctaaaggccgcggaggacagatgtgcttcttcctccttcccgcgtctccccatacaagtactaccccgcacgtcccatcaggcttgcctgtgggccaggattcagggtcctgagccgaaacctaccaggagagagaaggctctggagacctctgtaacagtcgtgcggagaagacaaagtcagctgcgtgcgtctcctccggcgccggctctgcaaggagggaggagggggcggggccccacaaccaccgcagcctcttaggtttctccattgtgattggaaatccgagtaccgcctacccctcccctcggctcgctcaatccccttcaaggacaagggctcaagtatgcacactccctcccccaccctccagatgaggaggtctccttccagaggcttccgctctcagctggtctcacatctcgcaggctcttcaatgcggaggccaagttatttataaaacttgcccatccccgactcttctggactttaacgctcttgttctattagatttagtacaaatagaaataaatttctttccttcttttttttattttgagacggagtctcactctgtcgcccaggctggagtgcagtggcgcgatctcggctcactgcaagctccgcctcccgggctcacgacattctcctgcctcagcctcccgagtagctgggactacaggcgcccgccacctcgcccggctaattttttgtatttttagtagagaggggggtttcaccgtgttagccaggatggtctcgatctcctgacctcgtgatccgcccgcctcggcctcccaaagtgctgggattacaggcctgagccaccgcgcccggccagaaataaatttctatgttgcatttcagttaaactttaaaggacttaaaaaaatacatctgaatttagatcatctccgttttaaagttcatttgatgaaaatgactatttttttcaacctgtttcaacaaacacgcaatgattgcttactcgttgcctgacaagaccaatgaggctttgtccctgccatctgaagttcccctacaattccacctggtctcaaggtcaggctttgccctctaggggaaatgtgggaccactaagtgagatgcactttcttttttagtccctaatcgactccaaagctggatgttgtcattcattctgtcttcaacactcagccagtgcttggtacctaaatatagcattgatgaataaatgaatgaatgataaattggaggaattctgaagagtctggcttcagttctgttttcttataattaaaatgctttcaaatatagccatctcacaaacttcctgtatgtgaagtgtttttttttgtaaatgcatatttcttgtatatgaccactaattctataattattgcttcagtttattctcagtgccaagcattggtaaaaaacataaatataagattatgccctttgaggtgttcctagtccattggagacagacaagtaggcaacctatttcaattacaataagtggcaatagaaatttggttaaagtacaataaaaattcagagtaaagaatcactaagagaagggtttgttgagaagaattcataagcctcaaactctcctagcataaatcattcagctagtggggactttgactgaagatacagtccaattacaaattaaaatgtgatggtgaggaaaagagcttggaggataatctcaaaagtattacattaaccctaaatccaagtttgaagcaagaatagccaagtcagcctagcaagttatctagaaggtaccctagatttctttttcacttactttgcaagtcagatatttagactttacttctaaatatctttccacttattcctcttcttgccatccccattactgtgtaactttggagatgaggtaggaaaaaatgaaaagaggtatctatttccctcctctaccctcatttccattcctcgccacaaggtgttctaatctgattgaacaaagtgaatgctctagtatgtaactctaaatgccaggagagcatactacccctctcaaatagttgagaattgtataccctggcaagttatcttttatgtgtaaaacacaattttatatatacaatgatccagaaaatatatgccccataccattctattttgaaaaaaatcattgggaaactatatgccaacatattgaaaaataagcaaaattaggaatccaagaaaggggggaattatggcataaaaat

SEQ ID NO: 916418 - DNA, 4001 bp, Homo sapiens
acagttaatattataaaataattcgaatttcaagagctattacattgcctattagaatcacaactcaatttggaaaaacactacatttataatgtgccttatcctaatacttcaaatttgttaagtaactggcatctgcgcaaatagtctttcagggctaaaagagaattgtcacatatacaaatgagttttactaacaagcttataatattcttttaaaaattgttttgaatttcacaatacatcatgcagaaaacttttaaaaccagccatatgacatcatttcgataatggtgttctttaagaaagatgacacatgcacgcactgttgcgtttttgctgttaaaccatattcttgcaggtaagtcacttcatgtaaaacgctaagcgcggctaaagcggaccactaacaacattctctttgttaccttacccacaggatttaatacttactgctgagttctccatcctcagatactcctgtccctctcattcctaggtaagtcagtcccagtattaggaaaaataagcaggcagcagttaagagaaacatcgacaagtagtgggcactgaaactccctgttggggacacctcctcccgtttaaattgctggagaagttcctcttcgggttcggaaagcttcggtttgttgtatgtgtttttcaggtaggtatgattggagcccgtatgattggcgtgattgatcctgagtgaactagaggcggccaccgccgcactgggagggagactgttagaataaatcctgggggagtccacactgaaggccccaccgccaatatgattattggttttcagaagggagcctgttgacgaatccaaggttgagtccatgtcagtaagtggcgggggcaggagaggggtcagtttcttagcgttaacacggtatctaggaacggggctggagtccacttgatcacaccctcctccctgctccgcggccgccgcctcttcgaggtttcggctcctgtctagactcccggcagccgccgccctgtcattcatcgcgagtcctccccctccctgaactgaagtctccagcctgccgccggccgatttagcagtcagcggggggagaggcttactatgggttcgtctgggccgatgccgggaaagggagtcgtcctttaatacctgtctgctggaggccacgtcgtcgtcgtcctcttcctctgagtccgaatagttttcccggcagctgtaggggacaagccggctgccattcacggtccggctcgcccagagcggctcctcggtctccgggtccctctcctcaccgtcctctccctccccttcctcgtcctccactgctccatctttccccggcggggtctgcagctcggggcccgccggcctcctggccccccaccacgagtggggcttccttcgctctgcagagttgctgttagtcacctcgctggcggccaggggcgccggcggcgctttgagcccgcggtactggagcgaagcccggtctttcctcccgccgccgccggcctggtcccggggactggcctccacgtccgactcgtccgagctgaagcccagcagcactttgctgccagccgcgggggcggcggaggcgcccccgggccctcccaggaggctctctgggccagaggccgagattcggcacaggcccccaggagtccgtaagtaggagaggtcgcccgagaccggccggacccccatccccgcggccgccgccgccgctggtcccgcggctgcgaccgtggcggctgccgtgttattgttattactgttccgcgtcttgttgccgcggccccctgaccggtgctgttgctgctcttcctctcgaagcttcttcagcttcttgaggtagaccgggcgggtgctctccgtcactggtccgggagacaggccgtaacggcggagctgagagaaaagctcctcatccgagagctgctgaggcgccgaagctgctgccgccgccattttctctccagggtgttttacaagctccgcgctaccggaagtgacgcgccgccctagaccctgaactagaccgcgctgcgtcgccctcccagcgccgcgggcatctcggccaatgggaggcgcgggaggagctcacctgagcgggaaagagccacctgagcagcgcgcggctcccacggcggagactgtttctactctctcaccttgaggtgtcggcgcattctccccctgctctctatctcatctccagctgttctccgccctgcccttccaagtgccgttcccgggagctgtctcttactaaaccacaccttgacctcaccttcctaggttcctgccaccgggcagtaataactgaaatctaccttgaagtttatggcgtaagttttctttacatctggattcccaatgccgagggagcctagacctactgaaagaaattctgctggccagactagattggcagctttcccgtctgacttcaggttgtctattttcagttcgtctttagcttgacctaccaaaaaaaaaaaatttttaagtgactttctctcgctgctctttttgagaagcctcacctctctcattctgagaagatacggagtacaccaatcacaatacaattttcttctagcgtaatggctgttcattcattagttaattgtaagatattatctttttttccttttttgaaacctaatgactttactacgtcagcacttgaaagtgaaagagcttgtctgcttcattctaagactctcagagacataacacatgatcctatttatttccttcttagcacctttccaaccaatagttatttatcagttattaataaatatttgtttactttcaaaattatttattgtcctatccttttggactataataagctccatgtgtggaggaaccttgcttctgttactcacaatactagtagaagctcaataaatatttgttgaatgaattaaagaattgcaaagagaggatagtatgagatgaatattttgaaataagactagtgccaggtgaggtggagaaaccttcacacaaagtcaaaaaaacaaggacaagacctggaaccccaactctgccatttacagaataggaaatgaatcccagagaggtgaaatgtgccccatgtggtgaagatcttgtcccattttcccatttccccaaaccttggcagacagacaattctttagtacttcaatcctagtagctacaaaatactacaataattttttgttgttgaatgagttattttacctattacattaccctatacacctgtacagaaaaacgttagtcaaaagcataaatacggccgggcgcggtggctcacgcctgtaatcctagcactttgggaggcggggcggggggcgggggtcaggggacggatcacgaggtcaggagtttgagaccagcctggccaacatggtgaaaccccgtctctactaaaaatacaaaaaaattagccgggcgtggtggcaggcgcctgtaatctcagctactcgggaggctgaggcaggagaatcgcttgatcccggggaaggcagaggttgcaatgagccgagatcgcgccactgcactccagcctgggcaacaagagcgagactccgtctcaaaaaaaaaaaaaaaaaaaaaaaaaaaagcttttctgtggaggacacttccttgtcctctatcattgagactttaagatttataaatgttcctgaatctatgactgttatgcacttataagagagttttgaacagtaaactatagtggctatgatgatgatgacccagattttattgccataattatctgggtgggaactaaaattattataaacttagtggacttgtgtctccatgtagcagagtggttaagctgtgagctttggagttaaacaaaactagatatggacccagccctgtctcttactttgattcttggttcaacatttgctttatgccatactggctcctctgataggaatcatagagctctgttggctcagcctctgattttcatgaa

SEQ ID NO: 916419 - DNA, 4001 bp, Homo sapiens
caggccagtgtcataggctgcctgttggggaagggagcagtcagtcacctaagatccaggggttgccaaactgggaggtagagaggagaggggtgttggtctcatttggggcaaggactccatgtccctcttcaccgtggagaagaataagggtgggcctcagaatcataatgttagaacatcagatttcagtgatcatccaggaaggaaacgaagtcctagagaaggactcccagccagggtcgctgaggatcattaccccatctgtatgctcaagcagcacaacgcacagtttagtgaggcctgtgtatccagccaggaaaaggctggtggcaagacaggggtggtgctgggattctcacccagtgtgggggcgtctccaggtcccggaagctctggggccgaactcccgacattcgtctgtacttagccatgtcctcccgcatctgcaggtgcatggggtttgctacaaagaaggtgtgtgctgccgcagctgccagatccagcttcttcaactgaggaggcgaagggaggagggcatcagagccctgggacggggggcagacctctgccccctggccagcctccccaccctaccccagacacacactctgggtgccccagagcctcatggaagactggccaatcagaaccgcccaccgcccgaactgcagatcccctagaggccagaacgttgggactctcagaaggctggcaccgagggaaaggggatctaaagacgtcggagttgggtgggacatgggtctcaggacttcaggacctcaatttgggagaccaggtggaagtgatggcttaagtgaggtggggaagtgggggagacctcagcgaccagcaaaacccgcaggtctctaggaccctgagctgaggtgagtacaaccggcgccccgcttccccagccacgtaggcaactgctgcggtaccggcggctgcggcgtgctgtcccctccccgcccgcagaggtctggcctcggaggaccccaaccttgcctccgtctgctccttcctttccgaagctacctcctgccccaagcgaaggttcacactcaccaccacccccgacacacacacacacccacgcacacttcccgtccgagagccggtttcgcccccaccgcctccgcttcattcctaggaagaggcggccctgtccctccatcttcgatctgctcccgtcccacctcacgacctccccgccccattcccattctgctcgcactccccctcggctgctcctctgcgatctcaagaggtcctcgcggtcgcttagccagctcctacgcagaggcccgcggtacgctccccagccccgtgcggggcccgggcaacagcattccgcctactcctgggcaacgcaaagtaggacagcgtcgtggtgagggctgggaccctcggagctgcccggcccgctccccacctggtaataggccctctgcaggtagttgtagggctcccgacggcggaaggcgtcccggagcgcgctccccacgcgaagccgcgccgcgcccccggggcccagcctccgtgctgcgcactgggtcaggcagtctgcgcggcggagcgctgcacggagaagctgtcgctcccaggacccctgcgtgggtcccggcccggagtcgggctccggggccccgagaagcacggcggggagcgcggcgcccggatcggccgcgcagctcgccccgcaatccagccgcacccggcccagcgccgcctggctccgcagcgcctcccgcagcagcgccacggccggcgcccaagccccggccgcgtaggcgcgcagcccgtcagcgtagagcaagtcgggggcctgcgggggcgcccccggggacagctgggtcaggccggggggctcaggggaccccgggggaggcagcagcagcagtagcagcagcggccggaggagccggagcatgatgtcggagccgccggcagccgaggggaaatgcgggagccgagagggagggagaggaaaggggggaaggggagggagggggaggaaggagagatggagaggcggagggagagggagaaataatgagggaggccgagagagagagagagagagaagatggggctgagacccgatggtgggagaggcccatgtgaaaagatggagagagaagagtgctgagtggacaaagctggtctagtgtggaataagagggagaaactgggaggaggagggcaaaaggcgggaactggagcaggcctgggcatccatgaaggatgacttcagccccagcggtgacttcagcccctgaggtctgggggtaactactggggctgtgttccctccacacacacgcttctgggtccagaaaaaggagtgtggacgccgatccccccctcgcccccccccacccccccacactcatccacccctgcactcccacccccccacactcatccacccctgcactcccaccccccccacacactcatccacccctgcactcccccacacacacactcatccacccctgcactcccacccccgcccacacacacactcatccacccctgcactcctttggagaaagagctttaaaatgcagcaaggaggaggtgtccaggcccgggacactgcatcagccccaaaacctttcctgcccataaagtgagcccctgcatggatttgaggttagaaggagagttgggcactggggctggagccacgctctaaaaccacctcaacaaatctgaacagagatccttcataccccaaccaacgaagatgtgtgtcctcaagccccgcccccagcaggatatgctcctcccagccttccctgtgcgaggctgcctggtggagcatgtgatcatttctccatgtgtccttctgtgcctctgtctgctgcccctgctctgtcgtgtcccctgtgagccactccaccctccaagcccctttccaccgcagtacactggacactgaggtttccatggcaacacttcagactttaatacatattgctaggggtgatggaagctgagtagggcatctggtcacttggatgggagagagcagggccttctgagccccaaatctagcgcccgtctccccagagtctggaggcagctgccctactctcggccagaatgaggtgttactcactcaggctttctcctctgagttcagcaggcctgcttgggctcacagggtcagctggggaaagatggggttgcctgggccccaggatcctccccaagcccttgcactttcttcaccccccgtcagggagcagcgtctccctgcgcttagtcccaaaggaagtccaacggctctgctctcaggggacccaagggagagtcggcggggtgagaggcccagtggccggggccgacgaggagagtgccctggtgaggcagtcggagaaggcagaggtgtctcatcgatgaaggtggtgatctcctcccggaagaagccaggaccccgtgggggtcccccacctgaccccagaaccccactctccaagaattggcgaaggctggccagccccccaccttcagcctcttcctcgtcctcctcgtcctccaacctgtgtctttgtcccaggtactcaggaggacccccgagggcccggctctgggctgggaggacccggatgtcatcagaggatgaccacttgtgcaggaaggagcctggttcccgaggggtagagaagatgtttgtctcatcatgggacagacgccgggatagggggacctgggaagaggagcgggtaagacctgaaggtgctgcagggacagaggcagaggcaggaaccaagtggggactccggaagatggtgccaccttcttaaccttcaaaacgtttgctccggtgggcaaacctggccccacgaggtctgaagggatgcctctcttgctatagctttctttcacccagctctatggtgccctgaaagccagggctagggaagaggggattggggtgcctaacagacactggagaaaagtgatgagcggcaccaagggtaggagat

SEQ ID NO: 916420 - DNA, 4001 bp, Homo sapiens
agtgaaccgagatcatgccattgcactccagcctgggcgacacggtgagactcaaaaaaaaaaaaaattcataataaaaagtttaaaaacaaacacaaatgctttcatccctttctctcatttgatcctatttatctacatgaaaacagaaaaagcagccaattttatctctacaaattaaggataagtaatttttcaagtccatgaagctagtaataattatgataatgttcagatttgacaatgtagtttattatagtgttatgataaaagcatagagcatattatagatttggtgcaaaagcaattgtggtttttgccactgaaagccaaaagccgcaattacttttgcaccaacttataatactgttaggtaacatttagatgaaaataagttaacatttacttggcacttactagggatcaggacctgttctaggtactttacatgtatcaatttttaaagtcttcacaatcatgtgataaataggtaggttccattactcccattttacacataagaaaaccaaggaaagaggggttaattaattagtccaatcgcacagtgacgaactgggatttgaatcaggcaatctggctccagagtagacacttgacacgatacatatcttctcctagtaactaaggatctctgatttgaaacaaaacatttagaaaccaagtattatgtagggctattgccactacaacatactacctaatatagattcataacaagggttagacctcattttcctatgggtaagtcaactgatacatcacagggcaggtctatacagccacagatccctgccgtgtgcaaggcaaaaaatttctactatagccaggtgtgtggttaagaaagtacgagaacatacctatattctccctccctcatgttgctgtcataagttgtttctcataacatctttctagaaacattctcaagaagtgctaatttataggaattagtttaaggcgcaggcatttatgaaatataagatatctcggctcacatccccatagcagaacctgcaaatgatcttatttatgctaactctttgaccctgcccaagagctgattccggaatttctattgtagtttcgtttttacctttcatgaagattgtgtacaggacatagaagcgggggaaatgacgacccaagaaacgatggtatttcccattaatcgcttttgtcttggttaccacataagacatcaagttcttcacatctgcctttggagaaaggtgaagctttgaagacctacaaggaagatcaaagagactatctgggaatcagtcctagaagctccctcacgccttgagtccctaatgtaaagcaggagtctcggagattgtatcccaaggcttgacacttctgaaatccaaggaaggtcttggggtcaagaagagataggcaatcagactgtgaaacacaaatcaggcaaaggccaggcaggaaagtaactcagggtatgcctctggagagagcgcaatgcctgtgggacaatttgaactgcaggctaagtcagaaagaggtggaatcgagatagcagcggtaaaacctgagccgaaaaagtgaggctgaaagatgagctcaggacacgcggggaaaccagacaatatggggcactgagagtacagagggtcaggaagccgggtcactagtggggatcggagtttgaatcctgaacagaagaataaaaattccagggccaaggcgtggaactctgagaattaagagacagaatgcaagcaaggttgagacactgaaagagcctggacgtcaaaaatgcttttctcgctacaggtccctcaccgaggggccccccaagccaggccagagcgaccaagttgcagcctccgggtgacaaaatgtccaggggtgactgccgagccccacacagccgaccgagcccagcacaccctggagagcgccatcttcacagcgagagaagcgggagagaagaggttgtctttgggtcaaagttaaccgtacgtcgcgttcgttcgaagacgcatgcgtcttttctgagcgctgattggtagccatagcctgcttggctccagcacaagccaggagagggaaggactcaaagactaagtgcggaaggagggccaggattggacacagcagtacttccaggtttaaaggcgccggaaacagggtgtcccagagggagcgagttcttatgccactggtgtgggtttgcgacgcggagggcaccctgtccttgaggcgcccagtgaccctccgcgattccttagggcctcagggcttcccagcgccgcccttgccctctgcctggactcggggcgtcggagcctcgactgttaggtagcagatgtcagtttgccagtgcctggggctaggaggacccgcggcgccctctaatggtgccggcgtggataggccgggaactgtccactttccagtcagtctggcggcgaaggttggaggcctgggagcggcccctgtgcggactgagtacactttttcctctctttgtcgtttccagaactaagtttgtgggaaaatggttttcgttaagcacctaccgaagaccaagctctgtctcaacttaaatgttactattctgagaggatttctgtgaccaccctatctgaagcagtgccggcgaaaaggacacacttcacacttattctcatgttactctgttttgttttgttttgttgttttgtttttgtgacagttttgctctgtcgccccggctggagtgcagtggcgcgatcttggctcactgcagcctccgcctcccgggttcaagcgattctcctgcctcagcctcccgagtatctgggattacaggcgtccgccaccacgcccggctaatttttgtatttttagtagagacgggatctcactatgttggtcaggctggtcttcaactcctggcctcaagtgatccgccagccttggcctcccaaagtgctgggattacaggcgtgagccactgcacccggccttgtattttctttgtagcatctgtcacttacagtgtttatgtatttgtgtccttgtttgacagctccctgaactagaatgagggtaagcatcttctctgccttgttcattgctgcacctccaacactaggtgccttacttagcacatagtaggtgttcagtaaacatgtttgaatagattcatacttgaaactaagaaggattcccagaagtggtacttaactgcctccaagaattaacagtcctcttggatatatatgaatatttattcttcatggaaggtggtagagcatcccatgtgggttccctggatataggttcaatcttggcattgacgtttgttttagtgaatgttaccttggatatgtcactttagctctgagtttatttcccttataatagtacctactttataagaaatctttgaggatccaaagagaatacagctgtgaaagctcccacatctgtataatgctttatgggtcacagagctttatattagcacaggttattaatgactgtaccactcgtgcagtcagaggaaaagttttaaaagatggccctggatcttcacaagtgttgggtagatggggtggacgggatagaaagttgactaagacggctgggcgccgtggctcatgcctgtaatcccagcactttgggaggccgaagcgggctgattacccgaggtcaggagttcgagaccagcctggacaacatggtgaaacctcatctctactaagaatacaaaaattagccggatgtggtggtgggcgcctgtaatcccagctactcgggaggctgaggcaggagaatcgctttaacccaggaggcggaggttgaggtgagccaagatcgcaccactgcactccagcctgggcaacagagtgagactgtctcaaaaaaaaaaaaaaaaaaaaaaaagttgactaagacatggtcttcatattcaggtagtttttttttttgttttttttttttttggagacagagtctcactctgtcacccaggc

SEQ ID NO: 916421 - DNA, 4001 bp, Homo sapiens
ggtggggaaacagttttaacattctttcaggtaaaaaagaaaaagcagtcaaaatagctttatggtagaggaggaggcgacctgccatctaccaatcctaaaatctagcagaatggtacctttctttaaagacaatattaaagcaagtaaaagatgtttttttcttcctcactctgtctccagaaaaagaatcactacctagtggaaaatgttgtgcaagcctcttcatgtttcttccctccagaaaacaactaaacagatggaagaactggttcacaaacatcccaactctctcctgccaaggtacatcagagaagccgaaaactgggactgcatgggcttggggtgggctcgctgcaatgtcttgatctaaaacctaaatgtttcaccttgtggtaaggagcacctgtttcccagagtggcctagaacctggcctctctgctggaaggaatgaagccccagatgctttgcacgggggtggagagagtagtcgccttggtctccgagaatagggttcctcctgggtcaccgcgttcacccaactacctgttaccttcgggcctgggttttccacagaaaaaattacgcaatgagccgccgcctcagggctttggaagttgcagtggggagagaaggggtgggagaatcccccagggatgatagagagcttcaggtctccctttgggtgtcggtgccgctgtttaccagcccaacagccttcagcccacttcccctttcctccccgggggaagagatggttaaagattacacagcggccgcgggcacttcaaagggcggcgcgggcagccaaaggtaaagataacgttctggcagctctaatcggggtttgtggttgccacattttaatcacgccgttaaaaaagaaagaaaataaaaagaaaggagggagggaaggaaggaagaagggaggaaggaagggaggaaaagaggaaaaaaccccaaaaaggttacatcacgtcacagtgcaagggatgcagactaaaaaccctttggagctgggcaagttgtttctcctttggggaaactttctacagaccatcttttcgtggaatgcgactagacgcagagaggcggttggggcggggaccagatggcagcctgcctttgggtaccaggctctgggtcacaaatgtccactccgcacgcaaatgcctgcatttgcaggaattcgccctgcgatgtttctagcgctggactgggaagctgcggcgcagcagcgctttcccgggttgcactcgaagccatttctctgcgggtccagaaagtgccggcacgctactccccgagacacgtgcatttctctgggggccctaacaggcctggccaggatgcccttgacaaactcgcccccctcccccacgagcaggcgggcgccgaggagcctccagcctcgccttggacgaaccttccttcccctcttagtctctctcccggagtgacgtggggaagtacttacaggtaggaggtgaagacgctgaggttggaaggcagctccgagagccccaggtcggagcagtccaccctgagcaacatcctgccgtcgggctcgcaatgacagtgtgtggggcagcccctcagcaacacaccagacctgggagagctgcccccggtcgccagctgcagcagcacaggcaaggacaggagcacaccgagccgggaggtgtccatggtgcccgaagtagggggccacgagccggacgcgggcggagagcagcaccggactgctacgggccgtggcgcgccgggcgccgctccgtgggcttctgcaactcagcgggcgtctgcagcgccagacgccgcgttcctgaccccacggcgtgggcggcgaggagaagcgcggcggggacagaggtgccggttgccgccacgccggccttcggagcagccctggctgcagcggcgacagtggcggtgcgccttgctgctgctcgcggcctgagcggtgtggagcagcatctctgcttgcacgctcgttttttaaagcgctccagcccgaattgcgcgcccagtgacgtcagcgcagcctggcttcccaggcaccccccgcccggccccactttccctccacttgtcccctccctcctttcccaagtcctgggctgggaggcagcaggcagcaggcagcgcgcggtactggcgagttctcggcgctcccactgagcctccgcctggaagattcagtgctcaacgccgcgcgccggaataggggacccccccacccttaccccttcatgcgtgctggagacccagatctaagagtcgagagggacctgcttcggagagacctaaacagacgcacaaggactggaggatgcggcacgtttcctccgagcccgcttcaaataatggatgagatacttgaagtgattaaacagaataaaacaaaacaaaaacacaaaaactaaaatcctatgcagagaaatagttacgttatcagggtaaggaggcaggcgtccccggcgaatgataggtggcctttttgatccttacgtctgccgcactgtctggctcgcttttgccctaaaatcaaagctctaggctaatcgctaaacaaatacagctcctgagcgagcactccactgctgccttcctatctcttgcggggtgaggaagtcgaagtgactcatttgttttttaaaagtggtttagaataccctagaagtcacttttagtaaatcgatgccagagtgacagatggctgtttgctaacttccagggacttttcatcttaagtgtcccagcgctctctgaactgagagcagtcccacctatgtgagtgacactgggctctgagaaccgctgcagagcgccagggggaaaatgcatgctcttgcttcaaaaagtgtcctatagtgaatctgcaggaaaaaggaggaaaaggattcagggctttcttggagagaagccctcgttgaggtacaaatagccctcgccagacctgagtgagctgctgaaagaggtggtattccaagcctgccacaccaactcacaaaaatgcagttttcactctggggcacaatgcctcacagcatcatgaaggcaggataccctgttgattttccaagtcctttttaatcttcctgcatttagactgcccaacaaaatttcccaaataaacgtctaaattttagagttgggaagagctgtttctctgtgcagtgtatgtgccttccttcatgtccaaacctcgctgtttgttcacctaaaatatataatttcttgaccacaatctgtagtctgaacatcttcctttcttgggtgaaaaaacaaacaacaaacaaagcacttgacagtgctagtgccactgaaaattgtgagttaactccggtttccgcacaatcagtacagagagcccgcgtctctggacacccttttccttcacttttccctatgtataccacattcactgctactctgtgcttattctcacattattcttgcttcccttagccattctttccacatttaaagaatgcctaccttgtgtctttcttcctttttttaaacattttaaaaaaaatttcaatggcttttgggggtacaagtgggttttggttatatggatgaattatacagcggtgaattttgagattttagtgcactcatcacccaagtagtgtatgttgtacccaatatgtagtttttaatcccacacccttctcctaccctccctttttgggatctccaaaatccgttttaacactctgtatgcttatgcatattcatagcttagctcccacttatatgtgggaaaatatggtatttggttttccattcctgagttacttcacttagaataatggccttcagctcccttcaagttgctacaaaagactttattttattcctttttatggctgagtactcttccatgctgtatgtataccacattttctttatccacccactggttgatgggcacttacgttggttccacatctttacaattgtgaactgagatgcaataaaaatacgtgtg

SEQ ID NO: 916422 - DNA, 4001 bp, Homo sapiens
cctgcaaggccaggacaggaatctctcaaatccccgctttcccgcgttcctgatctcattccttttctttcttctttgagctcagggagaaagccagcctcccccgaaataggagatgggtgaggctcaggttgggggtggggtgggggaggacccaggactctagggaccccacatctactcacacccatgtctctaaacagggcgaatttgggtgacattgatgtagtgagggcattagaagccataagtcacttttggccttatccggcagcgtaattggccatatgcaccttatcaaaaatcattaggcactttgcaagcactgctacattaggggcatcgggcctccgggtccagggagttaacacgtgtaaaggagcggctgacattttctcccattcaaattctcagtgcggagtcgctggggccggcaggctgcctttctctgtggcgtgattcacgcccccattcctcagcgcggggaattcctgttcacaaagccggctctgggtgcccagaggaaacaggtagggctcagctgccccaaactccagtggcttccaggctggggaaactgaggcccagagaggtgatctgccctggccagccacagggcccacaggggtaggggggctggggaggtgccacagcccagtctagaccccagaggtcctgattctcagcctcgatttcgtttctacttttcaacatgggaggaaatgtttaaggggttgggaggtgggtgggggaggttctctcctcccatcaccaggggagaccttcctcgctgggccccctctggagctgagaagtttctgtttgggattgcggccgatgggctcacacattctgcctggagcgagaagccttcaggcgtctctaactcatgcaaaaatccttcctctctctcgggacggggcttgaagcttctgtcttggggttgcagctgcttggaaggggcggagaggagtggatagcaagtttgtcagggcttcctccctctgccccgccagcgctctgagccggcctcgagccaacgtgaggcagcgaagcagcgtccttcttcctccgcctgggctcgggacctttcctggaccaaggacaggaggagagcaaagtgctgcccgctccccatctaagcttgtgatccggggaggctgggatggggatgggggtatccccttccccagcgccccagtggagcgcgcgcagggtgggcgcgcaggcagcagagcggcgcggcctcttacctgaaaaagtcatttttgcagtagagcttgccctcgcgcgagaagcacttctccgagaggttggttttgcactcgcagcactgaacacatttgatgtgccacgcgcggtccagcacgttcagcagaaagcggtcgaggatgggccgctcgcaaccggcgcagtgcaccatcatagccccgcgccccggcggcttcggccgccttgccctccctttgggcccctggccctcgggcctgccgggccctccgctgcccttcgcctcttgtctcagcagctgcagggcgagtctggtccggaccaagactcagccggtccagtccttgggcaatctctggcctggcgctgggctgcccggagtggggtggtggggggcgggtggcgttcacaacctcatgccacgggccgcacgccccggcgcctgttccgggcttccccaggtatctcgggtggctgctggcctcggcgctgcggagcggctttccccggtggcggaggcgccggcactttcccccactttcaagcggtccggatcctcatctttgtctggtcgccgcgtaattcgcgcatccttattcagatttggtgacgtggcgctgcacgtagggggcccagcggccaatgggcgcaccgtggccatggcaacctcttaaatttatagcatatctaaattggctacagcgttgctgtccggacagagcaaaaaaaacaaggcatcagtattgttgagtattagcttgtacctggttcggaggctaagtaagtatttaccttccagtttggggctgacggggcgggggcagcgcgaaacgaaaattgcgtctctcttcctctctctttctcctcacaaatatttgggggtcacgggttccaaggcctagtccgggaggtacccctgcccccttcgccatccctggaacttgcagaagttgccccacgccccacacttcgctccccttctccagcccagccagcccagattggattcccccacccccgcgccccctctgcgccctgaagctgcgtcagcgcggttctcccggctcctggagccggccccggcttctttttgtcatacacggggctggggcccagccgggcctttctcatggagagagctagtggagaccgcgcggcctgggtagttttccccgcccggccgccgagcccaggcccaggcccagggtggggaggcgggggagcaggaggggtgccatttggcctggtcccgaactccagagtttcaggcctgagtgcgctgctcacggggctctgagggagatgtggacagggggagattcagggtggacgggtcttcccgcagacagctcggaggtggcactcaccacgtctctcctttcctcgctgcaccttccagattccaggtcagcctatggggcactgtggtgagtgggtcgtacggctgaggcgggggacaccagcgactatgagagcgctgtttgtattcacgccgtgcgggctgggtgtgcaagttcgtcccctcattgggcgcaggagaagcggcgcacgtatgttccgtgctcggcagggcgcccagagtgtgaggagagagagtgtgtgtgtgttaagggggaggggggatgttggcaggtgtgcgtgaggagggggtgtgtgggtctgagtaggagaagggaccaggcctcctttcccctggggccagcgtggccaccagggatcctagttggggaagccgggaatgggcaaccaggatttgcctttcgcttctggaaagggggctgagggagtagggcctgggaccaagggctggagctggaggggtttgtgccagcacttggctgtgaatgtttgtttgggtgtgtttcctgagcttgttagtgtatactcgctgtttgagaattccatttttgcatctgtttattgtgttagtaccatcaatcctgtgagtaaatttctgcgtgtgcgttttcgtgtgtgcagattcgtgtgtttgtaattgtgtatggtcctgctaatgtttgtgtttatcactgtgtgcacttttatttttgttggtctgtgcctatgtgtgtttgcttatttgaggatgcataaatgtgagggtgttttcatgtgtacgtgtgcattcacgtaagagtgtttgtgtctgtgtttgcaagcattgatgtgaaggtgtactttgaaaaatctgaatgtgtgtgtttgtgtgtaggtgagggcgtgcatgcttgagaccctgtgtgtatgagactgagctggcttggttgtgtttgtgagtgcagaattctgaagagctatgtttgtgtgccagtcgctgtgtgtgtgtgcctgcaaatgtgtgtatttgtgcaaacagtagttttttgtttatgcaactcctgtaggcttttgtgtgtgtgtgtgtatgtgtgtgtgagggggttatgtttgtatttgtgtttgtgtgtgtactcctagctgcgcttacctttgtggattcggaggttgagggagcaggatttgtggatgcctgtgttggggctcagggatgcccacttgtcccccttcctctcaggcctagcactgtcccccacagtatctaggggaggtgatcttgctagggacagggaattggtgagtgctggttacagagtggagcattgactcaccagccagcccgctggaaaaggaatccctaacccgggcagcttctgcttattggtgctgttacctgaccctctagcttgtcaggggacaggcatctacagagcatagtagtaacgctggttaga

SEQ ID NO: 916423 - DNA, 4001 bp, Homo sapiens
ctgttctcttcccagggactacctgataacaacacttcccagcccaatacagaacagtggaaacagatccaactatttactaaatgccacattaacaacagggtctaatcccattttccataggccatagaattggaggaagagagggtaagaaatatgaaagtgatacaaatacatagattgaagagaatcactcattattactcagaggtttttgtttttaaggaaaagcagaagagagaattaaaaaacaaaacaaaacacctatattccctatgctcctacagtaccctgggctgacctctagtatagaaatgacctcactaataccataaattgtatgtggatctgtctaacccatttgattttaagttcttttagggtaaagacgtttggcactttgaatctacagtaggactgacatgaaaggcactcaatattttgtccaaagaatgaaataagttcctaaactaattacctagtacattatatgttgttctatcaatgcaaaacaagaaaacatatatgaacacacacttttttttgccttctttcacgccaactctataattttttgaagatctatctaaaacgtgatcatcctgcacccaggttatacctctacaggaacttagaacatgttgttaggggtcatgttcttttgtgtctacatcatacctcagaagaaaggattggtgttatttcatggctcctgaaatatttagcatttgtgaatagtattggtaaccaagcagataaaaggtactgtgttaaaccatttaaatcaagagcaaaagaaagaatacttaatgcaaaagaaaacctctccccaaaatgggcattgccttaaaaactgataactccctaattacctttgactaacctgaaaagtcaagtcaattgaaccatctggattaggcagatctggattaggcagacttatcttttatttttatttatttatttatttttttgtagagacaagggtctcgctaagttgccttggctggtctcaaacacctgggctcaagcgatcctcccgcctcagtttcccaaagtgttgggattataggcgtgagccactgcgcccgtccaaggcagacttttgaaagctggaattaggtgcaagacaatagtagttcaaatatctctcaccaggatcagctaaaccgttcttgcaagcatcagtaaggaggctaggaagggtgccagatggttcgttcctagcagctacaacttcaagctttagtatgtgtagccaggggtgtacaattaccttacattaacaccaacatatgtcgggggcaagtgccagcgatatatacacgatagcgattcggggatgacacatcggctgcaaggactgctatattctcaacattcctcaaaagggtgtaagtgtcttaaacagagttcagctggcgtaatggaagggagaaaaaatcgaaaagagagggaatggctgaaaatgaaggaaaaagaacagttgaatattacagtatttccctggaaggagggtatttggagttttaatgaattgtcaccttcctccaccacaccagaaagtatacagttagaatgcagtgttctcggtgggagaggacggggtatttgcagctcccgcccttgggcagcaaaggctcagcccgacataagcactccccacccagcgcaggccccagaagtgaggaaagaacggaggatcagcgtccctcgaccccttatctcgagggggagggactcacactccttgcactccccccgccccaaaagtcgaaggagaaagagggtgtggagagaagccggggtcttcccgcactctccggttgtggagagagaaggcccttacctggctaaaagccgcctttcctctgcgctgctaccagccctgtcacaggtcccggcgctctacctagcgcacctgtcgcgaccaagctgctaacacctactgctcctgcggccccgccccggaccccgcccaccgccgcgggggcgcgcacgccagacagcctcccgtgcggcctcgggctgagcgtgcgcgccaccggctacgtgcccagcgctcgcgtctgctccagtcgctctggcggtgcggggcgctggcgacgggacagggtttttgctgcccggggcctagtctacctcggcacgcttttctctgaaggagacacgcacttgcacgacgtgggcctctgtgcagctctactttgtccttaactcctctgactcaacgttatcgcagtttgactctggagccactcaggtttttcctaagctcaactctagccagctaggttcctggtgctttgggggtaagttgtgtgcagggagggtgttttacaggaggctgtgtggtgtagtggaaaaagctgaattaagtacattaatcctgaaaacggtttgacaagggcagatgacgtccaagttctccaacagctgtttttactcctccattcagaataggagctgtgctaatggtttggagaccgtcaattggcctagcacttggccatcctgcccccaaattcttgtcccagttccgtgccagctgcatgatgccttttgatagtatccttctttcctgtacctcaagcatagtagggtttcagaccacaagttttctgaagcttttcggaattcatgcagcttgatgcgttattagtaggggctgctcgtgggaaaacgcttgtaattacacttcctcaagaagttaatgaaaatgtgtgagaagagagatttccaacaggtgatgaatatgccagccagttattcccttcttccttcaaatatccagcctagactgatttctggataggtattgtagaaataaaaatttcagacaaaacaaacttagattttgaatcggacaacagtcagaaccaaaagaggctcagacacccctgctctagctgcccaggcatcaaactttataggctgaacacgaaagtaaagaaatttgattggctacagctaagcgtttgccttatttgggtatggtcacatgggaggtccctaattatataaccacttggctggttgtctgtttgtgattggttgaaactccattcaaaatcaggtacaaggggccgggcgcggtggctcacacctgtaatcccagcactttgggaggctgaggcaggcggatcccctgaggttaggagttcgagaccagcctagccaacatggcgaagcaccgtctccactaaaaatacaaaaattagccggacgtggtggtaagtgcctgtaatcccagctactcgggaggctgaggcacgagaatgacttgaacccgggaagtggagattgcagtgagcagagatctcgccactgcactccagcctggatgagagaacgagactccatctcaaaaaaacaaaacaaacaaaaggtgcaaggaatacctctaaattttgggttgctttctgggtacaaaaacaactccaaactaatggcctgctacttattttgcattaacagtatcaagtatcaagactccagcaaaagtggcagacagcatgggaatgctaaagagcatacaatatcaatacaggatagtactccagaaaatacgttaccctgcatgtggcgttccctcaatagatgtctcccctccccccaattttttttagctctgtgctttagtggatacaaaaattacttgctttcccaaagcctccttttgaagatagagctagcattaggttgattgctaaattttcagggattttatgagccaggtcataagcacaaccattattagaaatcaaattatataagctacaattaaattatcttaaaaataaaagtaataggccaggcatgttgagtcacatttgtaatcccagtgctttgggaggctaaggcgggaagatggcttgaggctagaagtttgatgttgcagtgagctatgatcacaccactgcactccagcctgggcaacagagtgagaccctatttctaaaaaaaaatttttaaatataataaatattaaaaactcatca

SEQ ID NO: 916424 - DNA, 4001 bp, Homo sapiens
aattcttcttcccatttaaataaaacaaatttttaaattaaaaccataaaggggaaagaaggagttggcaggactaaaggtctaaaaacttgagagggaagagagttaagaaacgttataaaactgctttgtggttacatctcttgccaactggtttcactgttaaagtagagctaaagctcatgcacagagaagtgttgtagctttacacatcgtcaaaaactcgcacaacttcaaacatgacccgcaaacattcaagaacttttctaattctaagtagaaaagtgactggcactgcaagtcatgggaagggattgacaatatcacatctaatataactgaagactacaggatgagttattttttatctcagaaagaatgcttaatattattatattactttccaaacatagggacttgggccaaatatttagcttaaaaaaaatccagctttcccatctaggtggaatctagagtaacagatggttttgctccccatcaggtctgtttatttcattataacgactgttgtaacgaaccatccccatgtacaaagccagatatataggaaagtatgagaaaactggaaaaatttaccagctctgtggcctctggattgtgttataaatcaccagcatatgtaactcattttctagttaagtaattccctctggggacgaggtctgcaatccacatgaaggatcaaatttcattagcagttgtaggaaaacgcaaccctgtgcatttgcaagtcaaaactcccgaaagctatagctagtctggctatcttcattgattttgcctgagagaggattttagctgatagaaaacatttgttggaaggcacagatgaggaagttgagaagaagagaagggattcagctagcagagacaagtaagcctcagtcttaatgttaaactccggccttaacactcagtctgcagctgtgtccaagcagagagctattcagcagtaattccacccccaaagctacaaatgataaagaacacaggaagacaatttaaaagggcaagtgtacaaaaacacataatccaatcggtattaaactctcttcatttctagataccaatttgaatcccagtgtgaacctgatttaacatgaaattgtgtcagagactcacaaatcttagcatctatgtaaataatgcatttgagactattaacttatctaactggaatcaaaagacatactgaccacatattcgcctctactcaaaatagctagattggaaaaacagctttgtttagtgcttgaattggctttctcaagtttcaaacccgcccaattcttaccttagtttgagttggttcacctttctcaaacatcatcttaagcctgttcagcggaacattatatttctctattttgcccgaagcatctgtgttttcactgatttctgatttttctacttcatgcctggattctcctagacaattttccatttttttactttctgttgagtggtctttaagatcctcaccgtccttgatgtggggatatcgaccctgaacgagggcttcaggaggtgacctgagtctagatctggggtggatttgttcttcttggtcagctttggctccagaagcagcgtggcttgtcacttcagcaggaggatggtctgctctgtgcctaatctcagtgctgctgttccgtagagagtctgtgtgagactctgctcccagccctgggttctcccacttcttctttaacacagtcagggtcccctttctaaagtgctgggagagattttcggtgttctagaagaacaagaagtagatgccagttataacttgcctgctgaaacattcaaacatgttgttctttgtaaaatgaaagttaaaactccaagctgctcctggtccactgctgtttcagacagctgtgaacagttacagccttgccacatggagaaagcatccacccggcagagggagagggagaggggaagagagaaaaactcaggagctgaagcaggaagtgataaaacaggatggccttataaggacaaaatgagaagaaaggcaaacccagctctaatgatagttacatgcgaaacaagagatttttacccaaagattaatggggaaaaaaacaagaaagaaaaagcaaaatacaagtgcttgaaacactgtaactacacatcagcaaagttcatcattacctgccataaaataacatggtaaattctgctgggtttttttttcttcttttaaataagacaaagatgcaggatagttgcaggatagctgaaactataccattaattacggatagtggcagcaaggattgaaacaatttgtagaaccctggagaagtccccagactttccaagtatttgcataaatatttagttatatctgacataatttacatgcatatgagcagtcaaattttatttttcataagaatttaatcttttttttttccctgctcttctctacaagtttatctgtgtataaattctcacttatcagggccaggcacggtggctcacgcctgtaatcccagcactttgggaggccgaggccggcggatcacaaggtcaggagtttgagaccagccagaccaacatggagaaaccctgtctctaaaaaaaatacaaaaattaactgggtgcagtggtgcacacccatagtcccagctactctggaggctgaggcaggagaatcgcttgaacctgggaagtggaggttgcagtgagccaagactgcgccactacactccagcctgggtgacaaagtgagacgccatcccccaaccaaaaaaaaaaaaaaaattctcagttatcaagaaattcactgttttacagatcctctggttgtaaaatatgcaggcttcaaatgcaaataccactacttatcactcagatgatcaaaggacacacatttacatatctaagagagttcactttcactagggccaaaaatggaattaatttatacatgtaagacagactgaaaacaacctggaaattgtcactgttgttccataatagaggaaacacgcttgttgaaaattaaatgtcccggctgggcgcagtggctcatgcctgtaatcccagcactttgggaggccgaggcgggtggatcacctgaggtcaggagttcgtggccagcccggccaacaccgtgaaaccacgtctctactaaaaatacaaaaaatagctgggcgtggtggcacgcgcctgtagtcccagctactcaggaggctgaggcagaaaaatggcttgaacctgggaggcggaggttgcagtgagcccaaatcgcgccactgcactccagtccgggtgacagagtgagactctgtctcaaaaaaaaaaagaaaaattaaattaaattaaatgtcccgtactttgaaaggactgtactcctaaataaattgaacagcaccaccttcccaacaaactgcaaactccaataccttctctcctgtagtctgtgactcaccagtctttcaactaagaaagaaaggacaaacaacctaggaattaaacaggattagcagctattttgggaattaagtctctcaccctattactcttctgaatatactcttgaaagccacttcatcaagtagaaataaggcttgaaaagaaattatagaactgcttgattctagtgtttaaattttagcttacaaaatgatccattgggggaagaatgtatgcatcagagatataagaagcttaaaaagttttcttgctggaaaagaaggaattacagaacagctccagaagctggttctaccctaactgccagcagcactcttggctctgtaaggtctcgtgccacacaatggatgagtcatctaggtctctgacttcacctgcccttactgtaaccacacaggagccctgacaatcaaagtggcactttgccttggtaactggacactgtttttctcagatacctatcatgtgatcaaagtatacttattgacatgaaaagatgctcataggatacttttgaatgaagaaag

SEQ ID NO: 916425 - DNA, 4001 bp, Homo sapiens
ggtcctgtatacccctctcacagcctcacagcacctatcatacatttttatgatagctgacctcttattaatctctcctctactctgttttcttgcacataaagaccacatggaatggtttgtcaataagtttttaagcttattatttcctatgcttacttagcatagtgactgcctttcaaaataatatgagtggaagagtaagattttcttgcacaaaatgtgttaaatgtatacttaaattaagaatatatgagtatctgaagataatctctaatcaaatatatttttattttatttttgtaaattattcttcccaggagcatggaatcaagttgccctgaatctatgctctcccaaatagattttttttttttgagatggagtttcgctcttgttgcttaggctggagtgcagtggtgtgacctcagcccactgcaacatccgcctcctgggttcaagcgattcaactgtctcagcctcctgagtatctgggattacaggcatgcaccaccatgcccggctaattttttgtatttttattagagacggggtttctccatgttggtcaggcttgtctcgaactctcgacctcagatgatctgcctgccttggcctcccaaagtgctgggattacaggcgtgagccaccacactcggcccgaatagatttttattttatttatttatttttgagacagagtcttgctctgtcgcccaggctggagtgcagtgcactcagctcactgcaacctccacctcctgggatcaagcgattctcctgccacagcctcccgagcagctgggattacaggcatgcacccccacacccggctttttatatttttagtagagatggggtttcaccctgtgggctaggctggtctcgaactcctgacctcaggtgatccacctgcctcaccctcccaaagtgctgggattacaggcgtgagccactgtgcccagcctccaaatagattttaaaaaatcacttcagctctttgccttctgagcatctgctgagcaaaataattttccaatgaaggctcattatttggtcagctataagttgcagagctactcaactgaaattatgtgacctgcaaaaatggcaatctgtcctggcagctgttaccaaattcccagacactctacagcctagagttagagttgtttctaatttcaagcatctaatttagaacacatgcttccttggcaactggacatcagacttttcaacctaccttttccccttcctgatgggtgatgcagacctcaggacctgggggcacattctccttttgctccattttatgaattttgatttcgccaccactggctttcagctcattctacaaaataaaaataactgtaaaaatttttttaaagtcccatcattctgttctcttcatagcacatctattagataaacttggaatgttaaaaaattcttctaagaagcctcgggtcaaatcaaccccctaactctcacaagcaaaacccactgactagtgaaatgacaaaagcagctttgtggacacatacctcagagttaaatatctgtatgctagtgtaaaactggattgctcattagaatacagacacatcaacacaggcacacagaacaccccaagcatacaacattcttgtgattcactcttctagcagcagagcttgtggtaatgcaaagcttgtgagttttatcagaaaagaccattctggagcaggggaaaggagatgccaagtgccaataatagaaaatatactgaccatacatatataaatgcccggcctggaaagagagacagggatgatgtatacatataaaaactgaaattatatttaatgataccataaagaaacctttttggtgggactttcaaaaagcatgtttttccatatacaattcatatattgtactaaagacataatttattttacttctcaaaacagagcctcaacataaaagaacatgcattttattgtcataaggaataaggataattgcatttttttccttgcaaaggacactggggtgaatattacaattaactcatctattacatctaaaatcaacatagaacctgggtgcagtggctcacgcctgtaatcccagcactttgggaagctgaggcgggtggatcgcctgaggtcaggagttcaagaccagcctggcgaacatggtgaaatcctgtctctactaaaaatacaaaaaattagccacgtgtggtggtgcacacttgtaatcccagttacttgggaggctgaggcaggagaatcgcttgaatcagggaggcagaggttgcagtgagccgagatcacgccactgcactccagcctggggaacaagagtgaaactccatctcaaaataaaaaaataaaataaaataaaataaacatagaggtcgatgactatagacatttcccaccattagtctgctaataatgtagtaatctagtacttttctgttctctgtgaatctttaggcatgggaggaaacaatttatggccaccaggtcaatgaaaggaatgtgagtatgacttagtcacctagtgatggtattctagattacgacccacagcaccggaggtgcatctgtgaggaggagctggcagctagcactgcagaacattatatagcccaacaactcattcctgaccccatctcaaagccccacctccagaactgctgccagagagtatgtatgtgccttgttacaaccatattctgtaaggggcctgggaaattctttggggatgagacaaaatgtactttttacaagaattcccaaagagttttcaactcttaaaatctccagagcaggagaactgtaatgcagaaatggttaggagttaaaaaaaaaaagttactcaacaggtttccccacatagggagtcacctggtgggaatgtttacagcaggagggcactgagaagcagtaaaatctggtaacaagaggaagttcagcttcgcagatcccaatttgctgtatctcctgacctgccttctaagggaagtctaaatttgctcgcttttcacattcacggtgcataatcagcctgtgatactccactttgctaattgatttacacacatcatctcttcttaaaacataaagttgttaaaattacagttaaaaaaccaagatgaaattattcattgcccagagaattagtccaccaaatattattagagaatgtatacttaataatgtggggaagagaaggcttaactcccagaatactcattatggtttccaatatgcaccaatttcgatctgcctaagaacaaataaaattcaatattgttctttttgattttgttagacaattaggacatcaagagattaatggtttgtaatttgaaatcttagaacaaatgcttgaaggatacaaaaatatgtgtgtgtacatttgtatctatgtgtgtgtatacatatatatgtgaataaatggcatttgaaaggtaacttcctttttttttttttttttttgagatggagtctcaccctgtcacccaggctggagtacagtggtgtgatctcagctcactgtaacctccatctcctaggttcaagtgattctcctgcctcagcctccctagtagctgggattacaggtgtgtgccactacacctggctaattttttttttgtatttttagtagagacgggatttcaccatgttggccaggctggttctgaactcctgacttcaaatgacccacccacctcaggctcccaaagtgttgggattacggtgtgagctcctgcgcctggctataaggtaacttcaatttagcagttctgtagcatcagcttacccgttaagcacaggacaacgtaaaggggaaggaccctccattgtattttgaataccaatcttttttttttttcctggagacggagtcttgctgtgtcgcccaggctggagtgtagtggcgcaatcttgcctcactgcaacctctgcctcctgggttccagcgattctcctgcctcagcc

SEQ ID NO: 916426 - DNA, 4001 bp, Homo sapiens
aacattgaaatatttgtattattagtagtagtggtagtatataaaatgacccaggtatgcaatcttcttggagtttttgctcctaacatagtcacttgatttgggatgtttaacgactgtgattttgtaatgggacaatataagagctcattacattaaaacataaatacttgggaagctcatagtttctgatagcttgccatctgtttggttcttaccggcaatggatttatcctgcttagtgcagatgatgatattgtgggtaaaatcatggattatacaatggatttctgaggtctttaactactgttattaattttgccagcttacaaatcaacattttctaatataaaatcaattacattttatttttcaactcttaccctaagaaaggttgctatgggcaccacagaacatctgttctggcgccaacagattgcgttaaagtcacccacagtctctccaaattaaaaacctcaaactgagttcactggctttgttactgtactctcagcaggatgttcttttgccttgcccatcgttcagtttaatcctctagaaagaaaatttttagaggtacatcggactaaatcattttcttctgagtacaccatttccaaatggccgcccagggtcctaaatccggcggctgcggagagggactagagggtgtcctcctctgcagagccgtaggactcgagcgccttcatcactggacgctggagccaggaaggaaacccacacactcagggacaggtataaccccacaggggtgcaccagtgaggccccgatcgcagcggaggactccatccctgagcttgtgagggcgtcctggggaggaagcgaacactttccccgttcaagtcagagagcaggactcactgggtggcaggtcagaagttgaattttaacccgacctgcgctttgtccccgcgccttccgcagcctgggcgccgcggtggcaccgagctgggagaggacacgagaggctggcgcgggagaagccgagagttgctatcgaccgggagctgccggcggcgggagcagacgcgaccctcgccgctttcgatctcgaagccgcggagagccgatctcggctgctggggctcggctccccgcgctctgccttgccctttcggcagagggcagctccctgcctgctgcagccccgccactgtgcgcccggcagcccaggggtgcgcccagcccgccccccgagtggccgccgggactccagcagttggaccgaccctcgccctccggcgcctggacaaacttccttcctcccgggcccctgcgccaagcaagctgacaggcggctccctcgccggtctcctctgggctctggccgggcgagcttgctctctgcccctctccaaccccgagcccctggcgcctatagccgtccccgcgcagcggctccaacaaagccagaggaccggagacgacccggcgaggggctgggagtggcagcggggaccccagagccagaaggaggcgtcccctcggcggggcgagtacagtgggaaggggcagcgggaacgtagcggggagagaaaggggaagaaagtgttctgttctcggcgcgaacgccttcctggctcgtcctcgttccccttctcctcctgcctgagcgcgtcccatgtcccgttgggaattggcaggcggggaagggaggaggggagaggggacgcggtggcctggcgagcgagccgctcccttacctctgtccagggtgagcggctggaccactgtcaatgtcgccatgtctgccgtgggagccgaagtgacgctcggcttcagcatcagcaaccgctcgtagtgagaaaaaaaggaggagattgggggcgggggtggagagggaagacggaaaggagggggaggagggggaaggaaggaaggtggtggtggtggagaagaaagcttgggtgggttggtagccagatggagacgcaactgttccgcggcggcagatcttcagttgcggtgcggagctgagcaggtatccgagagcgactgcatcgccgggctctgggagggaaggctctgccctagaactttgctattccacccccaggagcgctgggtgggtgtagctggcgggttgcttcctttcaactttccactctaataaaatggtcagaatatacgtgtgtgcatgcgggtgcgtgtgtgtataaggggaagagagaggatggaaaggggatatggggaagggagtgggagatgagttttctcagattaagagaaattgccaatccaataatcccatcccctttagagagaaaatgcttccattatcagaaatgtttgggatgtaattacatttgcagttaatttctgttgaagtttttcggaatgttgacctataacggcatataaagataactgactaaaggccagcgttccatcagtagatgttcatttaggacctgagtatattgcctggagaaaaaaaaaaaaaaaggcaaacctcttaaaagtgcttcaaaataaaaaacgtgtaggtaagtttctatcgctaagtttttctttttcaagccactgttaatacattaccaattcagtaaatgtagcttagaaacaagtacagtgttcagattttctccgaattttttacataccacatcctgtaaacatgccccactccccctcacccacccagcaacaaaaactttgctcttaatgtccaaactgattttggttgtctatgactacgtttgaaaaatatgtacctagcacttttcatgttgatttctaaccagtggttcagagatgccacttatcgattgattaacatatatgccaggaattgagatagaagagttacattgccttgtgccacgccttgatttaggagttcaatttagtctccgacttcctgtagcctgtaatctagtgggagatggtgttattaaaaacctgactttagagtcagttgatcaggattaaattacgagagccttcaaatactggctgtgacctcttcgccccaataaaaaggctactttcactatcttgtcatagtagggattcatttcctgactacgaaatcaagaaacataaagaaaccttctataagctgaataggggtgactgtgggtgcaggattggaaatgacaaagctgcctccatcttgtttcctgtgacagagctgaattgtttgggctaacaataaactctaaaaggcagatactgttttatagcaaaatatttgcatataattgatgccattttcttctgattacagataggatttctgaaggtctttttcattttatagtctacaattgaattttaaaaaacaacatttcaccaatgtgggaaagccaaagatgattggccatatatagacttaacagaccctaagaacaaacctaaaatagtagttcgatatgtttatttttatttagtatttaagaaagaatgctgatcttgacatttgagtcttagtcatgtactcttcggaagtcacacaatctctcactgatcctgtttcctcctctgtcatacaatggaaataatatcattcaatgtcacagagatctgtcatatgaggaaactaattctaccttgcaatctcacagagttttatgagggtctaatggagtcatacatgtgactgtgctttgaaaacagtaaagaatatacaaatttatttatacaagcatacatcccctggaaccgtgtggtaagctctgtgctaggtgctaaccatgcaaagattaatgagatggccccctttctgcccagtcttgcttgggagacagtgagcaaaccataagcttctgtgcagtactctaagcactattaaaaggaagtgccctcggtggccagaggttgcaaaaacaactttggttttttaccgttattcacatgccctgaattaagcaacagaaagaagttgagatgagcgcaatgataccagagtgtgttacaagcttttgcacaaagttattaaacctcactcggtaactgaggataaaagaacatacaaatc

SEQ ID NO: 916427 - DNA, 4001 bp, Homo sapiens
agaatccgcttcagctcaggaattcaaggctgcaggaagctataatcacaccactgcactctagcctaggtgacagaggaaggagaccctgcctcaaaaaaaaaaaaaaaaaaagagaaagaaaaaggagaagcacactcacctttttcatcttttacctcacattgcattttctcttggcaatgtttgggtttgggtaccaccacagttgctatctcttgaacatctttcattaaaacatcaccgtctagtttgagaatacttttaagcctgctggcctcctttggggcattcttttttctcttttcagcacgcatctttcttttccacttactccgtaagcttttagccatgttttacctgaagttaacaaaaacacacattcaaaagcaaatctttaatataaaaaagaaaacaggcaaatccttagaaaaccaggccaacaggtatctctacaaaacaagtgaaaagtaaaactcttcaatctgttcactttttaggacttaacatgcaacttatatgaagatcaacatggtacatacacagtcactaaataacaagatatcaaatcaaacttgtggtcataagcaaactacaaatcaaaccaattctgaaagcaccttgcatgtcttttttctttttttttttttgagacagagtcttgttctgtgtcccaggctggagtgcagtggcgcgatctcagctcactgcaacctccacctctcaggttcacgccattctcctgcctcagcctcccgagcagctgggactacaggcgcccgccaccacgcctggctaattttttgtatttttagtagagacgggttttcaccgtgttagccaggatagtctcgatctcctgacattgtgatccgcccgcctcggcctcccaaagtgctgggattacaggcttgagccaccgcgcccggctgaatttctttacaaaatacagaaatttaatttccccagaatgcaacagcgtcatcaccttacatttatgcaacagcttacaaattacaaatgatttttataaacacttcacctcatcttcattatccatcctctcaagccaacttaacgactgtaaacttatctattcctactcttgttttctttccactcagttccgccctaaatcctccacaaggtgctcagtgtgatcttttaaaaaagcattcactgcctttcttcgagttctttaaagacctcctccctcatatatattcaagatctacaaggtcatttgtgatctgtcccctgcctccttcaactctatttcatttcattctccatccccatccccgcaggcaccaactacgtctgtaaagagtccaaactatctctacgtcagtgccttcatatttgctgtccctatgcctggcaactgctcttctcaaggcttgctccttcattcgctacctcagaaaggactcctctgacctccgtaagctcccttccctgcttattaagtgttacaacctgaaaccattgttttctgtcacgccccccgaccctctccccagactgtagactccacgaaggtagagggaaaggtcttgttcactgctgaatcgcacactttttgcatacttgttgaacgaaccactaacattttttgaacgccggcaatcacagtcattccgctcccttgtctacataactcaacccttgcgaggggctaggaaagcgggcggcaaacaaccttgagggccgaagttaacttcagcgggagtgaacgacaggggtgggctccactttatccagtgcactcggaagccggagggcccccaccaaaaagagcaaggggaaccctcgccctcaacaaggcctgcatctccggactggagctcaagtatagcccagcgagtgtcaagaaacgaaattctccaagggtggcggaatcaagccccaagtcccatgtgtcactggaccggtgaggaaccgaactcacctgagaaacgaacacccacacctcacgctcacgccgaccggaagtctttgcacttccgtcttccgggcggaggccacccggggcggacgcattgcacgccgggagacaaaatgtctcaagaagccttgagaggcgggattttggaacccgggcgctgacgagcttccgccattggtgtgatcgcggacctagaaacttggtccgtcccatacaggtgtagaagtcggatttggagaatgctgacgggtgtccggtcaaggttaggccccaggtaggtccgctttccggacgtgggcagggtagccccgagactaacctatggagtgaacctggccaggggaccctacttgtcagatagggagctccgagccgacctttagatctgacctcagcgtttacatgatactcatgtatttccttagatcaagtcagcctagatcaggtgttcttccagaggccgtattgagatcatttttatttgcagcctgtgcattttctcatctcgggtgatggcctcacagatgtacacatatgtaaaaccgtatcaaactgcacactttaaatatgtgcaacttattgcatgtcagttatactcaaagcggttaccaaaaacagaaaacaagcttttcctaccccagagaagaatttaaagggtaaaatgatcaaaggatttcagttctatcaatgtttacctgtctgatcacttacgtatcagacacaatgctaagcctaggacgattgtcttagctcacgaataacacttactgtacaactatttctactggcataggctttggaaccatataggtctgtgttgtactcttgcttccaacacttgtgaacgatatgggtgagtaattaatgtcataagggcctgaatttccttgtccctaaagtgaacataatacaacctaattgatgctgtaagagttcaacaaatggtaccctttttacattatagtttcaaaagtatagctacacagtactatttgtaagcaatgtttctagagatttacgacatatacccaaaaaacatgtctttaatgatggcctggtaaactcctgctggttgccagaaaaaggggttctgaggcaatctatgggtaccttttttctttaaatttgtgtcctttatgaaaccatgcatagtatggaaattactgaattcagaatatagcaaggttaaagaggctgaaaaaaacctagaacatttgatataaaaaaaggaagcatgcctaagaaacctggtttatttaaatgagatttcgttcttataaagcaagtgaatttctgttttacaagttaaccatatactgtacctcatctttcaaatgagaagttagctacctcacccaaaaatataagtgcacattgcattttagagaaaacttatattctgatagtccatatttactgtatcttgtttaacataccaggacaagacttttgaataggcacttggcaccagaaaaaataatttacctattatgaaaatgtcatgttgttaaaataccatgccatgatttagcattacaagtgctttaaacagctgagtaaaacacccttttactcctttttacttatgtcccctcaccagttatataaaagcagttctagaaaagtggccttagtatatttaaaagtctaattcattccttcattcatgcctttgaatatgcactctattataggcactatgctgaatttgcaaagatgaaggaaactaaactactgtttttgggaaactttatctcctaatggacaaacaaggcttaagggtccaactaaacattgcagtggctcatcacagagctggaaggagcctatatatagaactagaggcacagtgggtggccctgaataccttacaggaagcagactgattttctcatccaaaaggcatgctacatgatgcagaacagtcagtggggcccctgcagtcaggcctctcccatggaatccctgatctgcacaatcagtaaggaacaggaagacttctgggattcagatagtgaccccatgttgcccattccctagataatggggactt

SEQ ID NO: 916428 - DNA, 4001 bp, Homo sapiens
aatccacagagacgcaggagagccatcgatctagaacaaagtcatagcttttgatattagggaagcagaacagaaggagccactcagattgtagctgcaagatttttatagcctgtgttctgctctgggcttgcgtaatagccaggaaggtgggagggctcaaaaggtcaggctggagttccacgcagttccaagaagctaggctgctctctagcctctagatgagagccaggtgggggaggcaccataagtcttcaggctacccttagccagcactgatgttctcagctcatgggactaaaggattagggagacatccaggaggctgcttctgtccaaggtctcatccctccctgttctctaggaatttgagcctccagcccgacactgtctcaaggcctgggtgtgcctctgcaatatgcccaacccaccatgtggactgtccaccaagaaacacacaaggaaggcttgccgaaagcacacttctactggagttgcacacacagactaatatactttcctgtcctcacagataagagcagacctaattatgtcctggctcaatttacccctcctccaatcaggctgcccagggctggctagagcccagcctgagaaaaatgaagggaatgaccccaacaatggattcccacacttactaacatttctttctgtttttccaaaccattccctttccatttactatctggagatgagggttgccctggtgagctctggggaaggacacaggagaaaggagagaggtgaaaattcaaagcaaggctgagaaagatatgacaccctaagctccactgggtacccctaccccagaattgagtagtccacttctgtgcgcaaggttcagttgtcgctctaagtggcagggagggcgtaaggaacagcagccaggtaccctctgaagccctgggaggaccactcactggggaaaccccggaatggctgagaggctgggaacccagccttgcagggtttcaaacaaacaccaatgagaaagaaaaaagacgggggaatacttggttgttcctcatctctacatattaggatccaccccagcaagactcctttcttccaaagcagatgacccaccaagtccccaggttcctcccgtctgccatccctacacctcccctcttttctggaatcaagctcagtgtgacgacgtctccccttcatccaacgtcagctgagtttgccctcaacccagtttgagaagcaaacccatccttccccgattatcagactaaggcagactccgcaggctctcagaccccggagacccccaacaggaagacgcgctgggtgaggggtgggagggaggggcaggggaggggcgtgtgggggaggaacggaaacgacggcctttgtttatcgctcagggacccagctgatcccatctaggggatcgctagccgggcacccgcccttctgcccggacggaggcctccgtcgcccgccgctggcccaggcatggtttgacggcactctgagaccaggtgggctcggaccccaacctccccgtctcccgcaacccccgcttctcctcgccggggccccgcactcacaatacactcgcggatcctctcgtggaatagctgttctcgcacggatagcacttcgtagtcaggtgcttccatactctgctcagcatgactgaagccgaggtgcctctgggcccggggaggacgagcggggaggaagccgccgccgccaagcacccagacccagcctaggggcctttcctcgcagcctgcgacagaaactcggggcagtctggggctcagatacagtcgtccggacgccccgcccttaaaggggcaggcaccacccgcctcgttttaaagggctctgtcctccctttgctccccactctttaaggtcgggtcgcgctcacgtttcaatgcaaacacccgccactaggctcgctacgaggaagcgccgctgagggtccatctttttaagagatctagtgacgacacaagggatgggcgggttccttccagggggaggaactcattggctcctggagagctgtcgttcatcgctggaggagcgctgataggctcgccctgtggaggaaggcgggatcttttgggcctaccgctgcccatactaatagagcaactgtctctcttatctgggaaaagtgaaggttcctggattttagtagcagccaacattttagtatgaccttggttaaatgaaccgtttgaagcaggccagccaggcaggatgtgagggcaccctaggggttctgaaatgtaccgctgcccagtaaccgatgttctgtagtagcattttctgtgtgtttgtgttggggtgcccctccccacatccccaccccgctttcccgctgccaggagttttcattcaatcatttttgtggaagacctagtgtgtgctagaacaaatactgaaaaatactggagagaggactacagaaataccttgcaactttgtgaagaaatgcccacaaggatcactgaagagtggggctgagtcaaacattagctaaccacttactatgtgccattcactttatagtcgttatctcagccatgttacccaggctgatctcggactcctagtctcaaagtgatgggcctcccaaagtactgggattacaaggcgtgacccacccagcctattatctcatttttaacgtcacaacaacacttcagaggaagatgttgtgattcagcttttatttctttatttatttttgagacggagtttcgctcttattgcccaggctgcagtgcaatggtgtgatttcggctcactgcaacctccgcctcccgggttcaagcgattctccttcctcagcctcccaagtaactgggattacaggcatgcgccaccgcgcccagctaattttgtatttttagtaaagacgtggtttctccatgttggtcaggctcatcttgaactcccaaccttagttgatccgcccgcctcggcttcccaaagtgctgggattacaggcgtgagccaccacgtccggccaagattttgtgtgtgtgtgtgtgtgtgtgtgtgtgtgtgtgtgtgtgtgtgtgtgtgtgtgtgtgtgtcttggaagtagacaggatttagacgaagggagattttcttttaagttatttatttttgagacagtctcactctgtcgcccaggctggtgtgcagtggtgcgatcacgactcactgtagcctccaactccaaggctcaagtgatcttcccatctcagtctcttgagcagctgggatcacaggcaggcaccagcacacttagctgattctgccatgttgctcagtctggtcttgaactcctgggcccaagctgtcggcctgccttgacctcccaaagtgcagggattacaggcgtgagccaacagacccgacctcctctaaattcttaaagcaacatccagctgcatagttcagtgagcagttaaaaattggccattagccgcgcgcggtggctcacgcctgcaatcccagtactttgggaggctgaagcgggcggatcaagaggtcaggagatcgagaccatcctgcctaacacggtgaaaccccatctctacttaaaacataaaaaattagccgggcgtggtggcaggtgcctgtagtcccagctactcgggaggctgagggaggagaatggcgtgaacccgggaggcggagcttgcagtgagccgagatcgcgccactgcactccagcctgggtgacagagcgagactccatctcaaaaaaaaaaaaaaaagaaaagaaaaagaaattggccataagaccgggcgcggtgactcatgcctgtaatcctagcactttgggaggccgagacgggtggattacctgaagtcaggtgctgagagcagctcggtcggggagaccctaacccagcggcactagaggaattaaagacacacagaaatatagagatgtgaagtgggaaatcaggggtctcacagccttcagagctgagagccaggaacagagattt

SEQ ID NO: 916429 - DNA, 4001 bp, Homo sapiens
ctcatgtgtgttaacccaaagtccctggtttttcagtactccctggctttgatgattgctggagtaaaaggtagcctgggagtatgcagaaaggaagcatcaaccatagttcagagataggtcaccaccgactgaacaggtgggcaaaacaaaattctaacagtagtaagctgccagtgtttaaaaatataatgtcctggtggccttagaaaatccttaaaaggtaggtaaggatctattggagcttagaaaatgtaaatgcaaaccagctgtttgccagcaatgttgctttcagagtatttgcattttagtctttcaactttgaaattcaaataatatgaaaacttctctatgacatggatctattaaatctgagaggttgttgatgtaccttgtttaagacccatcaactagtaaaaagcagaattaaagtggcagacttttcaaatgtctttcctagtattctgggatgaaaataatttggattttcttctggtgacttctcaaatccttacaatgtcattttccaaaacgattgaataggtttttgatacctttatatctaatagatcatttgactatttaataatgtctacaataataatattgtctacaataataaatatgtttctgataaaatttctacaatctggctgggtgcagtggctcatgcctgtaatcccaccaaggcaggtggattgctttgagcccaggagttcaagatcagcctggtcaacatggcaaaacctatctctaccaaaaatacaaaaaaattggctgggcatggtggcctgtgcctgtagtccttcccagctgctctgaaggctgaggtgggaggatggcttgagcctgggggggcagaggttgcagtgagctgagaatgagccatggctctccagcctgggtgacagagccagatcctgtattaaaaaataataataaaagtaaaaaatgaaaaaataaaatttctataatccagcacaaatcatttttggaagtagttaaaatataagtttaaaaaataaaatgtatagttaaatctgtgttcatttattcatccttttatctctagcatgttgcatggtttctaacatttaccagttgaataaatacatgaatacaccaattactaattcatcatcttctgagttctcagtactatacataaaaaagcatttgctattattttaaattaaatttatttcatctgaaatcttgaaactgggtaatctgtctctagttgaccaaaatggttcctcttgactattacagattggtaaaaacagccaatttcataggaactgtcaaataacgttcaaaattggtaaaagtggagactttaggacaaattatctgaggatgttttctctttctcttcctttccttccttcattccttccttctttccttccttccctgctatattactatattactattattattaccaaaggattatttagtcaagatagagaatgtagttttttaaaatgtaaagtttttcatcataaaagtaatgcatatttattggagggaatttggaaaacataggcaagccaaaagaaacaatgaaaatcactgaaaatgttacttctgtaggatacctctttttacacactaatatgtcattcttgtttattctatacatacgtgttcatttcgacagtcatgggttcctgctacacataccatttcaacattcttttttcacttcaaaatcgtctgtacaatgtttcactcaaaaacagcatctcaattcatgccatttttattactttagaaatttcacgtttatgaaaaaaattgttcttatatctcagtgatgacagatatgaccactttctaaagtgtcaggtgttagtataaaaaggaaatgagggaagccagcgaattgcctgatggggaaaatccagcattcatttctcacttactgtggtgggtctggactctggaaacaccgatgtctcctgctctcactggctgttgcatgtagtgtccttaagcttcttctgttatgctcagccccggagatctggcacacagagccatagtaacaatgcgttcagccaggtttccttagctacacactagtgacaggacaggacgctgccctaaagtgcctgccgctgactcagggaggaggcttggaacacacagcgggaggtgggaatggcttctgcctcacccagaggggctgtcaccttaaaaggaagtcactccataggcttacagatctcatgccctggcagggatctaacaagcttttatgggttttataggatcttatctgcttggtaacccagtttaatcatacagaaaatttattttttttacttttaccctgtatgaattagtcagcaagcaaagaacttgcaatgattattttcctaagtgaattccttttacattccatattaggttaatgagttcagtgtcatttcaacgatacgtgtgtgtgcctgggggtttttgtcttcctatatatatgctgcatttcctgatttctcatttcatctggctaatatgtatcaggcactgtgctcagtgctaggggatcttagaaggaattctgtaatctctctcaagaactgagttgcccaatactgtaggcattagcaacatgtggctatttaaattatttttctatttttttttttttttgtaacggagtctagctctgtcgcccaggctggagtgcagtggcacgatctcggctcaccacaacctgtgcctcccaggttcaagcgattctcttgcctcagcctcccaagtagctgggattacaggcgcccgccaccacacccagctaatttttgtatttttagtagagacagggtttcactgtgttggccaggctgatcttgaactcctgactttgtgatccgcccgcctcagtctcccaaagtgctgggattacaagtgtgagccaccgggcccagccactaatttttaattaattaaatacaattaaaactttactttctcagccacactagccacattccaagtgctcgatacacataactagtggccactataccagatagcacagacacagaacatttctgtcattgcatactattccgttggacagtgttggtggagctactaagagaatgttgatcctgttaacaaattatgtttctgaatctataaaattggatccatctttccaaatgttttgctaattctcctttgtgatggttttgtaattacacaaactattctgcaaggaagcttaaggagataagctttaggaagagagtaatgaatagcatatgctcattgtctaggcaggtctccaaaggtccccaaactttatataattgtacaccattataggaagcattttaaaacaatcactcccaatacaggtatttgcattaaaaagtaattaatatgtgctactgtcagctaatatttcaaagcacagtctatatatttagggctcattaatgagagttgatataaaaccatattccaataatcttcttgataatcttgaatctcagtccaactacttgtcatatcatatgtctgtgatacagactggtatgagtgtaaagttagaatccggaatagtctatattcagttccaccactttcattattttcggttatacgcatccaccaaaactaggtttaacaagcatactagaaaatctcttatgatgaatagataagtgtagttcataattagcaaaccaacaagccaccttagcactgctggatttccacttctgtggccgtggctatatttagatataaacagggaacacttgcaaatgattagattaagtaggtaaactttcccattataaatttctttttcttttcttttccttttatttttttgagatggaggcttgctctgttgccagagtggagtgcagtggccactggagtgcagtggcgtgatctcggctcactgcaacctccgcctcccgggttcaagcaattcccctgcctcagcctcctgagaagctgggactacaggcgca

SEQ ID NO: 916430 - DNA, 4001 bp, Homo sapiens
acagaagactcccaagaaggcttaacaaaatctttgcaatcacagaaacctgtcctggagctatagggtgttcttattttggtaggtgaataagaaatttttttcttttcttttctttttttatgagacagggtctctctctgtcatccaggctggagtacagtggtacaatcatagtttactgcaaccaccaactcctgggttcaagtgatcctcccgcctcagcctcccaagtagctgagactacaggcacatggcactatgcctgctaattttgaaaaaaattttgtagacatgtggtgttgctatgttgcccgggctgtctctaatactcctggcctcaagtgattcttttgccttggcctcccaaattgctggaattacaggcatgagccactatgcctggccgaataagaaatttctaatggctgcacacatctttgaaagagctgagacatttcaggaacaaactcgtgtgatacagcccatcacctgaaccttccacttgcctacctattagtcttcttttggaagatgagagatttttctcagtggttagttaactttcccttaagcataagtaattttctaagccccttcttggtatctcactccctccgtaattgattaacattaaaacaggggcagttacaaaagctcaagtctagcatttcaatgttactttgggagacgctgcattgataatattgacgacaatcatttctcagaggacctctaagaacaaatatttaaaaatggacttggactgaacaataaacataggacttgtaggtccaaagtaacaatagctttaaattatgtatactcaataagtcaattttaaagaaaacattggaaaaccaatggtaatgctttagttgatgaatgatttatattaaatgtaaaaatagggattataattttatataacattcttacggacatttccaaaaccaatattctggtaatttttttgtccccagttctgtaaaatagttctagaaagaaactatttctgtaaattgacttaacatattaaatgggaactttggaggccaggcgcggtggctcacgcttgtaatcccagcactttgggaggccgacgcgggcagatcacgaggtcaggagatcaagaccacggtgaaacctcgtctctactaaaaatacaaaaaattagccgggcgtggtggcgggcgcctgtagtcctagctactccgagaggctgaggcaagagaatggcgtgaaaccgggaggcggagcttacagtgagccaagatcgcgccactgcactctgtctgaaaaaaaaaaaaaaaaaaaacggaactttggctggaatctcagctaggtcttatactatggagatctgtccaggtggatttttatacttctcaaggactagaaccttctaaaacagtagttgtggaagtagttgtatgctacagtccattatttctagaaaatttgtgagatatattctagttctaactggttcataagagtattgaaacaaaagaggtcaagcatgccatcattcctcctctataactcagctctaactctgcttccatcgcatctatgcatgctcactgtttttgtttctcattcttatcttcctgctcatggactttattctgcattgccttcgaagcttcctgaatgtcttgtgtatctttcatcttggctagaaaagaagtctcttttctttcctaggaaagcagatcatgacatcagatgacgaatatggctgaggttcaaggcagatttttcttttcaaagtgacctcacctgttaatccaactaccttcaagcatcagctaggtttaataatttctttaccaaactagtaccagaaccacaattctcatgaggatatgtaagtaccaacatagccaatcctgatcttggctaaggatgtcggacaaaccatggtgcaggtgtgtagcattcactggaagcagcttgagagggcagtaacttggcaaagagacctttatgactacagttgttgcttctggccaacactgcctcttagaactatgaggtaatgtctccatagtaaccaagttccagtttctgaacaattcctatgttgatgctgtaccttctttgcagtttgcagacattaaataaagtaatttgctcttaggaaagccatatcttccactagactttgccaccaaaattattgatatcttgttttgtatttctaagagtcaaggccagtatgtacatactggggaaattaatcacaactcttttcttcttttttttctttctctctctctggacaaatactttgagcacatggaaacagctaggcagcaagaatagaaaccataaaacttcaatgcaaaaagaagtctattggtagaaatcataaaatcaaagccagaacacctaaattcttctcctagttatgccagcagtatgatttagaagaaatcacttaattcagtttctcctctgtgtaaaacactcacacttaatgtttcatgataatgatagtatggcaataaaattaataactatgaaagtacatgattatatacagtaataagatatataaatgatgattactggatgagtaagcttattaaaaatagttaataagattctactatttcttaaaaactggctaggtaccatgaataaacaatacctgctttcagaaataatactaaaatatcttctaatatagatttgaaaatgatttttaaagacaataaagtaactgtcttaaaaagccaaaaagaaaaagtcaagacgtgtaacacgtaataaggtaagttaaaaggaagtaaacgtttgaccgtatttcctccctctcagagatgaagcacaattccttatgaacattatgggccaattatgtaaatatagcatcagaaggtttataaatttttacttacgcttagtaaagaattaaaaatgggcttgtcatttcttgtcactctcccagtctccctacctgtaccagtctggatggctttctagctgttaaaaatttctctacttgaactgcatatattagcataaagtcgttatgacctcattggttttatcagagagcctgctcatattttccaacatattttggagaaataaaattctgtcagctgagaaaaacttttgaaggctttgaagttgtgagtgtttcaatactcattccccatagtagacatttttcttatttccttttcttaaattactgtatatatgcaatgaaaaccaatttcctcttttgttgttgcttaaactaatttagtggttttcaacaggggccaaagtgaaccatagagagcattttgtaaatgtaagaggatgttgatagtagtcattaaagattcgggtcgggtattagtggcatttggtagacagaacccagagatgctagactttccacaatgtggcagataatcctacttagtaaatagtgttcccacatgacacgtgcctttctaggcattcatgcaggtgaaaaatagattacaattatctggccaggcacagtggttcccacctgtaatcccagcactttgggaggccaaagggagtgaattacttgaggtcaggagttcaagaccagtctggccaacatgatgaaaccccgtctctactaaaaaaatacaaaaatcagctgggtgtggtggcgggtgcctgtaatcccagctactctggaggctaaggcaggagaatcgcttgaaccggggatgtggagttgcagtgagctgagatcgtgccactgcattccagcttgggtgacagaaccagtctccgtcattaaaaaaaaaaaaaaaagattagaattatatgaacctaaagcctagctctatatgtcatataaatacaaaatatttttgcagttttagtatataccaaagtctttaggatgtaactatttattgtttaaattccggaaagactctatattgatttgttcagacgtttccaagagttatcagtttggaaaaaattacatcaccaatagcaatacaacttgg

SEQ ID NO: 916431 - DNA, 4001 bp, Homo sapiens
aataatgaggtcctcaaggatacgccaagcaatggtgttgaccgcatctgagccacaggtgtcctccttttaggcaactgcagtccgaggctgtctctctccgtcctggttcaagacaacttaccccagcagcgtgcgaggagccgagctgaaggaagctccggctctcagctgcaaaatgcaatcccttcccagccagacataatacagccaaagaaaaggtcactcagttattagtgagccggcggagcccaggcagcgcttgtcaagaccacagagaagcagctcccttccgatttaagactatttacctctcgcccccacccctcccctcttctttccttctctccctccctctctcgctggctccctcgctcgctctcgtgtgcctgttctgcagctcagtcaagtacagccgccctcggaaagtgcaaagcagccacgagacagatcgggctttgttgctaatttcccagggtgaaaatttacaagcctgcgagtgcagtcagcacaaccacatgcatatgctactcacaaacgctggggacaaacccgcacacaaaatgtgacctctgcaggagtcgactgaggaaggaccctacctcctggaccagtccaaaagaagaactcctgcgagagagctccggaggaaaagggtagggttcctaaaataaccagggcattttggaataggtggctacatttaaagcaaattgccttccaaagccatttctgaagctaccaattatggaaattaaaataaaagcaagagaatcaaactgctaccagaataccctggaaaaagcacacaaccctcccctttaagaaatgcctggaggtggctgcagtcgctggtctgtctgtgacttccattcatgaactctctgaagtcgctgctccgcaagtccgccacacaagcctggttcaggggatcacacacacactctccttcctcccttcctcccttcctctaatggcccaagacccaaactgtgaacttgttctccattcactaatgctgacccccaccaccaccaccccgaaacacacttcctgcaattacttgaattccttactatttaaaactcacacgctccaatgaaaaacagccaacagcactgagaaacatgttttcaggactaacttggtcaaagaaccatagtttctgcaccattactgctttgtcttcacaggcttgttttaaggccttgacagattttttttttttttctaataggtcccattctctctaacctcctctcctcttaactttccttggcatctataaaggccactggtagctttaaaataccttattatttttctaagttttcaaacttcaaagtcaccctctgtttgggctgctcttaaagtaccctcaccagattttacaaagctttgtcagaggtcaagcttaaaaatggtccacatttgaaagacactcactgaaatgtttaagagccaagaaatattcaattgttgaactacaaaaaactttttttcttctcttcaccatcagttttaatctagctctagttttaaaaaaaaaatcaaagcaccccccccatgagtatttaagctaaattttgtttttcttcataaagaataaaggcacaacattgataactagtttttaccccctcccttttgaaggctcataataaaatagcctgtggtttgctttcctctccctttaaaaggcaacaaaactcagaactaacctgaaaaataacgatattcacagacggtagattaatgagaaccccttagttgacttgttctgtacataggcagatttcttaagtttggcttttctggcccgtctaggcaggcatacatgcacttcacccatccgcacagctccccactgttctaccccacctctctgctacagccactctgaaaacaccccagtatgtgtgagtgtgtgtgtgtgcatatgtgtgcatgcatgtgtgtgtgtctcgtgcgctctgtctcagccaatgcactgagaagaagaaaagagggagggagggagggagaagtatgtgtggggaaagggagaaataaaatcaaaacaaatggtacagctaatgaggacaattaaattaattatgttcaaggagatgagattttttttccctccaactgtatgatctgttacccctcgctggcaactgctgctctgtaattcatggcaactgattagtgcatctatgcaaatctttgtttaaatcattcaactaattaaatgatgggattattcctctgcctacggtgacatcattcgcggtaattagtactctatttggactgtggcagtaagattcctgatatcaacaccaacctgcaaagacattaaccactttgtcacctttttcttaagggacaaacacccagatctctaagtgcatcccatcctcttcctttttccccaatcttccttttcctctcaattttaccatttcccccacacttataagcaagtaatactgccaagcaaggaggagagagagagagagaaggagagacagaggagagagagagacagagagagagagaggaacttagcgaataatatgccaaaccacatgtgtaaaggaataaaatggaatagttaacattcagctccatgccattcattttcccctaaaatgtaatgataattagatgggtcataaaatgctcttcttttcattatgactgatgaaatgcattaaagctgacagggtattacctgacagtaattaggttttgtcatgaattaaattatttgaaagcaggctatctccccaatcacgcaatttacagcaagattttttttaatctgtgctacagaagggagagagatagaaaatagcagtttttctcttcataatcatatgaattattcacagaaaaaatcatcagaaaaaccccgtgcagatgaagaggcttgccacttaatgtactgcacagatgtgatcatcagcggttgccgacaatgaaatatacaagtgcacacaaagtgatctggtgaacaagaggtggaatttaatcatcttctgctgacactttgcgaaaaacaccattaaccctcagcaaactccctgttttcctggctccccccaaccccaaagtctcacccctcccgcgagggaaaaagtgaaagaagaatttgtgcttttgtttactcagccaagctaaaggttggatccagccaggcaagcagtttcttcatttcctgagagtaaactacccagtttaattacagatcctttggaaatctttgcgaaaggattgctataaagagccagatctttttggtccgattaccttttgcctgtgccctctttctgcaactcatcatcagacgtttgatgagagaatttacttcatccagcccccatcccaacacttattaaaggaaaaaaaaaggcagactgtcttcttcaggggtcttatattgtgataccttgatgaggggaaaaggggaggggaatgacaaaatggggtggaggagggtgctgagggggtgattagatatatactacttacctttgcccaaaggagatctcccacaagaaaatagtgtgtatatatgtatatttctaaacacgtcttcaagttttcagctgtttctttctttaaaacacacctcacagattacttttgtgtgcgggtgttcagttacgatttctgtggcgtcccagagatgctccggttaggttgccgtcttttttttttttaattttttttttagggcagcagacaggttgttggggggaggcaaaggatagcacaccctgaaagtccaggagcagtgaaaggtctcggtcaagggaaggatgaggttgatactgcccccaccacacacactcccaccatcactcttcgaaattcagcaacacaaatgaaagaaacctctgcttcaggcttcctgtctttcttgtgtgcctctccctttctcactttcttcccgaactgcatacaaaacctgagtgggccagagctgctcctccagtatttaaacacctcgc

SEQ ID NO: 916432 - DNA, 4001 bp, Homo sapiens
gcttttgagcggccaggagtgcagagcgccagcaaagtgcatctatgatagactgtaaccttaccaaaacttttctcctttttctgcatgagttgacttaggcgtgtctgagttgcagcagcttcgcattgagcaccaaacccaaaggtagaagtagaagggggtctccttgatttcgcttaagtgtggacctggtgcgcagcctacaccgccgaggaccgactattgtgaagccactttgggagcgggtcggagtggcggcagggggtgggggaagggatgaggacggccagacaagacagggcgcacacacggagcccctcgcagtgtgcaaaatgatggcgaatgacaaagccacatgcttccctaactctgcccgtaatcctaaaatcccagcggccccttttagcttcctggtaacaaatggatttgattaaactgtcacatgcagcgttagcatagcatatcatgttcaatatgaaaaagatcataaatctgacttgtatttcataacagcaatctgagtagtccccgtaaaaaatgtgctgcatcagtttgaatctcaatctattaggatataggcaccttggtccagggaccttccctcttctagccacttctgcccctacccgcctgccccccccccccgcccccatgcccaaacacagccacttttccacggcaaaggaacaacattttgttattatggctgcgtggagagaggcagaagcgtcaacaaggaccaaaagattgtaatatcaactctttaagaagtgggggttcatgaattccagcaagtaagggggaggggtccggaaacccacccaggactgaattcttttcctatgggctgggagcaaacacttcctaattccaaactctccctgcccctctctccccgggagtcaggggtgtggaaatactgcagttcatggtgaactttgactattatccactcgagtcgtacttgagacgttccgcgccgcagccgctctccctccttccatcaacatcttccgcctgcatctatttcatgtctcatcataaaaataatgaagcctcacatgatttaaacaaaaccgtctcagtagagctgcagcccgagtgaaagttgcagtgcggagctgggttgcagctccagtttatgcctcattagcagaggttggggaagaaaaaaatacccacatccgcacacgcacgcgcgcacccgcagacacacacaccacaaataagccgacgcgtgtgtacacagttgctgcacttaccttctcaattaagcgatacagggggaggccgttcagtaagcacagtggctgctttgtagcgcttctccttgggaaaggtcaaaaagaagcattgtttgaaaaaaaaaaaaaagacgggggagggaatgtctatttttttttaagtttaaaataatgaggtcctcaaggatacgccaagcaatggtgttgaccgcatctgagccacaggtgtcctccttttaggcaactgcagtccgaggctgtctctctccgtcctggttcaagacaacttaccccagcagcgtgcgaggagccgagctgaaggaagctccggctctcagctgcaaaatgcaatcccttcccagccagacataatacagccaaagaaaaggtcactcagttattagtgagccggcggagcccaggcagcgcttgtcaagaccacagagaagcagctcccttccgatttaagactatttacctctcgcccccacccctcccctcttctttccttctctccctccctctctcgctggctccctcgctcgctctcgtgtgcctgttctgcagctcagtcaagtacagccgccctcggaaagtgcaaagcagccacgagacagatcgggctttgttgctaatttcccagggtgaaaatttacaagcctgcgagtgcagtcagcacaaccacatgcatatgctactcacaaacgctggggacaaacccgcacacaaaatgtgacctctgcaggagtcgactgaggaaggaccctacctcctggaccagtccaaaagaagaactcctgcgagagagctccggaggaaaagggtagggttcctaaaataaccagggcattttggaataggtggctacatttaaagcaaattgccttccaaagccatttctgaagctaccaattatggaaattaaaataaaagcaagagaatcaaactgctaccagaataccctggaaaaagcacacaaccctcccctttaagaaatgcctggaggtggctgcagtcgctggtctgtctgtgacttccattcatgaactctctgaagtcgctgctccgcaagtccgccacacaagcctggttcaggggatcacacacacactctccttcctcccttcctcccttcctctaatggcccaagacccaaactgtgaacttgttctccattcactaatgctgacccccaccaccaccaccccgaaacacacttcctgcaattacttgaattccttactatttaaaactcacacgctccaatgaaaaacagccaacagcactgagaaacatgttttcaggactaacttggtcaaagaaccatagtttctgcaccattactgctttgtcttcacaggcttgttttaaggccttgacagattttttttttttttctaataggtcccattctctctaacctcctctcctcttaactttccttggcatctataaaggccactggtagctttaaaataccttattatttttctaagttttcaaacttcaaagtcaccctctgtttgggctgctcttaaagtaccctcaccagattttacaaagctttgtcagaggtcaagcttaaaaatggtccacatttgaaagacactcactgaaatgtttaagagccaagaaatattcaattgttgaactacaaaaaactttttttcttctcttcaccatcagttttaatctagctctagttttaaaaaaaaaatcaaagcaccccccccatgagtatttaagctaaattttgtttttcttcataaagaataaaggcacaacattgataactagtttttaccccctcccttttgaaggctcataataaaatagcctgtggtttgctttcctctccctttaaaaggcaacaaaactcagaactaacctgaaaaataacgatattcacagacggtagattaatgagaaccccttagttgacttgttctgtacataggcagatttcttaagtttggcttttctggcccgtctaggcaggcatacatgcacttcacccatccgcacagctccccactgttctaccccacctctctgctacagccactctgaaaacaccccagtatgtgtgagtgtgtgtgtgtgcatatgtgtgcatgcatgtgtgtgtgtctcgtgcgctctgtctcagccaatgcactgagaagaagaaaagagggagggagggagggagaagtatgtgtggggaaagggagaaataaaatcaaaacaaatggtacagctaatgaggacaattaaattaattatgttcaaggagatgagattttttttccctccaactgtatgatctgttacccctcgctggcaactgctgctctgtaattcatggcaactgattagtgcatctatgcaaatctttgtttaaatcattcaactaattaaatgatgggattattcctctgcctacggtgacatcattcgcggtaattagtactctatttggactgtggcagtaagattcctgatatcaacaccaacctgcaaagacattaaccactttgtcacctttttcttaagggacaaacacccagatctctaagtgcatcccatcctcttcctttttccccaatcttccttttcctctcaattttaccatttcccccacacttataagcaagtaatactgccaagcaaggaggagagagagagagagaaggagagacagaggagagagagagacagagagagagagaggaacttagcgaataatatgccaaaccacatgtgtaaaggaat

SEQ ID NO: 916433 - DNA, 4001 bp, Homo sapiens
ccgtgtacttaaaaggcataaagcagtcagcagtctcccctcttccaccagaagaacatgtctgggtagagttacgtgtttgtagctaagaaacatttcacaagttgctcatagcacatcagaactcataactagttttagattggcatgtaaattgttctgagggaaattcttattgcctctgagaccctgccattctgagttatttgacagtttaagggaaatcataattaaaaaaaagacataaataatagcctgtgcagtgtggtgtgcagaaataagtagaaccatttcatttaaactctggtgagcttttaattgcctggattgcattgtgaagcggcctaacggttgattgcctccattatgttcccttgttctgtaccattcatccgcacagtctcagcttcagtagttaacacaacaaagtaaccacaactccacaacacacaggggtttaaaaaaaataataataatgaaagatttgcagcacttagacacagtcttacatttttggactaactacacagagtgaatagaaaacattttgtccgtcggaaaattcacagagaacaatttgggagagggaagaggaagagggaatacataaagggggttggaagagatgaggtgcttcagaaagatgctaaaatgggaatgcaggttctgcagctgggagcattgacacagattaaaagaatttggccaacatggccattcgattgccaagaggcaccagacaaaagattttctctcctcctgcccatcttcatcctcttcccagcccccaacccaggttggaaaactggattgggcctaaaagcttgtttctctctgttcactggcccagagcatccctacaggctgcagccccctaagggacaacaatgcaaatagatgtccccagatctcaggcactggagctgcttaactctgttctgccccttcaactcccagcccccttccctatccttcacccccctcccctttttgagcaatggagctgggaaccaatttgattccctttttctccaatgcagctgcaaggctcagagatactgacatttttccactcttatcagtttaattacagttaccatggcagcaaagtgctagtgcttggcaaaggccaacaagagatttgcaagactgagttcaattttgatgcagctcacatgcaaaataaaaaaaaaaaataagaaacatacatacactctaacaaagaatcccttgcggagtttatgctccagccttttgtggttgtgtctttgcagccacacagggatggtttgcaaagaatgtagcagtatttgttgcatctagcaagattaattggtttaagcagcagtctttcaaagcagttacaacaataatatttcggttctttcagaaagacacaaaagcagcggaaaagcagaaaggcttttgagcggccaggagtgcagagcgccagcaaagtgcatctatgatagactgtaaccttaccaaaacttttctcctttttctgcatgagttgacttaggcgtgtctgagttgcagcagcttcgcattgagcaccaaacccaaaggtagaagtagaagggggtctccttgatttcgcttaagtgtggacctggtgcgcagcctacaccgccgaggaccgactattgtgaagccactttgggagcgggtcggagtggcggcagggggtgggggaagggatgaggacggccagacaagacagggcgcacacacggagcccctcgcagtgtgcaaaatgatggcgaatgacaaagccacatgcttccctaactctgcccgtaatcctaaaatcccagcggccccttttagcttcctggtaacaaatggatttgattaaactgtcacatgcagcgttagcatagcatatcatgttcaatatgaaaaagatcataaatctgacttgtatttcataacagcaatctgagtagtccccgtaaaaaatgtgctgcatcagtttgaatctcaatctattaggatataggcaccttggtccagggaccttccctcttctagccacttctgcccctacccgcctgccccccccccccgcccccatgcccaaacacagccacttttccacggcaaaggaacaacattttgttattatggctgcgtggagagaggcagaagcgtcaacaaggaccaaaagattgtaatatcaactctttaagaagtgggggttcatgaattccagcaagtaagggggaggggtccggaaacccacccaggactgaattcttttcctatgggctgggagcaaacacttcctaattccaaactctccctgcccctctctccccgggagtcaggggtgtggaaatactgcagttcatggtgaactttgactattatccactcgagtcgtacttgagacgttccgcgccgcagccgctctccctccttccatcaacatcttccgcctgcatctatttcatgtctcatcataaaaataatgaagcctcacatgatttaaacaaaaccgtctcagtagagctgcagcccgagtgaaagttgcagtgcggagctgggttgcagctccagtttatgcctcattagcagaggttggggaagaaaaaaatacccacatccgcacacgcacgcgcgcacccgcagacacacacaccacaaataagccgacgcgtgtgtacacagttgctgcacttaccttctcaattaagcgatacagggggaggccgttcagtaagcacagtggctgctttgtagcgcttctccttgggaaaggtcaaaaagaagcattgtttgaaaaaaaaaaaaaagacgggggagggaatgtctatttttttttaagtttaaaataatgaggtcctcaaggatacgccaagcaatggtgttgaccgcatctgagccacaggtgtcctccttttaggcaactgcagtccgaggctgtctctctccgtcctggttcaagacaacttaccccagcagcgtgcgaggagccgagctgaaggaagctccggctctcagctgcaaaatgcaatcccttcccagccagacataatacagccaaagaaaaggtcactcagttattagtgagccggcggagcccaggcagcgcttgtcaagaccacagagaagcagctcccttccgatttaagactatttacctctcgcccccacccctcccctcttctttccttctctccctccctctctcgctggctccctcgctcgctctcgtgtgcctgttctgcagctcagtcaagtacagccgccctcggaaagtgcaaagcagccacgagacagatcgggctttgttgctaatttcccagggtgaaaatttacaagcctgcgagtgcagtcagcacaaccacatgcatatgctactcacaaacgctggggacaaacccgcacacaaaatgtgacctctgcaggagtcgactgaggaaggaccctacctcctggaccagtccaaaagaagaactcctgcgagagagctccggaggaaaagggtagggttcctaaaataaccagggcattttggaataggtggctacatttaaagcaaattgccttccaaagccatttctgaagctaccaattatggaaattaaaataaaagcaagagaatcaaactgctaccagaataccctggaaaaagcacacaaccctcccctttaagaaatgcctggaggtggctgcagtcgctggtctgtctgtgacttccattcatgaactctctgaagtcgctgctccgcaagtccgccacacaagcctggttcaggggatcacacacacactctccttcctcccttcctcccttcctctaatggcccaagacccaaactgtgaacttgttctccattcactaatgctgacccccaccaccaccaccccgaaacacacttcctgcaattacttgaattccttactatttaaaactcacacgctccaatgaaaaacagccaacagcactgagaaacatgttttcaggactaacttggtcaaagaaccatagtttc

SEQ ID NO: 916434 - DNA, 4001 bp, Homo sapiens
aggaagagggaatacataaagggggttggaagagatgaggtgcttcagaaagatgctaaaatgggaatgcaggttctgcagctgggagcattgacacagattaaaagaatttggccaacatggccattcgattgccaagaggcaccagacaaaagattttctctcctcctgcccatcttcatcctcttcccagcccccaacccaggttggaaaactggattgggcctaaaagcttgtttctctctgttcactggcccagagcatccctacaggctgcagccccctaagggacaacaatgcaaatagatgtccccagatctcaggcactggagctgcttaactctgttctgccccttcaactcccagcccccttccctatccttcacccccctcccctttttgagcaatggagctgggaaccaatttgattccctttttctccaatgcagctgcaaggctcagagatactgacatttttccactcttatcagtttaattacagttaccatggcagcaaagtgctagtgcttggcaaaggccaacaagagatttgcaagactgagttcaattttgatgcagctcacatgcaaaataaaaaaaaaaaataagaaacatacatacactctaacaaagaatcccttgcggagtttatgctccagccttttgtggttgtgtctttgcagccacacagggatggtttgcaaagaatgtagcagtatttgttgcatctagcaagattaattggtttaagcagcagtctttcaaagcagttacaacaataatatttcggttctttcagaaagacacaaaagcagcggaaaagcagaaaggcttttgagcggccaggagtgcagagcgccagcaaagtgcatctatgatagactgtaaccttaccaaaacttttctcctttttctgcatgagttgacttaggcgtgtctgagttgcagcagcttcgcattgagcaccaaacccaaaggtagaagtagaagggggtctccttgatttcgcttaagtgtggacctggtgcgcagcctacaccgccgaggaccgactattgtgaagccactttgggagcgggtcggagtggcggcagggggtgggggaagggatgaggacggccagacaagacagggcgcacacacggagcccctcgcagtgtgcaaaatgatggcgaatgacaaagccacatgcttccctaactctgcccgtaatcctaaaatcccagcggccccttttagcttcctggtaacaaatggatttgattaaactgtcacatgcagcgttagcatagcatatcatgttcaatatgaaaaagatcataaatctgacttgtatttcataacagcaatctgagtagtccccgtaaaaaatgtgctgcatcagtttgaatctcaatctattaggatataggcaccttggtccagggaccttccctcttctagccacttctgcccctacccgcctgccccccccccccgcccccatgcccaaacacagccacttttccacggcaaaggaacaacattttgttattatggctgcgtggagagaggcagaagcgtcaacaaggaccaaaagattgtaatatcaactctttaagaagtgggggttcatgaattccagcaagtaagggggaggggtccggaaacccacccaggactgaattcttttcctatgggctgggagcaaacacttcctaattccaaactctccctgcccctctctccccgggagtcaggggtgtggaaatactgcagttcatggtgaactttgactattatccactcgagtcgtacttgagacgttccgcgccgcagccgctctccctccttccatcaacatcttccgcctgcatctatttcatgtctcatcataaaaataatgaagcctcacatgatttaaacaaaaccgtctcagtagagctgcagcccgagtgaaagttgcagtgcggagctgggttgcagctccagtttatgcctcattagcagaggttggggaagaaaaaaatacccacatccgcacacgcacgcgcgcacccgcagacacacacaccacaaataagccgacgcgtgtgtacacagttgctgcacttaccttctcaattaagcgatacagggggaggccgttcagtaagcacagtggctgctttgtagcgcttctccttgggaaaggtcaaaaagaagcattgtttgaaaaaaaaaaaaaagacgggggagggaatgtctatttttttttaagtttaaaataatgaggtcctcaaggatacgccaagcaatggtgttgaccgcatctgagccacaggtgtcctccttttaggcaactgcagtccgaggctgtctctctccgtcctggttcaagacaacttaccccagcagcgtgcgaggagccgagctgaaggaagctccggctctcagctgcaaaatgcaatcccttcccagccagacataatacagccaaagaaaaggtcactcagttattagtgagccggcggagcccaggcagcgcttgtcaagaccacagagaagcagctcccttccgatttaagactatttacctctcgcccccacccctcccctcttctttccttctctccctccctctctcgctggctccctcgctcgctctcgtgtgcctgttctgcagctcagtcaagtacagccgccctcggaaagtgcaaagcagccacgagacagatcgggctttgttgctaatttcccagggtgaaaatttacaagcctgcgagtgcagtcagcacaaccacatgcatatgctactcacaaacgctggggacaaacccgcacacaaaatgtgacctctgcaggagtcgactgaggaaggaccctacctcctggaccagtccaaaagaagaactcctgcgagagagctccggaggaaaagggtagggttcctaaaataaccagggcattttggaataggtggctacatttaaagcaaattgccttccaaagccatttctgaagctaccaattatggaaattaaaataaaagcaagagaatcaaactgctaccagaataccctggaaaaagcacacaaccctcccctttaagaaatgcctggaggtggctgcagtcgctggtctgtctgtgacttccattcatgaactctctgaagtcgctgctccgcaagtccgccacacaagcctggttcaggggatcacacacacactctccttcctcccttcctcccttcctctaatggcccaagacccaaactgtgaacttgttctccattcactaatgctgacccccaccaccaccaccccgaaacacacttcctgcaattacttgaattccttactatttaaaactcacacgctccaatgaaaaacagccaacagcactgagaaacatgttttcaggactaacttggtcaaagaaccatagtttctgcaccattactgctttgtcttcacaggcttgttttaaggccttgacagattttttttttttttctaataggtcccattctctctaacctcctctcctcttaactttccttggcatctataaaggccactggtagctttaaaataccttattatttttctaagttttcaaacttcaaagtcaccctctgtttgggctgctcttaaagtaccctcaccagattttacaaagctttgtcagaggtcaagcttaaaaatggtccacatttgaaagacactcactgaaatgtttaagagccaagaaatattcaattgttgaactacaaaaaactttttttcttctcttcaccatcagttttaatctagctctagttttaaaaaaaaaatcaaagcaccccccccatgagtatttaagctaaattttgtttttcttcataaagaataaaggcacaacattgataactagtttttaccccctcccttttgaaggctcataataaaatagcctgtggtttgctttcctctccctttaaaaggcaacaaaactcagaactaacctgaaaaataacgatattcacagacggtagattaat

SEQ ID NO: 916435 - DNA, 4001 bp, Homo sapiens
aaagccacatgcttccctaactctgcccgtaatcctaaaatcccagcggccccttttagcttcctggtaacaaatggatttgattaaactgtcacatgcagcgttagcatagcatatcatgttcaatatgaaaaagatcataaatctgacttgtatttcataacagcaatctgagtagtccccgtaaaaaatgtgctgcatcagtttgaatctcaatctattaggatataggcaccttggtccagggaccttccctcttctagccacttctgcccctacccgcctgccccccccccccgcccccatgcccaaacacagccacttttccacggcaaaggaacaacattttgttattatggctgcgtggagagaggcagaagcgtcaacaaggaccaaaagattgtaatatcaactctttaagaagtgggggttcatgaattccagcaagtaagggggaggggtccggaaacccacccaggactgaattcttttcctatgggctgggagcaaacacttcctaattccaaactctccctgcccctctctccccgggagtcaggggtgtggaaatactgcagttcatggtgaactttgactattatccactcgagtcgtacttgagacgttccgcgccgcagccgctctccctccttccatcaacatcttccgcctgcatctatttcatgtctcatcataaaaataatgaagcctcacatgatttaaacaaaaccgtctcagtagagctgcagcccgagtgaaagttgcagtgcggagctgggttgcagctccagtttatgcctcattagcagaggttggggaagaaaaaaatacccacatccgcacacgcacgcgcgcacccgcagacacacacaccacaaataagccgacgcgtgtgtacacagttgctgcacttaccttctcaattaagcgatacagggggaggccgttcagtaagcacagtggctgctttgtagcgcttctccttgggaaaggtcaaaaagaagcattgtttgaaaaaaaaaaaaaagacgggggagggaatgtctatttttttttaagtttaaaataatgaggtcctcaaggatacgccaagcaatggtgttgaccgcatctgagccacaggtgtcctccttttaggcaactgcagtccgaggctgtctctctccgtcctggttcaagacaacttaccccagcagcgtgcgaggagccgagctgaaggaagctccggctctcagctgcaaaatgcaatcccttcccagccagacataatacagccaaagaaaaggtcactcagttattagtgagccggcggagcccaggcagcgcttgtcaagaccacagagaagcagctcccttccgatttaagactatttacctctcgcccccacccctcccctcttctttccttctctccctccctctctcgctggctccctcgctcgctctcgtgtgcctgttctgcagctcagtcaagtacagccgccctcggaaagtgcaaagcagccacgagacagatcgggctttgttgctaatttcccagggtgaaaatttacaagcctgcgagtgcagtcagcacaaccacatgcatatgctactcacaaacgctggggacaaacccgcacacaaaatgtgacctctgcaggagtcgactgaggaaggaccctacctcctggaccagtccaaaagaagaactcctgcgagagagctccggaggaaaagggtagggttcctaaaataaccagggcattttggaataggtggctacatttaaagcaaattgccttccaaagccatttctgaagctaccaattatggaaattaaaataaaagcaagagaatcaaactgctaccagaataccctggaaaaagcacacaaccctcccctttaagaaatgcctggaggtggctgcagtcgctggtctgtctgtgacttccattcatgaactctctgaagtcgctgctccgcaagtccgccacacaagcctggttcaggggatcacacacacactctccttcctcccttcctcccttcctctaatggcccaagacccaaactgtgaacttgttctccattcactaatgctgacccccaccaccaccaccccgaaacacacttcctgcaattacttgaattccttactatttaaaactcacacgctccaatgaaaaacagccaacagcactgagaaacatgttttcaggactaacttggtcaaagaaccatagtttctgcaccattactgctttgtcttcacaggcttgttttaaggccttgacagattttttttttttttctaataggtcccattctctctaacctcctctcctcttaactttccttggcatctataaaggccactggtagctttaaaataccttattatttttctaagttttcaaacttcaaagtcaccctctgtttgggctgctcttaaagtaccctcaccagattttacaaagctttgtcagaggtcaagcttaaaaatggtccacatttgaaagacactcactgaaatgtttaagagccaagaaatattcaattgttgaactacaaaaaactttttttcttctcttcaccatcagttttaatctagctctagttttaaaaaaaaaatcaaagcaccccccccatgagtatttaagctaaattttgtttttcttcataaagaataaaggcacaacattgataactagtttttaccccctcccttttgaaggctcataataaaatagcctgtggtttgctttcctctccctttaaaaggcaacaaaactcagaactaacctgaaaaataacgatattcacagacggtagattaatgagaaccccttagttgacttgttctgtacataggcagatttcttaagtttggcttttctggcccgtctaggcaggcatacatgcacttcacccatccgcacagctccccactgttctaccccacctctctgctacagccactctgaaaacaccccagtatgtgtgagtgtgtgtgtgtgcatatgtgtgcatgcatgtgtgtgtgtctcgtgcgctctgtctcagccaatgcactgagaagaagaaaagagggagggagggagggagaagtatgtgtggggaaagggagaaataaaatcaaaacaaatggtacagctaatgaggacaattaaattaattatgttcaaggagatgagattttttttccctccaactgtatgatctgttacccctcgctggcaactgctgctctgtaattcatggcaactgattagtgcatctatgcaaatctttgtttaaatcattcaactaattaaatgatgggattattcctctgcctacggtgacatcattcgcggtaattagtactctatttggactgtggcagtaagattcctgatatcaacaccaacctgcaaagacattaaccactttgtcacctttttcttaagggacaaacacccagatctctaagtgcatcccatcctcttcctttttccccaatcttccttttcctctcaattttaccatttcccccacacttataagcaagtaatactgccaagcaaggaggagagagagagagagaaggagagacagaggagagagagagacagagagagagagaggaacttagcgaataatatgccaaaccacatgtgtaaaggaataaaatggaatagttaacattcagctccatgccattcattttcccctaaaatgtaatgataattagatgggtcataaaatgctcttcttttcattatgactgatgaaatgcattaaagctgacagggtattacctgacagtaattaggttttgtcatgaattaaattatttgaaagcaggctatctccccaatcacgcaatttacagcaagattttttttaatctgtgctacagaagggagagagatagaaaatagcagtttttctcttcataatcatatgaattattcacagaaaaaatcatcagaaaaaccccgtgcagatgaagaggcttgccacttaatgtactgca

SEQ ID NO: 916436 - DNA, 4001 bp, Homo sapiens
gaatcccttgcggagtttatgctccagccttttgtggttgtgtctttgcagccacacagggatggtttgcaaagaatgtagcagtatttgttgcatctagcaagattaattggtttaagcagcagtctttcaaagcagttacaacaataatatttcggttctttcagaaagacacaaaagcagcggaaaagcagaaaggcttttgagcggccaggagtgcagagcgccagcaaagtgcatctatgatagactgtaaccttaccaaaacttttctcctttttctgcatgagttgacttaggcgtgtctgagttgcagcagcttcgcattgagcaccaaacccaaaggtagaagtagaagggggtctccttgatttcgcttaagtgtggacctggtgcgcagcctacaccgccgaggaccgactattgtgaagccactttgggagcgggtcggagtggcggcagggggtgggggaagggatgaggacggccagacaagacagggcgcacacacggagcccctcgcagtgtgcaaaatgatggcgaatgacaaagccacatgcttccctaactctgcccgtaatcctaaaatcccagcggccccttttagcttcctggtaacaaatggatttgattaaactgtcacatgcagcgttagcatagcatatcatgttcaatatgaaaaagatcataaatctgacttgtatttcataacagcaatctgagtagtccccgtaaaaaatgtgctgcatcagtttgaatctcaatctattaggatataggcaccttggtccagggaccttccctcttctagccacttctgcccctacccgcctgccccccccccccgcccccatgcccaaacacagccacttttccacggcaaaggaacaacattttgttattatggctgcgtggagagaggcagaagcgtcaacaaggaccaaaagattgtaatatcaactctttaagaagtgggggttcatgaattccagcaagtaagggggaggggtccggaaacccacccaggactgaattcttttcctatgggctgggagcaaacacttcctaattccaaactctccctgcccctctctccccgggagtcaggggtgtggaaatactgcagttcatggtgaactttgactattatccactcgagtcgtacttgagacgttccgcgccgcagccgctctccctccttccatcaacatcttccgcctgcatctatttcatgtctcatcataaaaataatgaagcctcacatgatttaaacaaaaccgtctcagtagagctgcagcccgagtgaaagttgcagtgcggagctgggttgcagctccagtttatgcctcattagcagaggttggggaagaaaaaaatacccacatccgcacacgcacgcgcgcacccgcagacacacacaccacaaataagccgacgcgtgtgtacacagttgctgcacttaccttctcaattaagcgatacagggggaggccgttcagtaagcacagtggctgctttgtagcgcttctccttgggaaaggtcaaaaagaagcattgtttgaaaaaaaaaaaaaagacgggggagggaatgtctatttttttttaagtttaaaataatgaggtcctcaaggatacgccaagcaatggtgttgaccgcatctgagccacaggtgtcctccttttaggcaactgcagtccgaggctgtctctctccgtcctggttcaagacaacttaccccagcagcgtgcgaggagccgagctgaaggaagctccggctctcagctgcaaaatgcaatcccttcccagccagacataatacagccaaagaaaaggtcactcagttattagtgagccggcggagcccaggcagcgcttgtcaagaccacagagaagcagctcccttccgatttaagactatttacctctcgcccccacccctcccctcttctttccttctctccctccctctctcgctggctccctcgctcgctctcgtgtgcctgttctgcagctcagtcaagtacagccgccctcggaaagtgcaaagcagccacgagacagatcgggctttgttgctaatttcccagggtgaaaatttacaagcctgcgagtgcagtcagcacaaccacatgcatatgctactcacaaacgctggggacaaacccgcacacaaaatgtgacctctgcaggagtcgactgaggaaggaccctacctcctggaccagtccaaaagaagaactcctgcgagagagctccggaggaaaagggtagggttcctaaaataaccagggcattttggaataggtggctacatttaaagcaaattgccttccaaagccatttctgaagctaccaattatggaaattaaaataaaagcaagagaatcaaactgctaccagaataccctggaaaaagcacacaaccctcccctttaagaaatgcctggaggtggctgcagtcgctggtctgtctgtgacttccattcatgaactctctgaagtcgctgctccgcaagtccgccacacaagcctggttcaggggatcacacacacactctccttcctcccttcctcccttcctctaatggcccaagacccaaactgtgaacttgttctccattcactaatgctgacccccaccaccaccaccccgaaacacacttcctgcaattacttgaattccttactatttaaaactcacacgctccaatgaaaaacagccaacagcactgagaaacatgttttcaggactaacttggtcaaagaaccatagtttctgcaccattactgctttgtcttcacaggcttgttttaaggccttgacagattttttttttttttctaataggtcccattctctctaacctcctctcctcttaactttccttggcatctataaaggccactggtagctttaaaataccttattatttttctaagttttcaaacttcaaagtcaccctctgtttgggctgctcttaaagtaccctcaccagattttacaaagctttgtcagaggtcaagcttaaaaatggtccacatttgaaagacactcactgaaatgtttaagagccaagaaatattcaattgttgaactacaaaaaactttttttcttctcttcaccatcagttttaatctagctctagttttaaaaaaaaaatcaaagcaccccccccatgagtatttaagctaaattttgtttttcttcataaagaataaaggcacaacattgataactagtttttaccccctcccttttgaaggctcataataaaatagcctgtggtttgctttcctctccctttaaaaggcaacaaaactcagaactaacctgaaaaataacgatattcacagacggtagattaatgagaaccccttagttgacttgttctgtacataggcagatttcttaagtttggcttttctggcccgtctaggcaggcatacatgcacttcacccatccgcacagctccccactgttctaccccacctctctgctacagccactctgaaaacaccccagtatgtgtgagtgtgtgtgtgtgcatatgtgtgcatgcatgtgtgtgtgtctcgtgcgctctgtctcagccaatgcactgagaagaagaaaagagggagggagggagggagaagtatgtgtggggaaagggagaaataaaatcaaaacaaatggtacagctaatgaggacaattaaattaattatgttcaaggagatgagattttttttccctccaactgtatgatctgttacccctcgctggcaactgctgctctgtaattcatggcaactgattagtgcatctatgcaaatctttgtttaaatcattcaactaattaaatgatgggattattcctctgcctacggtgacatcattcgcggtaattagtactctatttggactgtggcagtaagattcctgatatcaacaccaacctgcaaagacattaaccactttgtcacctttttcttaagggacaaacacccagatctcta

SEQ ID NO: 916437 - DNA, 4001 bp, Homo sapiens
ctgtttgctggacacaatgagtggaatatagaacaatgcaactattttaacactttacccctcttagtggtttattagttaattttttcctgaaaaaaaaaatgcgtatactactttttctgcacttttctatatcagatcttgatttaaaactttaccactcttggtgatttattattagtttttttaatccgaagaaaacatgtgtatactcctttttctgcatttttctatatcagatcttgattggctcaccaccattacacacacacacatctcttttctcccatcctcccagcgttatagaatcatttgttgtaaaatcagtattcagtatttacataattatgactgactttacatgactactattattcacagttgaggtataccgtgtatacagtgtagtttttaaatttttatttttctcagcgttcaaaattatatgttctgttttcttaattttgaaaaatatgcattcactaatttatccccacactctttggaaaatgaaagctctctaggctgtattcaaatacaccaggtactctatcaattttcattttttaaactattctacctgagctctccatctttagccatttcctgttgacttcatactgttctcccctaccactctccctctttaatatattaccgttttagaaactttatggctaccctgtaagtaataaaaatgtctttccccactcaacaacagacagtacctttcaagtttccactttataaggacataacccccattccatttacttcccccgccctccttcaacattcccacttgtattttccggctgtatttttaaaacatggtaaataacatttgcactccactttgtaaccataattaagtatgcccttaaacaataaaaaccataaacaacatttgtattttacgattatttaaatgttattcactgaacagccaagctttgtgctactatgggatttcgttttctgcggttccaagtcttgatccacgtcctgccacaggatcactgaagtagagcccattttcttacactctcgccattagttcaaaagcttgcagcattttatgtctggtacttggaggatgattttcctgtacagttttgcgtttttttcaccgaaaatttctgattattattgttttctcttgtgggatgaaatatgtaccttctatatcacagccttaataccttcagcttcttattcattgaaatcttgcttacaatccagtccgaggattcccggtttactgattttctttttcctgcaaattttagccttctgttttgttttgaaataatgcatcctctgcgctttgtcacattctgaaattcgtcaggtgttttaggatgcacactttcttagatgttttcgagggtcttaactgcagttctgtttccggaacagcgtattctctttctagggattgtaggctcccggccgccccctgaggagctccgctagcagctaagagggcagccacgaagagcgcctgagcactctcgcgagactgtggggctcgccattggctgctccgccgcgccgcaacggaccctgggagtcggccatcatgctggccccggaggccgttagcttagtcatggctctaaatatgtacctgcaatcggatgttgaggatcaccgagcccgcgacgtagaagtacgggaagttcatgcgcagctgccaggccagctcgaagaaggcgagcagggtgcgggagagccccttgcagaagacgccgtacgaggtgggtgtcgcggcggggcttgaggccctgacggccaaggaggacggagccgccgcgggggccatgagccaggtgtcgccgcccgcccagcgtctgtagcgagggttgccgcagggcccgcggacctcctagcgacggctgggaccggcaggacggtaagcaaagcggctcccgggctcacacccaagcttgccgctgccgccgctcggtgcagtgcggcgcgtagccccgggcgccgctggcgctccgccccttcctgtctgcttctcactgtggcatttaccatttagagctcaactgatggtaggtggctctggaataggatgtgttatatagcatgtacgaacatccatgcagatagttccactttaaaatgaaaaaatctaagcgagatgtaacttgccgtagggcacaaaatttgtaagggccaaagctagattaaaactttagtttgtctgctgtgttatgtgggatgttaggaatcttacccttttgatttcataatattaatattagggcaagatgattcctacgccaataaaagcacaaggtctctgtattcataatataccatagacataaaaaggatcacaatcttagtctttggatttttctatttattaggaatatttaaattgcaagtgacaggaatgataaacattcaagcaaaaaactagtggacacacacgcgtatatacataaggacatacatacaaaattatattcccagccatgtaaacccttaaaaagttcagattagctgtggaagcttcagccatttctgcatggagatgcatctgtgaaacctgtggctaggctccaagagctggaatactactctgtacttccaaactctttttttgttgttgtttttgagacgggagtctcgctctgtcgcccaggctggagtgcagtggcgcgatctcggctcactgcaagctccgcctcccgggttcacgccattctcctgcctcagcctcctgagtagctgggactacaggcgcccgccaccatgcccggctaattttttgtattttttggtagagatggggtttcaccgtgttagccaggatggtctcgatctcctgacctcgtgatctgcccgcctcagcctcccaaagtgctgggattacaggcgtgagccacagcgcccggcctgtacttccaaactcttaataccattagagtaacagcacagtgaatctctaatagccacaatacttttgttatttaaatggtgcacatttcattaccttcacttatctcccattttaactagaaagcactgtattttttaatcgcacacaccgtcttcattcatggattattcaaatgtgtgatttctgatcatgaccttaaggttacagtcttgttctgaaaagcattgttgagataccacacatcgcaccgtgcactgcatgtctagcagctattcagagcacaagtacggtaccctagagtacctctgtttctatatagtctactgattatatgactggtagaaataacgtgccactgataaatttgtaaaaattaattttgtgttcccagctagtattcttttgctactttgctgctccagtaccactccagcgaggtagcacttagaggaattacttatgacaacttctaaaatactggtatagagactgaagagcgatgtaaaataaatgatcaattctgagaactgggagaagatatatagtttcagttcacacatataatttactccctttgaaaactgaaagactaatacacagagccattcagagtcacaggagtcattacgtcctggatttttcatttccaaatatgtaaagctatgtggactcattctgtcttctattcctcttttgtgccaccctttacgccctacttgctccgtttctgggtaactccatgaaaaccttatcttccaccctgagaccgtggggaaaatagcagccacccactgataacatggccagattgagggcctattccaatgggacgggaataggcaaagaacagtcacaaagctccaaatcctactccttaatgctctagagctgaagaaagatttccttctttccacctgagagtgggataggagcaataatttaggtggttgtagtttttatctgccccttgatgtttagatttgaatgcctaatccacacttcttttgctgagggtgatattaggagaattcatgattagagtattcatgattggaaatggcttgattgtacaaattagaaa

SEQ ID NO: 916438 - DNA, 4001 bp, Homo sapiens
taatattagaagcaaagcatttttcacggggaaaatcctagcactttgaaagcatttcaggtcaaagcaaataaataaaacctctatccctcatcctgtatcactggcatctcctcactcacagaacctaatggcatgattgttttttcccaagaagagcaagaaaactttgcaaaaatatttctctcagaggttatggcaatgaaggatttttgtgccatgaaacacgtgttgccctttgtatttaaagattaaaataaaaactgctgttgacaatgttaatagattctttcattaaacaaatatttcattttagagctatatgggaaattagagacctcaaacacagtccctgtatattaaagataacaaaatgtatacttagggaagataaatgacttgcttaaggtcacacagcaggtagcatggaaggatgagttagaagtactagttcagtgtttgtatttgtatgttttgcctcagaatcagacaatgtacagttaagacctcatcgatatctcccggtaaatgcttatttaatgtttaagaattttcactggtaaagagattcttattccaggagtctaggtcttggggtttaggtttcttttacttaaaaaaaaaattcctctgataagtgaggattcatttaactttctggtggatcattaggtacctttcaagaaatgagaataatcataactggctctatttatcttagcatgggttgaaagatatgaaaagttccttgatatgactggcacgattctatcccataaaaccactcgtaaatatcagttgaaataatgcctgtagggaaaattttcaaatgtcctttctgtcaatgcagaaatgccagtgcagcttgttttctgggtggcatgtaagttgtagacaggcaccacattttagacatattatggtggtgcggtgaattgacaggcagtttaccaccatttccatgtattagattatgtgtacctctggctatcctgacactttgcccccaaagtggagatagtgaaagagaaggagagagggagaagaactcctcgcatctgtgcccctacctcagcagctcctcctccttgtctctgagggtctccagagtttgagagtttggtgtcatgttggcccaagagactgttgtccttttgacagctcggctgtttgtatctccagaatgaaacataatcagatttttttcagatgtagcatctgccttccctccaacatccttgggttaatcacgtgcttgctggccaggatatgtaaataagacttggctaaaaaaaacccttaaaggattatgaagcaatcttgcttaatagtagcagaacaaaacaaaacaaaaaaccactccaacaaatcctcctgtgtgctaccaagtaatggaaagatccagttatgactggaactgtcctggcctgagtattgtcctggacccagagggagcgaaggagggagggagggagggagggagaaagagagagagagaggggagaaatatgagaggaggagagaaattgctgaaggagagcttcactcactgactccgcacacattccctcccagtggttgctaatgaagagcccgtgctggtgaaggaagcctgctgatcccggaactggccttgcgcgcaagtggtgggatgacagacacattcccttccttgaactgcactcttttcccttgcactcagaggtggcccgagagagccccggtaggtcccggagtatgtttccatgctgcagaaggcatggagagattccaattgcgggggttcctccgtagcctttgcagctgaacgtctccatctcctgtccctgggcggtcagtcgctggcatggctctgtggagttttacctcccagttgtctatcaccaaagctgtccaccttgtccggaggggaatgagcgtggaaacccctggcggctgtactgacaaaagcaaccttagtcaatgacagagctgggcaggcggcgaggtcttgcgggctggcctttctgctgctggtaggaggatcatgtgctgctatttcggaggctcctgccagttggcccctgcccaccttttctgttcatactgaagcagccaggaactgagagaaagaggaagcctcggctgtgctccgggctgcgctgccagggttgcgtctgtagcaggtccagcagcaaaaacaaaacagggcagagcccagggaggccccagccacagcagctgagtgtggaaacaaagcagcccgcccgccctgggaagctgccgcaggctgtggaagggaacttctagagaggctgcatcctctccaagccgggaaactgaggcctagaagacatgtgacgtatctgagcagtgaccaagccaggagtagaaatgtctcctgagggcctgtccccactgctgtttggttttaatcgctcagctcttaatagtgtaaccctggacaagtgacttactctccccagcctccatctcatctgtaaaatggggatgagaaaatacctctaagggttgttgtgacaattaaatgagaaagcataaacaaagcacttggcacaatgcctggccacttaatgggccctcagtaaatgttggctagttatgtgaaccagaacttgagatggaagtgaagcagaaacgatagggagttgttcaaaaatacctgatctgctagggaaatattttttaaaacaaggctgcttttcacaaggaggggtaggcacacttgaattaagatcagattgattatatgtttttgttcagctttgatgttgaattgtttaatcaaatggcagactctgccccgcttccaggaagagctcaactccaactaggaggaagcaggtaatgtgagccatggcatcttccccgtttagatttcctgactctttgtttatcttctttgtcaatgtgcgtctgaaccttcccaacagagtttaaaatgttcaacttcaaagctaaattctgatggaaaacacttcctaagaggctgaaggcttactctaggggtgaaagaagaggaaaggcgatggatcacaccacatttgtggaaaatgttaatgctatgtgatcttgcctccttagacccagatagatgcaaaggataaggaactcggtttatagcaacagatactccaaaagtgctttgcatcctgttctgacactaactggttgtgaatcacttgttaaagataaggataacaacaataccatttcttgagcccttactgggtgtctggtattgtgcaaagtactgtctatatattacctcagtttccacaacaaccttatgaaatatttcttccttttgtgatgaggaaagtgagacttagagagaagttaaataacttgttcaagatcactcagctaataaatgctcctatgcacttagtcactgtgctatgtcctgcttaccccttaatgttgaccttaatcctaacttgaatttaggttaatgtctatgcactgcttttttttcacctgcaaatcaagggctgtactaacagttttgctaaggccacttctttgaaaattgtaaatatttccagaaagaggcacagtttacaataaacattcttgctttccaaataaattctcccctattaaaatcaatgtaccagttgttattttcatacctatgcattgtttaagatagagagttcaggacacaattgaaaactgggaaaaataatctcgtggttcggtttgttagtttgagacgcagtctcactctgtcgcccaggctagagtacggtggcccaatctcagctcactgcaacctccaacctcccaggttcaagcaattctcttgcctcagcctcccgggtaactgggattacaggcgcgcaccaccacgcccagctaatttttgtgtttttagtagagatgagattttgccatgttggccaggttggtcttgaactcctgacctcaagtgatccacccacctcggcctcccaaagtgctgggattacaggtgtgagccaccgtatctggctctc

SEQ ID NO: 916439 - DNA, 4001 bp, Homo sapiens
cccaaatatcttccagactgggacaagaatgaatctttaaagtgttttatgctctagaaggtaatattcccaggctcattatagtcatatctcaaaggttaatccagggatgccatagaactgttctgcctcctagaagctcgtctccggaggcttggcattcactcttctagaaaaatctctgctgcttttatttcttttcaagaaatatttatttacctgttttggtaatttacctaacattttacaaaagccatgccagaaatctttcctgctataaattgtgattcctccttccccagataccagaggaaaggggacttcaaaacactctagctaacctctactactttatctgtaaaatgggattactgcaaaaattatatgtaaatgtatgtaaagtaccgggcacaggggaataggcaaattctaacatcggaaatgctcgaatgctgttggttcatgggcaagaaaacaaattaaaaagatgccacaccgcttccccctaaaatatgtttctgccctgccatagaggcaagaatgtcaaaggtggcaattattatatttcttataacagatatgacactctggcccttccaaggaaatagaaaaacgtagcaaagctagtagatgctgctcaccattcaaagctgccccaatccagtccccagaatgtaggtctgaactagtcttgaaagtcacaccttaaagtgaaacacccttagatctattagcttgcctatttctgaattacagctcctatcaagaacagagaacttctaaaatcggcgactctttttaggccccagatttaaccaatttgcgttagcaaccccggagcttaaccaaagcactcccagctgtcctagcgtgtgggtaacaaaaaaagcagcaaatggtcctcaattaaacatcagctgctttatctatttattgaacactcactgtattgcaaacacaataatcctcccattcttgtctcaaacgcttagagaagtctaaaaatcatggacagagaacaacaatggaaaacaccagtgcctgctgtctggccaacctctacaagattagaaaacggaccaagacaccttctgagaagaaaaagctgtttctggagacctttgcactaaagggttcaaagcaagtggacacctatcacatatcccttcagaaaaggaacctctaacacccgtttttaagaaacagactgttcttagaggtcctataatccatccactgtgtgagccaaatctcactacatcagccatgagcactagagccaaaaattaattagctcgtcttttaaacaggaggctgtagctgggagaaacggctgttttgaaaataaataagggcactggcgcccacgctggcttagcttgcagtcacacgcacttccatcaggggaatcgaggccaggacagatggtgactttttttttttcctactagcacggtgaaggctttttctgtgcgttcccgtccgcagtccctgaccctagtctgggaggcagcccgctctgcaaggggacagggcgggctggaggagggtgggaggttaggacaccgacctgaggagttcagatcgttgggtcggctctcggcctcggagctctgctcactgcccatggtgccgacagcggtggcagcagaagaacggcgggccgggcggtcaccgctccggcggcgggcgacagggcaggggccagggaccgggacggggaggcaaagcagagtctgggcgccgcagcgaggctaatgtgtggggctgacgcgtccagcccacgcaggggcctgggcggcgggagaaggagaggccctatttggggaacagaaacgcaaggaggcgcggcgcgaacgcacgcggctagccctccttctttccgggagccctaagagaaccggcagatgacactggctttgccgcacctgcggccggcgggcggcgccgctttcactcactggttcacgctccgcaagctcgctccttccgggacgcagatgggcggtgccggctacgcaagaccttcagttccggattaggaggccccgccccccggcccgagggaggggcggagagacccgctcctgcgacttagggcgatgccaccttaaagggcttgacctcctcgaagccagaactgcggaagagggtaagccctttcctgttgtaaggatgcgtcacctttaaaacaccacccacactattaagctcttcaatacccacatgtgagaacaactttacaaaataggtatttttaaccctgttttacagatggagaaagaaacgctagatagacccaggattcgaacccacaacagcttggatgcaaagctcattttgaattctgaagagctgggagtttagcagtggacgaccaaacaaaaaaataccagaagacggtgaaagcagcagctggaaatgagagaaaaattaagaaatagaaaatgctgtttcatgtattagggagtgcacatctttaaagagaagtgaagaacctttttggctaggcgctttctggggaccttggcagttatcaacaagtcactctgaaactaacagaaggtgaggagggagtaatccagaaaggaaactgccatttttgctagggcaagaaagtagacctagcaatgcaatgccatcaaggagttagctggctctagcgttctccgaactttgcaactcattttatattacattgtctgcgtcaagaaatttcaagtaaatgccttgagattttatatgtataaaatgtagtctctggccaggcggggtggctcacgcctgtaatcccagcactttgggaggctgaggcgagtagatcacgatgtcaggagatcaagaccatcctggctaacatggtgaaaccccgtctctactaaaaaatacaaaaaattagccgggcatgatggtgggcgcctgtagtcccagctactcgggaggctgagacaggagaatggtgtgaacccgggaggcagagcttgcagtgagccgagatcgcgccactgcactccagcctgggcgacagagcgagactccgtctcaaaaaaaaaaaaaaaaaaaaaagtctcagaagaagtgtcaagttgactaaatgatttttaagtcccttccactctactatatcacaataatttcccctattttaccttatttaattttcacaacaaccctgcagcctgtaagtaggtgactcctccatggtcagcaggtggtcagtggtcgaactatttaggactatctgatgctctttcctctgctcaccattgcaatacaatgagaaaaatgcaaatgaatctaagtacagtgttctctgggaatatgaagatagaactaaaaactgcctgagagatcagggcaggcttctagaaagttgtgtctaactagtcttgaggtttacataaaccacaccaggctgatgggactgggaagggcccactaagcagtgagaccattcccttttggagagtccttgcatcccctcccagatttcctctttgaggggaaggtgagagaggaggtaaaaggggtgaggaatggagaataactcattctggttcttgtttccccttttccacataaaagtatatttgtcttgtgttccatacaccagtccatactgatgtgatggtgttttttatgcttccttttgaataaacatttcattcttaaaaggatagtctgtcgcatcaactgatgaatggataaataaagtgtggtaatcatggaatatttattcagccaaaatgagggaaggatgaaatcatactgatacatgctacaacatagagtaaccttgacaacattattcaatatgaaaaaggcctgtcaggccgggtgcggtggctcacgcctgtaatcccagcactttgggaggccgaggcgggcggatcacggggtcaggagattgagaccatcctggctgacaaactgaaatcctgtctctactaaaaatacaaaaaaaattagccgggcgtggtggcgggcgcctgtatttccag

SEQ ID NO: 916440 - DNA, 4001 bp, Homo sapiens
gatggcagagtgagactccgtcaaaaaaaaaaaaaaattaaaatgttaaatagaccaagattattagttgagcggctacttaaaggtaaagttaggcgaagtgatggctcacacctgtaatcccagcactttgggaggctgaggcgggcggatcacctgaggtcaggcattcaaaaccagcctggtcaacatagtgaaaaccccatctctactaaaaatacaaaaattagccaggcatggtggcggcatctgtaatcccagctactcgggaggctgaggcaggagaatcccttgaacccaggaggcggaagttgcagtgagctgagatcgcgccactgcactccagcctgggtgacaagagtgaaactctgtctcaaaaaacataaataaataaatgtaaaggtatagctaggaattttttagcaaaggaaatggcgatgctctcttgttactctattccaaaggggagaagttcttgggtttcttttttttttggatacagtctcacttcgtttggaggctggagtgcagtatcacaatcttggctcactgcaacctccgcctcctgggttcaagcaattctcgtgcctcagccacccaagtagctgggatcatagctcgcaccaccacacctgcctaattttttgtgttttcagtagaaatggggtttcaccatgttggtcaggctaggctggtctcctgacctcaagtgatctgcagacctcggcttcccaaagtgctgggtgctggaattacaagagtgaaccactgcacccagcccatctttttttttttttttttttttttttttttttttttttttgagacggagtctccccgttgcccaggctggagtgcagtggtacagtctcagctcactgcaaccttttcctcccaggttcaagcaattctcttgtctcagcctcctgagtagctgggactacaggtgcacgccaccatgcctggctaatttttgtatttttagtagagacaggtttcaccatattggtcaggctggtattgaactcctgacctgagttgatccacccggctcggcctcccaaagtgctgagattataggcatgagccaccgcacctggccccagcccatctttataaaggatcctggtggtcaaaaagccgcctctttctgacagtcacacagaacggcccaagctgagcactgagagctgccaggcccctggcctggtccccatcccacacttctgcttcccgagccctggggctcccttcaggagctgaatgggcacagtgccaggccagatggcgaagatggaaaaaactgccaaaaaggaggctaacaggatgtggaaggagggaatctaggtgttggggaggggcagcccagaccctctcccccaatcctgccttgaagaagaggtcaggctgtaggagagatgcaggaatcaaagaaatggcagctgccccagaaaagaaggaacaccaggaaggagggacatggaggcccccataggctgaagaacgtcggcacacactgatgtcaggtaagtataccactcattacacgtgtgtgcacagacacatatacacacacgctaagagatgtgcacacaagacccctagtaacatagaactcagtgtctatacacatcctgtaataaacacgtatgtgcatagacaactgggctggggaggaagagaaagaaggccctgccttagggacagtatccttacacagacagaaccaggcagcttcacaagcatgggagatctcaaccccaaggcactgaggagcaaagtgaccacgacacacacagagggtccgggactgctccttctatatcacccaccccaacaccgctcacacaccagaatgtgtgcagccaccttccttctccctgggtctccgtccttcagcttcccatgtacacatccgggggccaggttacttacctcctcagggcctctgggatctgtcccatttgccctctgagctgggctgggcactgctctttgctgagataagccagaggggcagggctattttatgccagaggcaggaagtgagaacaagagtgtaaaagtgagcaggaggtgcaatcatgatcattccctcactctcctccacacaccctgccctggtatccagcctcttgggcaaatgacgttgaggggagctgaagagaaaggaccagggggctgggaacaatgagaagggcaggggcaggggaatgcctcctctttgcccagttcctcccccatacccttcctgtgttgcccacctccccgcaaacaccacatgccttgctctgtcttttgcctcctttctttctttccgtttttttttcttttgtttttgagacggagtctcgcactgtcgcctgagctggagtgcaacggtgcaatctcagctcactgcaacctctgcctcccggattcacgcgattctcctgcctcagccccctgagtagctgggattacaggcgcacaccaccacacccggctaattttttgtatttttcgtagagacggggtttcactatattggccagactggtcttgaactcctgaccttgtgatctgcctgcctcggccacccaaagtgctggaattacaggcgtgagccactggacccggcctgcctcctctttcaaataattcacatcctgggtcccctgactccaattcctagggtcagaggtctgaaaagaaggttcttacatctccccatcctccttgcccctgagaatcagctctggaatagccccaccctcattttagagtctcgtggcccatcagtgtctcagccccgacacaggaagtccctctttagtatgtactctaacccactcgctgaattagcgaagcctacttcctctgcttctgtgttcaggcagcgctgggaggatgcaccctttccccacagacaggcttcatcatgaagactcagtatctctgtatccaggccctccaaacagaccccagctgtgctgagcctccagcagaagcttagctcagtccaaagcctttgtgaaaagctctgtcccagagctgttttgagggcacaaatgaatccttttcttccgcttatcctggtcctgaggggcagggatgagatggaagactaaatggaacaggaggatgaatcctcatcctcaaggtttggagacagtacaaagtccccagggtgggcggggaggcctccttctgcccaggggccacattcttcctcagagaggagtctctggcacggatcccgggtgtcaggtcgtgtcttccctcctccctggcccaggcctgcctgcttctccagccagaattcctgctcctgcctttccccacccttctctgctgaagcctgtcttttcctgcatttccagcatcatcctcggccctggcttctccctccctgagtactctgacctcatccctcctgacatttgtctgggaaaaggcagaaagcaaaggtggtctacagctcaataactagtttccctgatgtgcggatatcaccttgccattgtgcctctccctttaccctgctttcgagagctggaaaagcaagaaagtcagtcccaagagaagccacggaggcaggcccagccccctgacctgtgtcctgaggtggtctgtgtgcatctgacccttgcttgtagcctggcaggtcctgcttcctcagggaaatccaccagagcctgtgggctttgctgacctcacctgactttagagtgcactggcttcagccctcactgctcttgccggttccttctcctgggttttgttttttttttttctgagatggagtctcgcttgctgtgttacctaggctggagtacagtggtgcaatctcagctcactgcaacctccgcctcccgggttcacgcaattctcctgcctcagtctcccgagtagctgagactacaggcgcccgccaccacgcctggctaatttttgtatttttagtagagatgggttttcactgtgttggccaggctggtcttgaatgcctgacctcaggt

SEQ ID NO: 916441 - DNA, 4001 bp, Homo sapiens
agcagctgggactataggtgcgtgccaccgtgcccaactaatttttgtcttttcagtagagacgggggtttcaccatgttgcctgggatggtctcgatctcttgaccttgtgatctgcccgccttggcctcccaaagtgctgggattacaggtgtgagccaccacgctccgctctacaaaaaaatttcaaaaaactaacagaggccgagtgtgtgactcgcgcctgtaatcccagcactttgggaggcagaggcgaatggatcactttagcgcgagttcaagaccagcctgggcaacatggtgaaaccctgtctctacacaaacacacacacacccaaaaaaaatacaaaaagtagctggttgtggtggctcaagcctatatttccagctattctggaggctgaggcaggataatagcttgaacccaggaggcggagtttgcagtgagtctagatcatgccactgcactttagcctagacgacagagcgagaccccatctcaaaaaaaaaaaaaattagccgggcatggtggtgcctgcctgtagtcccaggtactcgggaggctgaagtgggaggattgcttgaacccaggagtttgaggctgcagtgagccatgttcatgccactgcactccagcctgggcaacagagtgagatcctgtcttgaaaaaaaaaatggctgggcaccgtggcttatgcctgtaatcccagcactttgggaggccgaggcaggtggatcatgaggtcaggagttcaagaccagcctggccaagatggtaaaaccctgtctctactaaaaatgcaaaaattagccgggcatggtggtgcgtacctataatcccagctactcaggaggctgaggcagagaattgcttgaacccaggaggcggaggttgcagtgagctgagagcgtgccactgcactccagcctgggtgacaaagggagactctgtctcaaaaaaaaaaaaaagaaaggaaggaaggaagagagaaaaaaaggagtagttctggagatacaatctggtggaggtccccttcttgtcatgggggccccacaaccacagggaagaggtaggccccatcctcatggtgtgatgtgaaggtatcataaagccctgctgacctccgaatatgtcccccacctccaaaattccatcccctgaagccaccatctatcagagccatagggacatcaaagaccatcagtctaatccccttatatagatgcaccttttgggttaaggcagcacttcctgaagaccccattacagtacaccttggctagttgggaaggataacactgagaacacatctctgccagtcaacccattagcaagtttgattagatcagctcattgtcatctgcctggccctgggggatgtgtggtgtaggggttgaggtttaactgcgagtggaaaaagtgtgtaaacagtccccagagggccctccctgggaggcccaaggctcagttccacagtgggggcctagagggggagggggaggacacagcctctgcgagatgccccagagtgggggcttcaagcatcaaagaggagcactcccgaggtgtagcaggcatgttagctgtttgtccagcgccatctgaaaagatctgtctatttgaggcagctcctttcggctttttactctgttcagaagggttttccagggcccatgcccaccctcttctctgtcccccacccaaatctcccatttctacaggggggtgctccccttgtgctccctgtgcagttcaattcgtgacacccccatacctgtgctccgtgttgctctgcgctgccccaagctggcttccgctgcctgctctgggctgggctgggctgggctgggctggtaggacctgctcccagggcgggaggggacacacccacctcagcagatctcagcccatccctcccagctcagtgcactcacccaaccccacacgggccaaggagagagtgaagaggaagcattgccctcagaggccttcacggactggccagagaagaaaccccagcagctaaggatacttaatccagccccgactaggaactgcccccacccatcgttcagatattcctgctgtgtctgggaactcttcctggcacacccaccgtctgatgccagatgactaacccaccagcctctcgctgtcctcaccggttccccctgggtgtctgtcttcctttcctaggtctgccaggtggtttagtccatgctactcgtggcttagtccatgccactcgtggcttgtgccccaccctgcccggggccctcttcatgacagtgctctgctaggtcctgcctcccactgagcacacttggctcccgcatcgagcagtcactaggctggatggttcctctttgcttaggtctgtttctcctcagcccgttgtcttgtgtcctcgggccagacaacacagagacaagtggccctgtgggcacagggctgggcatgttgtccatgctcaataaataaaaacaagttcaagttttttggtggtaggtggaaaagggattgtggtgaaatgagtttgggaagcactaggttaaacaggtttctctattaccgcgctccggagggccttaacatgctgtcagatgataggccttgtgttgatcatggaaactgggtgaagggtacatgacagtgcattatacttttctatttttgtgcatgtttgaactgtcatagtaagcaagctttaacaaaatgctgttaattactgcgaacctatagaagggagagagactctacagtgtccctggaacatactttgggatatgtcaacttattaaaggccaatgctgagccaggcacggtggatcacacctgtaatcccaacactttgggaggccgaggcgggcagatcacgaggtcaggagttcaagaccagtctggccaacatagtgaaaccccttctctactaaaaatacacaaaaaattagccgggcatggtggtgtgcgcctgtaatcccagctacttaggaggctgaggcaagagaatcacgtgaacccaggaggcggaggttgcagtgagccaagatagtgccactgcactctagcccaggcaacagaacaagactccgtctcactaataataataataataataaaggccaatgctggagtcatacctcaatgtaggttgttaagatgcaaccacttaaacatccagatcatctggcaaattcctgtacaccaagggtttccttcctgtaatcccagcactttgggaggccgaggtgggaaaattgcttgagcccaggagttcgagaccaacctgggcaacatggagggaccccatctctacaaaaaaatataaaaattagccaggcttagtggcacattcctgtggtcacagggacctgagaggctgaggtaggagtgtggctggagcccaggaggtcaagactgcagtgggtggtgatcatgccactgcactccagcctgggtgacagagcgagaccctgtctcaaacacaaaacaacaacaacaaaaacaaccccaaggtttcctgatctaggctatagttcctggtttttcccttcctgattaagtgcaaggtgcacactccctataccccaggattggtccctttggaaaagatctcatcaggctttggcctttatcctacagaggaacaatactacactcgcatctgacatcacggggcttagggcttcagaaatgaagacaggtgcccacatgcccacatcatccctagggccccagccttcttggccttcctcagttcacctccctgggttctcaggtcttctgcttctcctggcagatggctgcttccctgagcaccattcccatgagattctctcaccggcaggtggatccataaaaccaggggttggggactgactgccacggggcagggtagcagtgctgaggatggggatcataaccagaacaggccacacaggctgaagatcaacattttatgtaaagtcatcttttaaggagggcgcagctcccaccgtgg

SEQ ID NO: 916442 - DNA, 4001 bp, Homo sapiens
aatgccaggattacaggcatgtgcccctgcgcctggcctaattttttgtagagacaaataaaatgttgcccaggctggcctcaagcgttcctcccaccttggcctcccaaagtgttacgattataagcataagccgctgcgtcctgtcaaatgtaaacactaattgctaattacaatgtcaaaaataactgggtcagaaacaaggatgaaagagtaggaagttcaaagctggtgtagtgcaaataagcctagactagggtgctgataaatttggatgatgtctgggtgacactgagcaaactgcacaaccccagttccattccatctttaaaatcttacgattccacagaggaagaaaaaggtgatctttatttggaagaaaggaagatcttggtttgatatgtaataggaaagtaacaatgctattaggcaaggttgtttaaatatgaattaatgcctatcccattatctagattgggttaacaccctctggtgatattatatatcagtgtttctactgaatactggataaacgccaaacttctctctggcatttaaggctttccacacctgcccaactttatctcaaacttctcatggttcagacctctaaccctctgctctagccccagtcctgtttccttatcaccacttacagcttttgcttaatccttcccactcacccgctcctaaagttctataaccttcataaaacgttccaactgcttaaattttatgtatatatatgtacaggtacttcccaatcttggcccttctacaggactttatggcaatcctatgtggtaggcactgttgtcctcatttcatagataaggaaattaggcccagagggttttgcggcctgcgtagggtccttcagtttgtgagcagcaacaaggctggatctgatttgtttgccttcaaaacccatacttttttccattgtactatgctacctccatgtattaaaccatggagtgaggatgcggtaaaaaagcctataaaccagttgtaatacagcttgttgtggcataaattcagatacaccacatcctttgaaccacacgtgtaataaacgcttggaatagtatggatcgattttaaggaggttgttagtcctgtttcccaagtccagcattaaaatgatattccagggtaaatgacaggtaggtggcttggaaaataaaaaaagcaacatggtataaaaagaaaatagtaggactgggacagaaaagagacgaaagtataatataagctggcaataagcaaaacaggcgctcagaatatgaaatatggaatatggggctgaaaaggccgaaagggctaaagttaggggccctatgcctaccgatgagatgcgcgcgtgtgcggggtggttattaatgacagagcaggacacatggccagacagtggaactcaacagagcgacaaataaagacaggtcgtgggagcaagggtagagcctggcacaagagggcgggggcccgactgagaggccagagggcatggcaggggttgaagagaaagatgaagaggttcagagggcacagcgccccagactcgagacaggacttctgtcttccctcagtagctgttggtgtgcttcaggattcacacccgcacccggcacagccctcccgggtggctccgggaagagagggaggtcctgtccccattcctcccctactccccggggactccgcgaggggcggagggaggcaggagggtccttacccaggaagatggagatgatcagccgcagcgcctgttctgacgcgcccagggacgtcgccaacttgttaaggctcagctcctggaaacccgactgcagaacccccgccagcgccaccacagtcccctcgtccccctccgctgaggacgccatcttaactccgggagccccacagggaccccccagctccgcgcgccccgaatgcgggcaaaacgctatcgcttcacccccaattccggctcggggcccgcccacggcgtgcgcattggctggaggcccgccccgcggcgccagctcaccccgttattggccgacctgcgcagagggcggggcctagcgcggcaaggtaggaagagggcgggtctgaaggtttgtaaggcaaaggtgactcctgccgagaatgcacacggggaggctcagggctgggcggggcttggcgtcgggacccagagctgccattggaaaggtctgagcccgtggcccggcgacagttcaactccgttcgaaatgctcccaggaggagccctccggggcgaccgtccggccggccggttcgctgccttcccattggctgaggcgggagcaggcgagagtctggacgcgggggggccgcccgcgcgcgaggttactcccggtcgccggcgctggggttactggggcatgtaacggggaggcgggaacgcccgcgccgcctttcgcgcgccccctaacggcgcctcccggcccgttcttaaattcttaggttgttagactcgtcgccttcactcccggaggttcagcggaaagcccagtgccccaggaacagacattgtctgctccttttatttcatggatcccttttccatgcagtttcctgtagtaaaacatgaccttccccctagaggcgatgaaattaagatatgcctatttaacacttattattttaattaaaaattcaaataattttgcactgagtaatacatgtttatgataaaagttataacagtatagaaatgtaaaacagaagagtcctgtttcccctccctgcttttcattctcacttcctacaggtaatcctgttaagattacgccaaaaaaaaaaaaaaaaaaatctgtcgagcacttaccatatgccagggactgtgctgggcttgggaatagaatcaggagcccagagccacggagtgggaggatgcacaaataatagcatcaattaacgtgttattgcaagagaaggtaagtgctctgaaggaaagggtcaaggttctgtgagagtatgtaacaaaggaatgctaagagtttcttgcaataactcttagttacaataatttgtggcgcattcttgtaaaattacagcttatacttctgtagcacttgcactttataaagcactttcatccgtattatttcacttgctttggctgcgcaatagaatatttattatgatgatgtcctcttacagacacagaggcttggagaaattaagaaactgggtaagttcctttacaagtaagcggcagacagaatttaaacctaggtctgtcaaattccctacccctactcccattttgggcaagattttaaaaaacaaaatatttcattcacacggaaaagtagaggataatataacttctccaggttaagaaacaaacatcacctatacatttgaaaagccggtatatcccttcctgagggcatttccctccttcctttctcagaggtcaccactttgctgactttggtatttatcaatcccatgcctattttaatactttacatacagcatatatccagaaaggaaaattagtatagttttgcatgccttatattggccgggcacagtggttcatgcctgtaatcctagtacttagggaggttgaggtgggaagattgcttgagcccaggagttggagaccagcctgggcaacatagaccctgtctctacaaaaaaaataaaataaaatttagatgagcatggtggaacatgcctgtagtcccagctactcaggaagctaaggtgggaggatcacttgagcctgggaggttgaggctgtagtgagtcgtgatcatgacactgcgctccaacctgaaagacagagcgagactctgtcttgcaaaaaaaaacaaaaattatatatataggcctgtaatcccagcaatttgggaggctgagacgggtggatcacctgaggtcatgagttagagaccagcctggccaacatggtggaaccctgtctctactaaaaatacaaaaaaattagccaggcgtgatggccggctcctgtaatc

SEQ ID NO: 916443 - DNA, 4001 bp, Homo sapiens
ctggagccctgaccccagacaaatgagtcatgtcgacactttccaagatgaatggccacatccccagccatcaggcaaacttagtaagccctgtttccaatcatatcaagcctgttcaatataactttgtttagagatggggccttgctctgttgcccaggctggagtgcagtggcacaatcgcagctcactgcagactcaacctcctgggctcaggtgatcctcccagctcagcctcccgagtagctggaatgagaggtgtgagccactgtgcccgtcttaaatataatttttaatgtaactacataaaagctaaattgaatcacaactagaacttttctaaatttcaagcttgcagtatctttcctgtacttggaaccaggaaaaatttttttctggtctcaaaccttttcgtaggtccttgcaaagttcacaggcttcgtttccaaatggagcacgatgtgcctgacagatcaaagggccctgctcagcccaggaacaggcagctgcctgtgctgggaaagtccggtgtctaacaggtcacaggtcacaccgttcacagcagcgtttttcacgacggccagagggtggacgaatgtgttacatgacccctgccccgaatgtgatatgtacgcacaatgggacgtcagtggtcccagaaatggaaggcacctcggacccaggggccacacagccaccctgaggacctgatgctgagggaacgagcccctctcagaagctcaaataccgtttgatcccacgtgtgaggtctccagagtcgtcaaacctacagagacagacagtacgatggtggtgcccagggcaggtgggggttggtgtttgatggggccggttgacatttgggaagatgtaaagctctgcaggtggatggcagtgatggctgcacggcaacgtgaatgtgcttcatgccactgacctgtgcacttaaaaatcattaagacggcccgggcatggggtggctcacgcctgtaatcccagcactttgggaggccaaggtgggcgattacctgaggtcgggagttcaaaaccagcctgaccaacatggtgaaaccctgtctctactaaaaatacaaaattagctgggtgtggtggtgcatcccggtagtcccagctacttaggaggctgaggcaggagaatcgcttgaaccctggaggcaaaggttgcagtgagccgagatcacaccactacattccagcctgggcaacagagtgagactccatctcaaaaaaaaattgttaaaatggtcaactttatgttaaaggtattttaccacaataaaagcaaaggtcacaggcagacctcatgagtgccctggaggtgctgttgcccctgggatggaagctcattattttcaaatgttctatatatgggggtctctattccgggacatttgcttaaaaatctcttggatcagacccttcttcagtttttcctgcaattatcaatatctagtttgtttctatagtagttcaatcagctaagtaaaaagctcgatgctaaatcttgtcaaagacattgcaaatctccatagatcgtctgcgaaaccacagctttcatgttttgagcgtaagaccctggggctggtgctgtaacccctgcccagactcttctgagtttcggcggcccagcagggcagggccgggcacctggcaggtggggtcatccccacagggcaccccggccgagggcagagctggttccgccgcagggtcgatcctgggctctgggctgtgcacacgtcctattgacaccccgaggacaggacgtgcgagtgactcgtgagattgggcctcccttgctgaaaacttccctggtggctgacagctgcgtggacattcagcggccctacctttttccgtcaggcgccagcagcccctctgtgtagaggtgagacaggccaagctgcagcttctagacgagacgcccgaaagcagagaagtacccagagcagggacccggcagcccggcagtacgctgggcacagtcgcagccccgcctcttccttctccgtcttgttccctccttcggtcccaggagaaagacgctcatctccccacatgagaggctcagtgtaggcgtctggacaggggccagtcccacaaggctactgactccggaccacaaagaagctggaagcagcagctccgcctctgcagccaattgcagagcttttttctctgtgttctgcccccacttccaactcaggaccaaccagaggacgccaaacacgtcctatcaccaaccaccggacacctgactctccatcagccgcccctgccttccccacagcatccccaccaccctaagcggagggacctgtgcccctccccctgcctgctgatctcagggtggggcgctcccaagctccgaactcagagcctgggcttgctgtcgtctgggtggtctttctttatctccacatgcatctgcttatgcagtacacacgtatgggctgtttgctcgttatttatttgtgatcgaccatgtgccaggcgccgcggcaggctcagcgggggagcaggctgtgccccggtgtcaacttggtgctctcagtccagtgcaagagctgggcctggcaacgaacacactgcgcagagagtggtgggcgtcgttaggggcacgacggaggtgccagggggacaccgcacagcagggatgccagggagacttcacagagacacctgcaggacacctgctgccaggagcacggcccagtggggatgggagagcgaggagagcgccgggcacggggaggaggggcggggcacggcccagtgtctggggagctgaggcggggagggtggggaggccagggacagcccagggggacactagagagggcggggaggagccagccctggagctcgagtgccagtcatgctgcccttttgaacgccgagaccattaaaggggtctcgggtgagaaccacaggcaggatgtggaagctcctgggtgcatggtggcctctgtaatgggcagggcgaggctggaagcaagaggacccatgcgatagcatgcatgcccggccagaggggataggaggctcagtcaggcagggctgggggaacaaggagcagagagagaggcagggaagagcagtggggacgctgaggggtgtgaatgtggggagtcagggtgggaattcagagtgagccctggcctctggcaacaggaacgaggagcacatgtacccagtctaatgcagcacctgcactgtcgaccaccagaaaacaaagcacccaaaactcagttagcccaaaaacatgacttgtgatggtcgctgtgtctgtgggttgactgtgctcagctgggcggttctcacacgtgttgcttaggcatcagctttcaggtagtttgactgtgctcagctgggcggttctcacacgtgttgcttaggcatcagctttcaggtagcagctaggctgccgacaattatctgaagactcaacagggctgtgtccaagatggctccttcactcctgcatctggtagctggagggactgatgggctgggagcccatcaactcttctcctcttcacgcggcccccatgaggctcgcagaggcttcctcacaacatgacggccccagggtggctagcaccttccccagagcaagagccccaggaggatctgcaaggcttcttctgacctacccagaggtcacacaacatcacctcaaccacattctattggccaaaagtgagtcccagagacagctcagggactacacacttcctcacccagtggaagcgtgtagggcaggaggcaaggggaggcagggcgggatggggaggggaggggagcaagctttttggagtgatgaaagtatcctaaatttacatcatggtggagtttgcacaatcttgtaattatactaataacaatgaaggtacactttaaatgggtgaattgtataatatgtgacttatatctcagaaatgttataaacttttttgagagagaaggctttaaacaaa

SEQ ID NO: 916444 - DNA, 4001 bp, Homo sapiens
aaggagtactgatacagtattattattttacagctcaaactattcgacttttcacacatgggactcctatagtaataaatcacaaccaaataaagtggaaaaaatacatacacacgtaatttttcttaaacttgcaaattcaacaaatgaaacaaaagatagacactgaactttttctgaaaagtgctttcataagccagtccaaagacaaactcctactattttgattacccaaggaaagggaaggtaagatatggggaacaaaaacatgcatttttctatttatatctgaactcggaaatcatctccttaagacgatttttctaattacgaaaaactttagtagctttttagaccacctattctaaaataccaaataacagagaaagtaaaactcaattccacgtgtttttctgctcctttcaaaagtggaaagaggagacctctagagctttaggtacaaacaaaagaaatatttacaataaagaatccagaccacatggtttggtgacacctacaaagatggttaaaagtcacagaagtacaggaatgacagagctgtccaataagtgatcacagcagggttcctgacaacagactgagtgcttatttatacaagtggaacttattttcacatacatttaaggaatgtgggctagtattgagacaatttactgctggtggaaatgtaattaaagactgtgctaaccaaataaactctaatttgtttttagtgtgccaccaaattatctgcaaaacaaaatcctaattaggtcagctacttttaagacaatgtttaaataggtatcgaaccccttttggttcaactcaacttctgatcaagggcaacacagattttttttctaaacatctaaatccaggaaaaaagaaaaaaagtactgcacactagcatgatcacaatagacaacttgacattgaaaaactatcgaatacaagttagatgccgtgaataatctaagcatatctaaatacactccaggaagcactgtattcattttctctttctcatccctctattattcctaagtgttcacctccagtcatttacatgttcagttccatatgttgtcaatagagccattcactcatgaataaggcagcatgacctccacaagaggcaatttaacagaattagccacaactaattgaaagtctccctgctttcggttaaagaccttatctcctcttccaattgcaataaaaactactaaataaaacgtcccaagaaattaaatatcaatccaatactaattctactttattaaactaaggcttattaaaaacacaaggaatatactttctgatggccaacaattctacattcacaaaagttatttagattagcacaataattttaaaatataaattcttaaacacctgaccaaacctcctaccacattagggcattggaatagttcactagaattgttttaaaaacttaaaattttcattgcaattctgctaagtcaaaatataagattacgtatgaagtgcacttttattttaaacagaacaactactttaaaaaatacaaattttgattgtttactttttacagcactccaattttaaaactgggactgaggaagaaaagagatgacatttggaaaagatcagcatttccaactaaattacattttcttccttgttcttcacgcagttggcagtgatttcaggttttcagacttcgcagctaaaaatccaaaaacttgcataagagctccctgcgctctcccctaaaccgtctgggcgttctgaggagctacagaaatcacgcccttgattctggataatcgagttccgccctttccatagctaccgaccagtctttacaatctggttgaggagtgggaacttacggtctgctaatgtgaaaaagcaagcagagggagaacaacagaagtacgtccaccataacttggagaatgaccgaattctgttgagggggcttcccaaatgaaaagcctgacttcagttactgggtgggaacaggaaaaggagtctgacgcagctagaaactaaaactgaaccagactcataactcagcgagaactgcaaactcctgatgtgtgcaggttgccgcttatctcccctgggcctggcaggagcaagcatttgaaccccttggctagcttagggcgcaggacttcatccccaatctctggcgtcgttactggcccccaaccctggtctacctgcagccagttaggacgcgccaagagcccacctgcgccgcccgcaaagcacgtgggagggaaactgaggcccggacagttctttttccacgcccacggagcgccgatcgcggcctgggccagaaggagctatacggcaaaaaggggactgcacgccgaaccccattccccgccggctcctgttttctcgaatctccagcggcccgggccccctccccccgcgggaagaatacttacagccgagcgacccaggacgggagtggctcgggaagacgcgctagccgcttacgactgcagtccagcaggtccccgaggcagcggcaggtagtggggcatgggcgctcggcggctaccccagagggctgcccgagttccccgcgaccgccgctgtctgaccggccagcgcgccccagcaccgcgcacagcagcagccccaaccccgcggcgcgcgcacggaggctcggcgcgctcatcgcggtccagcggcctaggtctctacccgaagctcccagccggcgcgcgctcggggcccggcacaaacttccagccgagggtgcacgcccgccctcgcggtcgcgtgcgcgctcctccctcgcgctgcccggtcaattccttcttttactcccggcggcgaagccctttcatgcccccaaacagcaggagggaaaccgaaaagaactgccaactgcaacagagttgcagcttgagcagcgtcggctcgccgaagccccttcttgtctgcaaaagaaactttttcgcctccaccccgcggcactgcgccaagtccccgcgcggcggagtagcaaggcgggcgggtagaggccgacgcgcgcccattggccgactcggctgcgggcgtccccgtggccacgtgacaataacaccgctccagccgggggcctacgcgcgggagaaagtggagctgagattgtaggaaattcagagttatattttccagcctctccagccagaagtctccactacgtcgtgggaaacatatatcaaatggagttgaaaggcaaaaggaagtgagcaaatactgggctagttctcggagttggaggtatttaggagaacttcagggaagtaaagtttaattagcagtgttttcaggaaacttttcaattccaaattaaagacactgataaattatcctaccatccacagatgaaagagtggtttcaatgaaaacagctctttcaacgttaatgctggtgggtgttcccccatacatcggcttcaaaagtaaaaacaataataaaacgtaaaactcgtggttttggaaagtgtatattgaattacaaatagccagccttcgtgcactggataaagctgggcggggtgggggatgggagatgaccttctaatagacctcgatggcaatcatagattcctggtaatagtaataataaaagtagtcacagtgacatttcaaagtaaaatgaaaactaagaccttggaggaaaaaattagtatatgcaccttggtccacttgcgctttgagtaatgacacatgttgattgagaatgctaccagggtaaaagtacctcccggcctcctcagctgggggagtggatgtttggggctggattcaggctacaggacttcccagtgaagtttgttccttaacttacaggtgatcagcgccacaagatgttgaaactaatggagaccgcagagatcatgtgctaaggggccttcctcctctgggtaaggaaatagacctagagaacgtaactaatgtgtttgttgcaaaaaaaataaaaataaaagcaagacagaaaa

SEQ ID NO: 916445 - DNA, 4001 bp, Homo sapiens
cactccaggaagcactgtattcattttctctttctcatccctctattattcctaagtgttcacctccagtcatttacatgttcagttccatatgttgtcaatagagccattcactcatgaataaggcagcatgacctccacaagaggcaatttaacagaattagccacaactaattgaaagtctccctgctttcggttaaagaccttatctcctcttccaattgcaataaaaactactaaataaaacgtcccaagaaattaaatatcaatccaatactaattctactttattaaactaaggcttattaaaaacacaaggaatatactttctgatggccaacaattctacattcacaaaagttatttagattagcacaataattttaaaatataaattcttaaacacctgaccaaacctcctaccacattagggcattggaatagttcactagaattgttttaaaaacttaaaattttcattgcaattctgctaagtcaaaatataagattacgtatgaagtgcacttttattttaaacagaacaactactttaaaaaatacaaattttgattgtttactttttacagcactccaattttaaaactgggactgaggaagaaaagagatgacatttggaaaagatcagcatttccaactaaattacattttcttccttgttcttcacgcagttggcagtgatttcaggttttcagacttcgcagctaaaaatccaaaaacttgcataagagctccctgcgctctcccctaaaccgtctgggcgttctgaggagctacagaaatcacgcccttgattctggataatcgagttccgccctttccatagctaccgaccagtctttacaatctggttgaggagtgggaacttacggtctgctaatgtgaaaaagcaagcagagggagaacaacagaagtacgtccaccataacttggagaatgaccgaattctgttgagggggcttcccaaatgaaaagcctgacttcagttactgggtgggaacaggaaaaggagtctgacgcagctagaaactaaaactgaaccagactcataactcagcgagaactgcaaactcctgatgtgtgcaggttgccgcttatctcccctgggcctggcaggagcaagcatttgaaccccttggctagcttagggcgcaggacttcatccccaatctctggcgtcgttactggcccccaaccctggtctacctgcagccagttaggacgcgccaagagcccacctgcgccgcccgcaaagcacgtgggagggaaactgaggcccggacagttctttttccacgcccacggagcgccgatcgcggcctgggccagaaggagctatacggcaaaaaggggactgcacgccgaaccccattccccgccggctcctgttttctcgaatctccagcggcccgggccccctccccccgcgggaagaatacttacagccgagcgacccaggacgggagtggctcgggaagacgcgctagccgcttacgactgcagtccagcaggtccccgaggcagcggcaggtagtggggcatgggcgctcggcggctaccccagagggctgcccgagttccccgcgaccgccgctgtctgaccggccagcgcgccccagcaccgcgcacagcagcagccccaaccccgcggcgcgcgcacggaggctcggcgcgctcatcgcggtccagcggcctaggtctctacccgaagctcccagccggcgcgcgctcggggcccggcacaaacttccagccgagggtgcacgcccgccctcgcggtcgcgtgcgcgctcctccctcgcgctgcccggtcaattccttcttttactcccggcggcgaagccctttcatgcccccaaacagcaggagggaaaccgaaaagaactgccaactgcaacagagttgcagcttgagcagcgtcggctcgccgaagccccttcttgtctgcaaaagaaactttttcgcctccaccccgcggcactgcgccaagtccccgcgcggcggagtagcaaggcgggcgggtagaggccgacgcgcgcccattggccgactcggctgcgggcgtccccgtggccacgtgacaataacaccgctccagccgggggcctacgcgcgggagaaagtggagctgagattgtaggaaattcagagttatattttccagcctctccagccagaagtctccactacgtcgtgggaaacatatatcaaatggagttgaaaggcaaaaggaagtgagcaaatactgggctagttctcggagttggaggtatttaggagaacttcagggaagtaaagtttaattagcagtgttttcaggaaacttttcaattccaaattaaagacactgataaattatcctaccatccacagatgaaagagtggtttcaatgaaaacagctctttcaacgttaatgctggtgggtgttcccccatacatcggcttcaaaagtaaaaacaataataaaacgtaaaactcgtggttttggaaagtgtatattgaattacaaatagccagccttcgtgcactggataaagctgggcggggtgggggatgggagatgaccttctaatagacctcgatggcaatcatagattcctggtaatagtaataataaaagtagtcacagtgacatttcaaagtaaaatgaaaactaagaccttggaggaaaaaattagtatatgcaccttggtccacttgcgctttgagtaatgacacatgttgattgagaatgctaccagggtaaaagtacctcccggcctcctcagctgggggagtggatgtttggggctggattcaggctacaggacttcccagtgaagtttgttccttaacttacaggtgatcagcgccacaagatgttgaaactaatggagaccgcagagatcatgtgctaaggggccttcctcctctgggtaaggaaatagacctagagaacgtaactaatgtgtttgttgcaaaaaaaataaaaataaaagcaagacagaaaacatgaacaaaccaaaaaacaaaccctggaagcttaaagtaagttttcacttctatacattgtttattgcatgctgtctgcccaagcttgtctgtccttggagttgcgtaaactgctcatgattgaggagtggagatagcttgtggagttgagactttaaccctgactctaaggcccattgatttttcactgtagcaaatcactcccacttacgggggaaggaaaagactcactttgaagttaacacaccctattttagatatggtatcccattttcttatttccagctaccattaacaacaacgctactacctttttggatgatgtataattataattagaaaatatctataatgatggcaccttggttttgaatttatgattttgtctgcttgggagtagacaaaacacactacagtcatagtaaggattttccagctcagtatcccccatctatttttatttattttttttatttttttatttttgagatggagacactccagtctgtcacccaggctggagtggggtgcagtgatgcgatgtcggctcgctgcaacctctaccccctgggttcaagcaattatcctgcttcagcctcccaagtagctgggattacaggtgcccaccaccacacccggctaatttttttgtatttttagtggagacagggtttcaccatgttggccaagctggtttctaactcctgacctcaggctatccgcccgctttggcctcccaaagtgttgggattacaggcgtgagccaccacacccggccccccatctatttcatacaaggaaaattaggtataattcattgaagtttttaaaaagaagaaagattccattgtacacatgccattatgcataagcaaggtaacatcagtatggaggcttgctcttgagacatgagacatatgacagggatataaatgtgctaccattttggggagttttggctcatttccttttctcattctttattctcctt

SEQ ID NO: 916446 - DNA, 4001 bp, Homo sapiens
gagcagtagtaaaataacacacagactgtgtaatttaaagactgccttactagcttaacagagtgaatcagaatattgaaaactggcaaattcaataaaggtttaaaaattatgacaataatatgttgaataaccactgctattttaatgttttatttatttatttgtttgtaatttttgtagagacagggtttcaccatgttgtccaggctggtctcaaactcctgggctcaagcaatctgcccacctcggcctcccaaaatgctgggattacaggggtgagccactgtgtccggcaaaccattgctattttaaaactagactatttcttaaactcctaaatagctttctcagataatagtagaaagggtacaataaatccaaaacaaacacaagtctgaaatttttcatctctagcctaccttaagcttatatattaaatatataattatttataattatataacaattaacaaataaacaatgtttatttctcaaaccaagtaactttctataaaaagaatatttatactgctagaacaagaaactggctgaacaaaagcaattgtctgataaatggctaaataagtaaggtttatttttaccatattaggtttctagaatgaaacaattttatagctaatctgacatctgtaatgtgacaactgtcttctcacataaatctctggtaactgtttatatacttttgggtaatacagaaaaatgacaaatattccaatttttaaaatgcaaaatatgtatgtagatgtatgtagagaatgcattaaaactttaaaagaattttcacacatttgatattttgatatacactgaattcataattattttgcccaaccccctaaaatttccaaagaaaatagacgagcaaggccttttctaccatatgagaggaaaaaaactagctaataaaatcagagtataatatataacaacttgcaagttcaaatataccatgcatactagatttttctccttgtttacttttagaaattttgagaagttttaattaattttaaaagaaaaaaacagccacagacaaaaccagcttataataaaaaggcaaaaagggaagttaatggttaaacccatgcatgcacctagccactcagcaaacctctctgaaagccccacaatattgccttctcaaaccatttcattgtcataaactcaggaataatatcctagctgtaatctagaaaaatgtctgtagtcctatgccccgcctgagggtggacaaaaactgggtcataaatgaatatttgctactcactcttcagtttccttgtcttctgctgaagtgcctggcaagtgttcgataattcagtatttatagtttgaaggttccgttgttccgaaattgcttcctctaatttatgcagtaaagacgtagctttttcactggcagtgtgggcttctcgatctcgatccttaccctggacatggatagttagtgctggattgtagcagtgtggccaggaaagaaagcaatggagtgctcactcttatgatgcaggcaaaactgaaaatgtgtttttcttctcagggaagtgataagcctctcctgaacttctgcaattctgtgtttgcatgggcttggtatgcctgagctatttctacagcggttaaagtcctgatatgtcaagttgcctctttctgcagagtcgcctctttcatcagcaggctgttgataccgcctctcttacaactccccctttacttcctctgctcactgttagtcgctagggactgaacttgcagttcctctttgctttttttttttgtttgttgttgttgttcctcctccatttttatttcatggtttgcagggcatctgaggagatgtcccctgaatctaatgtagccatgagccaccctacctgctcctccacatcctccagccgttggctggtttcttggagcctcttcctaaggatgccttcctggttgacagcatcttcctgtagttgtttaatggcttctagttgtttctgactggagttaaaaaaaaaaaaaaaaaaaaaagtccaaaccgcaagctgtcagtgacatttcaactaagagtcaccctgtgaaattatgacaaactcaaacttaacaccacttccttagagatcagaggaaaaagtgaaagtatttacatataaatgcttcacaaatataaaatcttaagcaaagcttattggtcgcttagcctgacaccctcactttacagataaggacttctagtttcatcttttacactggtgtgttcagttcccaccagctgcattcatagcacttagcatcagttgccagttgccagttactcagaagatggctctacaatgaggtcagggtgacaggtgcaacatttacacatcacagctagcttttacagaaaaagaaaggaatggggtaaaggtagggggagggaaaagaaaaggaaagagagctttgtttcatgaccttagcctttctccttaagggttgtcaatcatagtataaacacgtgccacgagcacaggaaggaccgcccccaggcacagatgaaagctggcggttgatatttctactttagtcctctttttgctgaagcttttctccccatcacccttccccaccacagatctcatggtgccattacgttacacctcatttggatccaattctaatctctaaaacatgtaaaaatgcacttactctctgttagcagatgagattatttaatgtgtgttacatgccagtacctcaatgattatctggaaacaatctgacttgaatatggaccttaactcaaagtggtgataaatgtcgggagttgcaaaacagcaaggaagacattgtcagccgtaggccttgtgcatgcctctcaaacgttaacatttagtcagaatgccactgcacactggcacaaatccagccctggttacacgaaggaccacatgagaggcaagaatggtctcacagaatgcttaccatactggtaaacaagcaaacaaaatcctaagcaaaaataaaaactgcctacatcaccacactttccactgagcgtccttcaatagcttatcgttgtctctctcactctctttttctctctttttctttaactgtggcaggaacatttaacaggagatttacccacttaacaaatttttaagtgtacaatacagtattattaactacaggcataatgttgtacagcagatctctagaacatcttcatcttgcataactgaaactttatacctattgagtagcaactcctcatttcccctcccctagctcctggcaaccactattctctctctttctattagtttaactattttagatacctcagagaagtgggatcgtgcagtatttgttgttctgtgactcacttattttacttgggatagtgtcctccaggtttatctatgttgtcatatgtggcagaatttccttctttttaaaggttggataatattcccttgtatttatataccaaattttctttatccaatcatccgtggacattcaggttgtttccaaatcttggctattgagaataatgccgcagtgaatatgggaatgcaaatagctcttccaggtgctgattttaattattttggataaatacccagaagtggggttcctagatcagatggtagtttaatttttaatattttgagaaaactctgtaactgtttttttttgtttgtttgtttgtttgttttttttgagacggagtctcgctctgtctccaggctggagtgcactggcgcgatctcagctcactgcaacctttggctcccgggttgaagcgattcccctgcctcagcctcccgggtagctgggactacaggcacgcaccaccatgcccggctaattttttgtattttagtagagacggggtttcaccatgttggccaggatggtctcgatttcctgacctcgagatccgcctgtctcggcctccgaaagtgctgggattacaggcatgagccaccgcacccggccct

SEQ ID NO: 916447 - DNA, 4001 bp, Homo sapiens
cggctgtgcggcatctggaggatattcaggaaaagcccctctcctcctccggggcagctaattggtggggtgggggtggggggtagagagtccccaagatggcacaactgagggacactaaatatgttttttggggacacagctgcttcctgaccctgtaagtctcctcccccaattgaagcaagttagggagagggagggagataatctggtttcagagaaaaactttcccaatcccaatctggcaagacagaggagggggtgtatgatggtatccagcccagttttgtctttggatgagagggctaagatgacaggaggggatgagatcccaccccttctcaaatcagggacctagcccagcccaaccccatgaccccagcttaatgcttaaagcttgggcaagacttgaaccagtgactcacaagtaggagaaaaaaacagctgacaaaaaaagggaagagaggcaccccatttccccaaaaggatgcagttctagcctaagcctaactctgcaatatacaaagtgtgtgtgtatggggttttgggcttggaggggtgcagggaataaacagatttactaaaggagtgtgggggcacagccataatccccatccaacctccaactctccttccaatccaaactgtgatgaagccagaagtcaggaagaaggcagcctcccccaccctcctaccccagcattccaggccattctccagtccccttccccagtgatgacatctgacgttttttcatctcaaagctcccaggaattaagaaggaaaattcaaagtcacatagtatggcgagctccccctctctgccccccaacacagccctaccccaggctactgacagaggccctgagagggggaagagcctacttcagcacccaggcctccagccggggctctggggtcgattccacgcccaagcagggggccctccctctccccacccacagccttcccgggcctgcctgccctctgcccggcagggtacccctggcctggctcccctttcgagctacagaggccagtgcaaaagccaccccccccacccccacccccttttgcagccgaacattgcaaatccggattccttcacaattcagatggggggtggggggttgtgaggatgtaggggaggcggaggccctccccgaacagagataggaaaagaaggcctctcctccccaggatcagaaaaatggggagccctcttctctctacccaggcctctggtctttgtttgtgctggggggccccggaagcatcatttgcccagggcccccatcccccaaatcggaccccatccccgcccccagtcgggccgctgctgtgtcagctggactgggataacaaaaggcaccccctcccgcgtctcccttccccatccgtatgcaggagtgggggctggggagagggtgcccccaggggtccaagggggacgcggaatctcactcaccgtcgatagccgccgcgaccagagctgagagcaggggcagcagcaggagcaacggcggggtcagcatggtgtgggctgatgcaagcagcagccccttcccctctggtcctgctacttctctccttcaccccccccagttggggggtcccccttttcctcctttccccctcctccttctctgttcttattctttccttcggcaaagcgcaccaggggcgtgggtgaagaggtagagttccgagccccttggggagggcctgctgacgggggtgcgccccctgccccgaaatccaaacccttcaccccacccccccgcttcactcctcgctgctctttccccctccccgggcgaagctcacagccccatctcggagccgcctccggctgcaaaaatgcacaattgggaggaggcggggagggggggtggggggcgtggaccgggtaggggagcctttggagggggcttgatggagctctgggggctccccttgtttccgcctcctcagtgcatgggcctggagctcgcaccgctgttccccggactgaagtgccgaggggggggctgatgggggagagggaggggacgggttgaggagggagggagggaaggggcggggaaagaaaaaaggttggtgggtggggggagaaagagctacgcggcaatccagtgagtgcgcatgcgccgatttgacgcgctgcccgggggagggcgacgcggacccgcgacagggttcggagttctggaaagcggtccaagagtgagggtcccggggactcgctggctagtttggggcctggggcgccctctcccctggctgggccctcctccctggtgctccagagagcagaaggggtcgagggtgggattgggcagtgggcggagagctgagcggctcccctttgaaactcagtgtcatactctaggatttcaggctccctccgggggcgtccgggactcagtggtctgggccgaggctcgattttctaggggaaccctgaaggtgcctcctctgcccggggtggggacagggaccgccagtccgcggggaaggtgcagggaaaggctgagctttgatttggagactttggaagaccggactgggattggggcctgcgaaggagggggcggggttggggagggaccgcgaggacccgcccccacctcgctcccgggctcggagtaaacagggacacccgaggggacacgccggagcttgtccgcccgcgtggggctcggggatggagcccaccttagtacccgcccgccctgctcgcccagccctaggcgcgggaggggcaggccctggtttggagggaggtgagtcaccagcgggtggggttgaggaaaggccaccccctttcgcccaagaagtcggggctcatttatttttctgtttttttttttttttttttttttaataccttctgactggcttgccatcaagttagggttttagattccgagcgccaggatttggaataagatgagggactctggaccttcgtttccaggcctcgggttccaaggaggtgtctgctgagcgccggacctttgtccccaggctcagcccacacgggaatgatactttgcagaaggcaggcgccaggcggttcccaggggccagtgaacgtgcttttggtcactgcccccttctgggcggcgttttatggctgttaccttagtgtctgactttctaggtgtctgcatgtcagagttcaaggagcggggcagacgacgtcggctgccaaaaattgacgctggagaggagggactgttcccccttttacgttctagttacggaaaagtccccactccagtctgtccttggcagaaacaggagcagcacgaaggacttgcctcctaatgacagtgagctcaacctttagcttcttccagccggctttgctcagcgcggtggccacctgcctttagtctcctgggctagaaacctcagactttatgccaactcaagggggcctttccttcctatatccaatcttgccagcctgtgctccaggcttgtcatttttttcctctgaagtatatctcagatttcctccatttccactgccagagagttgctccaggcaggaacggggtcttatttctccttttatccagctcccatggcccaacacaatgtgagacgcactatgcggactcaccaaatgcctacgaggttcctcccagggcccctcccagtattgggatccaagtgaaatcaggtcgaaacagactttagacagcttgacagctttgagaggaaaacggtatctggagcaaccacatgtagcctgagggcttgaaggggctttcctccctccccctacccatctgtcaggtgaatcttccaaaaactgctttcccggtgtctcttccttgctggggaacctctagtgggtgtctatagaccagtcaaatgtgaactcctcttcagtcatggctttccaaaacctggcctcagtcagcatgcacttctcacttgcaacctcccatcccctgctgtctcctgaatgtgaatgtgtattttta

SEQ ID NO: 916448 - DNA, 4001 bp, Homo sapiens
cgagacaatttaaactattacctcttccaggtcttgttacataaataagtgcaacctatctaaattccaataatgaacaaacccagctctggtctcaaagctggtgttaaacaaacggcatttacatcacacgcttctcctccaagaaatacaactagacaaccagaaacatcccaagttataagttttcccacgactctaaccaatcagctggttctcatatttgtcagccctattaaccttatgtcttaaaatacatacatattcttatgtcaaatatagttgtttctaacagctacagcaaaacccctttcaatagagtatgccaataataaaataagtatatacttatgaaacctctccagtacgtaacacttcattaaaatttctgccacaaaaatctaatgaacactacctttccggggtttacatgtgggaaaactttgtaatatgcttagagtatcaagtaatataacatgcaaacacaatgctgcattactacagagtaactgaagaaagtatttctcctcctccaaaaaaaaactcaatcattctcatccgaaatacatatacacagtacacgcaaaaatatacacctgtcacagactattagttactattagtgttctgtaaacttaaattagtttggagaacttaacaaaagtttagcttgttaacacctaaaaatctccagcgaccagcggtcacatgcctgaaaagaacttactatgaacgccagtaagaactttaccaaaccaaaactacaagccaccgtatcgagcagtacttaaattcctctgctggtaaatgctccacagccatcacagccatctcaagttcaacactaaatagtttgagaagagctgccgacgggccagtcaaaaatctttgtgaactgtcacaaaagtcacagagcatgtgtcagctttgcagtccaattcaaaacatcatagtgccatcgaattcaagcgattcccagagcaaattatctcgaacagcctatgcaatttaccaaagtgccaagcagtccccaggggtgcagagcaaattatcattttggtcccaggaccggctcctcttcacacgaggatgaatttccctacttagtgccaactgtacacttgcatactccgaaaataggggcaagccgtgaataccagaggttacaagggcaatgttttattttattatgggctgaagctcagaaggctcccaatgctgaaacgctcgacctataaccccggagtcactttccaactgcgctctcacccagggtcattatatcccaaacggaagccaatcattacctgtaacaaggcctggaaaaaatagcaagagggctttaaaagttcacctaagaaacaccgaaacggggtggggagtgggtggcggggcttcgatggataaggccaaccttaaagcatctcggactcaaacattttaaaagccaaaatacgtacaaagacccttttccctggaagaccccaggcagagagaggcacacagacactcagtcatcccgacagcatggggtgccaagggttccctaagaccagcagccgggatcgaagctccgatgtgtccggggaaggtctgggaagccaggccaggtccgcattgtggccgggcggtgcacgcagcccctgctcccgggcccctttctctccccctccccacgaccaggcctctccccgctcctctccccttctcccttcctccgtccctcccctccccctagacacatacaacaaggccacctccccccgaaccccaccaactttccagtgcccccactcttcccacctctcaggagcacacagaagctgcaggccaggaggctcctcaggacggcccccatcttcccttctcgcgttctcttctctcaccggcgaggggtggccagaagtgggggaggcgaggagccggggcggccgccgcagcggcagggctgcacgctcatacttcccagcttcccagcgagagaagaaagaaaggggcacgtcaaggttccgcgcgcgccgccgccgccctctctaccgcgccgctcggccccgggctcgcgcgacgccagcgtctgcttccatcccgccgcctcctcccccggcgccccgcttcccccgcgcagctcctcattcagcctctgcctcgcgcagcggcgcagggatacggtcggcaccgcctcctagggtcgccgcgaccgtgtccctgcgcgcaacgagccccttctcccggtactgcctcctgtacggccagggaagggagtcggcaaccgcacgcacagcctctgcctgagaccctgggagaggttctgggctagcagaggcgaactgggagggaaagcctcctcccggtggcgcattccagcgggattctttcccggaccggccgcttcggccctccccgcggagggcgtgaggcggcgttgaacaacattggagccggcgtggtcgggactactttctgcggctcggccgggcagccgtctgccccgctctttgtgcggccgccgccggcagggccaggtggggctccggtctcgcgcccccagccacctgagactgcccagccgcggtgcacgcgcggggagccacggcggatcccgttgcggggtgatgagctccgtcttcggggttggaaatcggtttcagcatcctttttttgggagggcggaatttttgaacgctgtttacaccggctttcagcgtggatctggtgaacgatattaaaacgccaattcaaaactgagattgtcatttttctcccgccttcccagaaatacaaactgcccccagaattaagcccgaccagctaaagatttctaaactggcagataaaattccaagataaatgcctcaaaacctaagagcaaagggacaattggacaagactatttaggattttacaagttgcatataataacgaatgtttggcatgcttcgattatcaattctcagcttgagaaggaaaagattccctagaatctcagactgtgcacagcctctgctactcccagtgcattgggcattcaggagtaatggcccagacgccccctgaaatcacctgccaggctttcgtctgggcagaggcgctccaacagttaaccctaatggagccatcagatgcatcctgcccagctgtcacacgcccttacctggaggcagatgggcaagaaagtggagctgctaccacaatgttaacaagtacctcagtgacattggagttcactagtgcttgaacacaagttatcatatttgacactcaaaactaccctggggaaaggcaggttttgttacttattctttattgcacagaggagcaaaatgagaacctgagaggttaatgacttacccagggccactcaagtaatgaatagcagtacctcagcccaatccaggtctctgacttaagccactccgctccttccaagaaatgcgcgctgaaccaaaggtgctgcaggtttgtaagtagatggacagcagaaacagccaaatcactttctcccaaattcacctgaggtctagtcaccgtttatttaaatgacctgcttctaagaaccaagtgagttttgtattctggcttcctcaaagcaggaaactgggccgggggcgggtggctcaggcctgtaatcccagcactttgggaggccgaggcggacagatcacgaggtcaggagttcgagaccagcctggtccaacatggtgaaacccccgtctctactaaaaatacaaaaaaaattagccgggcatggtggcacacgcctgtcatcccagctgctcaggaggcagaggcaggagaatggcttgaatccaggaggcgcaggttgcagtgagccgatatcgcgtcattacactccagcctgggcaacagagcaagattgcgtctcagaaaaaaaaaaaaaaagaaaagaaagttaaccttcactttcacaggccccttccaatgtctggggaggggcctttatggtatgttcacatggtcctatttgcaaaacaaagataatt

SEQ ID NO: 916449 - DNA, 4001 bp, Homo sapiens
gtttgaaactagcttgggcaacatagcaagacctcatctctacgaaaaaattaaagacttagccaggtgtgcacatctgtagtaccagttactgggcaggctgaggcgggaggaaggcttgagcccagtagttcggggctgcagtgagccatgattgtgccactgcactccagcctagcaacagagtgagaccttgtctctaataataataaaaggggcagctggagtccaccaagaagtattgtccatcagggatcttttcagcaggcactaaactgctggggaaagagtttcatcttgagcctttacaacaacaaacaacttttttctgtgaatctgactgattgcctaggtagaaatgtccttttcggtggcctcagtgatacattgatactgtttatggtcatttacagtaaagaaaatatgtcctgcaaagagacagaccaccagaatatttagttctatggcaaataccttatttgaggagctcatgagcttcatgaccagtcacttctggagagtgcaggagttcagagtgtcccagccccttttgctcttcagtgtttcaaaatacatgtgtggagaagctgttttcttgcaaagaagttatgatctctggattgtcatgccatcattggcacacaactcccctctggaagaggagctgtttgccagaaatattttctcagtgtgatttatggcattccacctggctctctccatcagtctctactagcagagccactcccaaatgacccagagccatcctttccactccaatggagaggcttccagaacatgctgcagttgggtccttggcattgacttgcaactgaagctcctcaggagttggtaggaggaagtagagggactggtgcctgtagctcctggctttcctctctgaccaacgcatagcgcctggcttttctagggtcgggctctggcgtctcctctgcccatctccccacacggcgcacacctttggccaccttgggtgcgttcctgcaaggattgtggtcatagatgaccagcttcagacttgacaggtgcgccaggctggggaagtaacggatgctgttccagtccacatcaatcacctccaggaagggcatgtgaagcagcacagtgggaaagtcagttagccggttgcccgagagccagatggtcctcagctcctggaggcgccggagctggcctggcagcaaacgcagggcgttggagccggcatgcagagtcttaaggagactcagctcacagaccacatccggcagctgggtgaggcagttggcctcgatccacagggtcctgaggttctggagcaggctcagctcactggggaggtcgcagagtttgttgttgcccaggtagaggatgcagagctgtttcaaggtgcacaccacctggggcagagccttgaagttgttgaaatccaaggccagaatctgcaggttctgtagctgccccagctccggaggcaggctattgaggtggttgtcgctcaggtagagcttgaccagctccctgaaggagcacacgtgcagggggaagcggcgtaactggctcccactcagatccaccatcttgtccagcggcatctcacggaggtccctgaccacatagttctggcaacggtcagcagggatgaaggccacgagggccctgatggtgttccccatgcggaggctgggggcatggcgagccccagaggacagactcactgagcggggctggctcagctgactgctctggggcctatcctaccctcccattataacttggggattgcatgacaaaagccagtcactttgacagagaaaagtgctcctgatagcaacttgagtgtccggcgacagcgcaacagtccggcaggggctgggaggccatgtctgactcacatgcttgcctttaatcacctaagccccaatcccctttatcaaccttttttcatttcaagctgaaaatagctttgctgtttttttccctaatgataaaatattaacacattacataaaggtgtaaaagaagaaaatgaaaaacacccatagttctattacccagagataaatactgtacacatttgcatgtgtcctctagtcttttcgctataagtaatcatttgttttttaaaattgcactttaggagctttttttttttttttttttgacagggtctcattctgtcacacaggcgggagtgcagtggtgcaatcttggctcactacagcttctacctccctggctccagcaatcctcacacctcagcctcctgagtagctgggactacaggtgcacaccaccgtgcccagctaatttttgtattttttgtagagatgaggtttcgccatgttgcccaggctggtcttgaactcctgggctcaagagatctgcccgccctggcctctcaaaatgctgggattacaggcgtgagccatggtacttgaccaggaaccttattttttaatcatgacgtatcatggacatattttcatgtttgcagatatctatgcaattattttaaacccctgcatagtattccattacatggatgtgcagtaatttaaacagttttctgtggttaggcatctaggttgtttacaaagcatgactattataaacatccatgtgcatacagatgtgagcagcaatccactcatttctttagaaaccgtccttagaagtgttgctggagcaggccaggtgtggtggctcacgcctgtaatcccagcactttgggaggccaaggtgagccaatcacttaagcccaggagtttgaggtcagcttaggctacatggtaaaaccccatctctactaaaaaaaacaaaaattagctgggtgtggtggcacacacctataatcccaagtacttgggaggctgaggcaggagaatggcgtgaacccaggaggcggagcttgcagtgagccgagattgcgctactgcactccagcctgggcgacagagcaagactccatctcaaaaaaaaaaaaaaaaaaagtgttgctggatcatagatatgcatcatttacaggtttttcattgatggctcctctgtaccccaccaaatctgagccagtacacacacccaccagcaatggttacaggtttctaatttctcatgtcttcattcttatcagatgatatctttccacagtttaaaaacttgcctttgacaaaagataagtagaaaagcagaagaaagagaagcaagctagccttctgcatgttaaataaattcggatgtattcctacagtgcacctttgtcaggtatgtttgaccacccattaaaggtttgtgtttcccttccacagtgtccagttgttccagacaagcagctgtccagccaggacaatttcctagtgctggtctacaggggaaactcttcaagttctggccaaagtaatgtgggcagaagtgttagatgtcacctctagacttggttcattgtaaaacaaaccttttgcccttctccacactctccttccccatctactggctggatgttgtcacccagagtgactatagcagccaccaagtatatggaagtcatatgttgcaggtggcagggccgtggtcatcctagattcctgaataagtgctaagagcaaaacatctccttaccctcctcactcccacttgatccccaataggattgaggtaaatgagaaataaatgttaattatgtgaagtcatcgagattgggggcttatcttttatactactttatacatacagcagttgctaaaaataaggaggcaaatccacatatactgatatgggaagtgattccggataaataaagtagggagggaaaaaagcaaatttcagaatagttttttaatgattcccatctgtgaaaaaatatatctttgtgtgtgcataaaaatatctgtaagaaataatggtgattaactctggaaaatctacctgagggtttgtgggtgatagggatgctgacttttccatttacatccttttgtactcttgatttttttaaaaaacta

SEQ ID NO: 916450 - DNA, 4001 bp, Homo sapiens
catactgcccacttctgttggcctcaggctaggaaggaaagaatcttgtgtagcccatcctaaagacccacctttgagattcagggtttcaagacgaggatgagagatgccttcagtgtcagtaatctggttataagcaaaactagcaatctgcaggtagggcagttcattcatctgggcacttcgcagccgattgccatcagccttgagccagagcaggtgggtgaggtagttgagtggagacaggtctgtcaggtggttctcagaaatatccacatagcgcagatggatgtaggagcgcagcaagtagatgtctgtcaggtccctaggagatggaagagggagaagaaaccaggtttagggttaagcacccagtgaggactggcagagttgctaaagcagaaggcaatatggagatggcttataatggggagaagaatgggcaacagatggtaggggagaagaagggtaagagaaggtaggtgggttcttaacagtgggcagagagacctgtgtctgtgaaggacagagaacccatactctgaaagacaaataagggaatccagcaggaatccccccatatactctcaatctccaattccccaggtcagctttgataggagaagtctcagagctcctgaaaagtaaattctgtccttccctttccactaggcatgagaagagtcaaactctcaaccagaacacccaggaatgacagtgggaaaggagataggggccctacagtctcacagtcctcatctggtccccccaaaacgcacctctctttaacctccagcttgacataagcatgagccagcccattgcctgtcttacagagcagagaaagcccttccttcatcatgtcctccgtgaggggggtgggcagccactgcaggtagaagtggagtaaggtgtctctcccctgcccaaccccctccttcagccctaggacccctccttgtccaggctctcacttcctcagggaactcttccccctcttttctgtagtcctccccctcctctgtctccttctcgtcctcttctttctcagaatcatcctggtctggctcagagtcttctagatcatcttcatctgacatctttcttccctcctgaaagctctggagtcagataagctcagtcctcctcctgaaaaagaaggtctcatcagcttctgccagccttcagctccttcatcgtcattgacacgtgccactcccatcacccccatgacttctgacccaccaactctaggcttctttccttatccctgtgaacatctcattttgattctcaactcccacttcacactttccactgaggaccccctcccttcaggatgtcacccacacccccaggcctttcctgtccttcacagtgactccagctctcctccagcagccgggtgtccctatttcctgggcttccctctcccccattcttcccacctcccccttaagccatgctctccaatcttccctaccaattcctcctcctctcctctcagctcccattgcgccatccgtaatccctgctccattcatttcttctacttttccctccccactgggccaatttccttgggccctctggtacaccagcctaaagcgcagtctccaaccctcccactcaattcgccttagcaaaggggctcagaccctgtttctgctcaatcagaagcagttctggagaggcccttggtcccgagagggaaggactgtttagcaagcgggcgaggggaaggaggggttgtgtactgctgttatggcaacggggacggggcacttggcaactgcagctcgccaccgttgagagtagagcggcgactacctgatgcgcaaatcagccggggaggggattgatcagtagttgcctggttaccacgccactttcccgtcccgggaacccggatgaggcgcggaaggggcgttgggccgctaattggctgaggacaaaaagaagtgggcagggctgagaagcgagaagagagggggcggggctagtcattacgtcacccaagaccttaaagggaccggacatcttcaatgcaaaagtattgtgaattcaggaaaaactcgtccttcgaagcaaaaagggcggggctgcgaggaaaagcaagaaacaccaagataaggggtcttttccccttccccctatagtttctgctcattagttattttcaggtagacctttggaaggtggcttggtggagcggaaggagtccagacccagataccttaagaactgggttggagtcttggcagatctgcatttgctagctaaacgtacccaagactctttgttatctgtagaattagcttaactatatcaactgacagggatccagtatgagttatcctggactggtttgatgcaaaccttttagtgggtggaaggcagaaaattcaacatctgcccactaaaatactcctgatccaacgttgttatatcagtaatcaacaggaactggcatagccaaacccaggcactcaggcctgtctgacatgttgaaggagatgaaaaagatgttgagatgcaataaatatttctggagagtttgtgcgagacattatgtcaaacatctttacaactgatatttaatctctgcaacagtcctgtaagatagacatttgaaagaagaggatactgaggctcagggaggttaagatgacacaattcctgcctggggaaagggggatgttaccaatcttgttgtggaatctaatgtaaatgaaacaatgaggtaaccaggtaagatggcatgtgattcattgttaaattgtgcccacagactttatataacggcaaagtggtctggtggaagatgtggtgggcaagaaatcaggaagtattatattacctcctgcccagggcagcttggaggaatgtggttaataggcaaatctgtttacttggtgtcatggaaccagtagggactttaaagtcagagacaccagcttcaaaacccatctctactacttaatacctgtgtgtccttcagcaggttatgaaatcttactgaggtctaatttccacagtcgtgaaatggggattattaaaacgtccacctgtaaggattgttaagggattaaaagagataatgtgggtaaatcgccttgcacttagttgacccttagtaaacattttcctgctcctccccacccctggcctgtgtccttggtactggggttgctgtgaggaaaaagaaataataaatatgaacactctgaagagtgagatgtgctatacaaatgaaagttattgtattgttggagtgtggagaagggaaaaatccatgtggtttgatgtagtcaaaagaaatggatatgagtttccttggccaagaagaaagaggaagacacattagatgggaagaaaagttgtgatgtaagggttaggaaggtgtccttgaacatacacttttgttattttgtttttatttttgttttgaaatagagtttccctctgtcgcccaggatggagtgcggtggagcaatcatagctcactgcaacgtccacctcctgggctcaagcagtccttccgtctcagcctcctgggtacctgggactacaggtgtgcgccaccatgccaagttaatttttttgtattttttgtagagacaaggttttgctatgttgcccaggctagtctcaaactcctgggctcaagcaatccgcccgcctcggccttccaaagtgctgggattataggcatgagccactgcgccctgccatgcttttgttaagcacttaatctgtccctgtgctccgggacagtaaagcacagaagtccttatcttttatcttcaagaggtgtacagttcagtgacaagattaagtacacaagtaattcaatataatgagacatgttataataatcatacccaacatttatagagcttttactaagtgctagggatcattgtatagtatatgcatatacatgatatcatatattcggggcagagatttcagaggcaggaatcacctgtggtaatgct

SEQ ID NO: 916451 - DNA, 4001 bp, Homo sapiens
ttcccctaccctgacccccacggtttaaacgaagtaaaactaacacagacccttcaaaaaacctttactaggacccaggagggtccactgcagaactcaggggtggaagctgtgccatgatggcttccaggggtaaaggaagaagaaacgcaaggctgaccgagtagccggccctgcctggcacacaagccagggagatgaagcagatggagggcaggctggccttcgtttcagccctgaaagcaggatccctgacgcgctgtggggaagggtgccctccccacaacctcccttaggggagcggccaccctaacatcacctaccacgtgcccagcactgaccttcttgtctattacccgcagggaccggaagtaggagtagaagaaggtgtctgtgatcgtcagcgggttccggatggccaattctctcaggaaactgtcttctgcattcgagttgttcagcagagcccagggggagtggcggctgcggaccaggcccagcagggcctccaccgtctcctctccggggctcaccacatcctcctctctggggacaagctccctccaagttcgccaagtttgaggaagaaagcgcgacttattctgcagtggcagaggagggattttctgtaggtgtgacacagcccccttaaggacaccaaactctcaaaacagaacagatcataaaactggacgattagggatagagtttagaaatctagagagtaggccaggtgcggtggctcatgcctgtaatcccagcactttgggaggctgaggcaggcggatcatgaggtcaagagatcgaggccatcctggctaacacggtgaaaccccgtctcgactaaaaatacaaaaaattagccgggcgtggtggcacgcaactgtagtctcagctactcgggaggctaaggcaggagaatcgtttgaacccgggaggcggaggttgcagtgagccgagatcacgccactgcactccaggctgggtgacagagcgagactccgtctcaaaaaaaaaaaaaaaaatctagacagtgaataatcaataattttgatggattattagccatggatataactacagatgaggtgagatacaaaataattaaaaggtgccattccttttaaaaaggcaggtggatcacttgaggtcaggagtttgagaccagcctgggcaacatggtgaaatcctgtctctactaaaaatacaataattagccgggcatggtggcaggtgcctgtaatccctgctacttgggaggcggaggttgcagtaagtcgacatcgcgtcactatgctccagcctgggcagtaagccttcctgggccacacctgggcgcccctcgtggttgaagccacgggagggaagggtctaggactctggagacagggaggcaggatggggggtaaccccttctcctggactcaaggtcgcaggcttcaggctgagccacctctcacactgcctcaggctcttattaaatgctcggaggctgggaaaagttgtggaactctttgcccaaaacaaaagcttttcaccccaaaaggagcctgcccactagaaatctggggtgttgacgtcttcaagtcagggagaggccccagcccaggtcagctgatgtgctcaggacgggccccgctctcctccccgcgcagtgcccgcgactcgggccccaccgtcaccctcaagccccacccgcccccatgtcggcggcccccagaatgcgcagatcccaggccccagggaccagcccgctccgctcgcccgggcccgtgcctccccgcagccggtccaggcccccagagttccggccccggcgcccgcacccagctgccggcaccgcacgggaactcgcgcagacacagcttccgcaagtgctcgcgcacggccgcgctcacggtcccggtcccgggccgctgagtcccaggcccggcctcagactcggactcggactcggactcgtacgacgcctccatggcccgggccgcgttgcccggcaaccgctaggacgcgtgcgcgggggcaggggcctctccaggcgctctcacctgccccgagggaaaagtcccccatccggatcagacagcctggccccaaccacctgcgttttctcttctgccctcatctataaaaatgggataacagctggtggttctaagtgcggcagctcccgcaggcagtaagcgccatagctgacctgtttcttagctcctgtcaagcactccccacggaaagtcatcctatacccatctgacagatggagaaaggagaagagggcccaaggtcaaacatctcgactccaaccagccagtgggttccagggtggtctctctaaccctggagtcagggattttatcactgtccacctgtataactgtttaatcacccagacctcattttttaaattttttatttattttattttattgagacagagtctcgctctgtcgcccaggctggagtccagtggcgagatctcagctcaccgcaatctccgtgtcccgggttcaagcgattctcctgcctcagcctcccgagtagctgggattacaggcgcgcatgaccacttccggcttttttttttttttttttttttttgagaccgagtttcactcttgttgtccaggctggagtgcaatggcgcgatctcggctcactgcaacctccgcctcccagattcaaccgattctcctgcctcagcctcccgagtagctgggattacaaccgcctgccacaacgccccgctaatgtgtatttttagtagagacggggtttcaccatgttggccaggctggtctcgaactcctgacctcaggtgatccacccacctcggtctccccaagtgctgggattacatacgtgagccaccgcacccagcctaattttttgtattttagtagagatggagtttcaccatgttgcccaggttggtctcaaactcctgggctcaggcaatccactggcctcagcctcccaaagtgttgggattacaggcgtgagccaccacgcccagccatgaagcttcttttataaggacattgatcccattcctgaggagcccccaaacttaatcacttcccaaagggccccacgttttaatactatcacactgggcatcaggttctgacaaatgaattttggaggaacacattaacatctctcattctttttgactatacgatatcgggacaactttactgttattagaaaaattaggctgggcgcgatggctcacccctgtaaacccagcactttgggaggctgaggtgggtggatcacctgaggtcaggagttcgagaccagcctgatcaacatggtgaaaccccgtctctactaaaaatacaaaaattagccaggcgtggtgacacatgcctatagtcccagctacttcggaggctgaggcaggagaattgcttgaacccaggaggcggaggttgcagtgagccgagatcacatcactgcactccagcctgggcaacagagtgagactgtctcaaaaaaaaaaaaaaatttatccaaaactgggagttaaggcaaaaagatgaccatatgtcctttcttttcctttttttttttttgagacggagtctccctctgccgtccaggctggagtgcagtggtgcaatctcggctcactgcaagctccgcctgccaggttcacgccattctcctgcctcagcctcctgagtagctgggactacaggcgcccgccaccaagcccggctaattttttgtatttttagtagagacggggtttcaccgtgttagtcaggatggtctcgatctcctgacctcgtcatccgcccacctcagcctctcaaagtgctgggattacatgcatgagccaccgggcccagccaaccatatgtcctttcaaagaagaaaatatccttttttttttttgaggcagggtctccctttgttatccaggctactgtgcagtagcgtgatcacaggtcactgaagcctggacctcctgaactgaagcggtcctcccacct

SEQ ID NO: 916452 - DNA, 4001 bp, Homo sapiens
ttttgagacggagtctcgctctgtcgcccaggctggagtgcagtggcacgatctcggctcactgcaacctctgcctcccgggttcacgccattccactgcctcagcctccagaatagctgggactacaggcgcccgccaccacgcccggctaatttttttgtatttttagtagagacggggtttcaccgtgttagccaggatggtctcgatctcctgacctcgtgatccacctgtctcggcctcccaaagtgctggaattacaggaatgagccactgcgcccaactagaattctaattaataaatcataaatatagaaggaatgagggaaatagaaaatcatcattagaacaccacagtaataactgcctcaggcaggatccacagaagaatgctgaagttagcaggtgaaactttaaggagaaacaggaaatctgcatagcctcaaagaatctcccttcaaaccatggtggtggctttaacatatgtccacaaatcttcgatattcctccctccaggaggtggggcttaacttccctcatcttgaaggcgggtgggacttggtgactcccttctaaagaacagagcacaagagggaatacggtaaggtggcaggggagatgcatctcagacaccacctctggccagtgagcccacgcttgggtatcacgcacccctcacatgacacaatgagaaggtacctccctcacttctctgtgatcttccaaaaccaccatcccagtcccatcaggagaaaacacctgccaagcccaacctagggtcaattcacaaaatccttgactggcactcttcaaaagtgtcagggtcatgaaaaacaaggaaaggctaagaaatggtcacagattgaagactaaggagatacaagcactaagcacaatgtgggaacttggactgactcttggaccagaaaacagacattagtgaaaaaaatggagaaaattcagacagttggtagtttagtgattaatattgtatgagtgttaatcgcttagtttttataaacgtgcacagttacttaacaaattcccacttaggggaagctgggtgaagggtatataggaactctctgtactgtctataaattttctataaatctaaaattacttaaaataggtcaggtgctgtggctcacccctgtaatcccagccctttaggaggctgaggtgggtggatcacttgagtgatcagctcgagaccagcctgggcaacatggcgagatcccaacatggtgagaacccacctctttttttttttttttgagacagagttttgcctttgttgcccaggttagagtgcaatgatgcaatctcggctcattacaatctccacgtcccaggttctagcaattctcctgcctcagcctcccaagtagctgggattacaggcatgcaccaccacgcccagctaatttttatagttttagtagagatggggtttcaccaggttggccaggctggtctcaaactcctgaccttgagtgatccgcccaccttggcctcccaaagtgctgggattacaggcgtgagccaccacacccggccttcccacttctattttttttttaattacttaaaacatttttttttgccaggtgtgttggctcatacctgtaatcccagcacgttgggaggctgaggctggtggatcacctgaggtcaggagttgagaccagcctggccaacatggtaaaacctcatctctactaaaaaatacaaaaattagccaggtgtggtggtgcacacctgtagtttcagctactagggaggctgaggcaggagaattgcttgaacccgggaggcagaggttgcagtgagtggagattgcaccactgcactccagcctgggcaacagagtgagactccatttcaaaaaaaaaaaaaactttttaaaaaaattcagtttctcagtgtcactcacatcttgcgtgctcgacagctgcagtggctagtggcgacctcattggatagcacagacagaatatctccattaccgcaggaagttctattagatggcattgttctcggagaatggaactttggcattgttctcagagaatggaactttgtttgacgtattatatattattcattaggccccagggtctttgaacttagagaaaacagataagatgcaaatgatctctacccagtagagaagatgactccaaaggttatggttgtatttactgtagggcatgaaccactttcgcatctaacagagctgtttgattctggcattctttatcttcactgacaacagacagacagacagatgagaaaccaatactagtctctcatctcctcctttgaatcagctgtgttacgctgattccctcaacaccgagttgaataaaagcttgacatgtgcccactctgggtaagggttgtttggtgggcagagggacctgctgtctgctgcagaaactgaaatgcaacacttgtcttcccagcctccctcttagctaggttgtgggcctgagaccgcggcaatgcaatcagacttcaaatcagacgctggtgacacaaagcagcggagatggtggcaggtgcttcgttgcacggagaggtggcaattgcaacaagatcccctctctggaggaacaggggctgagctctcagtggccgcctggtgccccccaccccagacgggttcccatgagcaacaggctcacagcgattctgcgaaccacctggtctcctttaatgaattcccattctgatccaatctgccagaagagtcatttaatgctattggattgatggattgaccaaggagctcccgcagatctagcgcaggctcagcctttctccttctgtcactgaaagcccgcagttctggagatgactcagccacgggccgggggactccgctgcactcttctcactaaaaccaccgcactgctcttacagggagaggaaacctttaaagttgctaatttctcctctccttccaggtccttggatgaagaggcaaacccgctaaccaaatgctccgtcgtcctttgggtagagcatgcaggcttcattctgggctgcagggccagcttcacgagcctgtgacctactcagtcatggggcccagagctcagagggccctgagcttgttttcaccctctgttctcatcactgtcttgaaatgcttagtgatttctaaacaaagtacacagccggtactgctgagagggaggtgaaatgcagattcctaggcttacacccagaggttctgatttagtagttttggctgggccctggaatcaggtttttttttttttttttcttttttttaacagactcttgctctgtcacccaggctggaatgcagtggcgcagtctcggctcactgcagcttctggctcccaggttcaagcaattcacctccctcagcctcctgagtagctggaattacaggtgcgtgtcaccatgaccagctaatttttctatttttagtagagatggagtttcaccatgttggccaggctggtctcaaactccagaccttacgtgatccacccacctcagcctcccaaagggctgggattataggcatgagccaccgcgcccagcctggaatcagtattttaaacatttttaaacatataatttatatactgtaaagttagcccatttaaagtgtataattgggccaggtgtggtggctcacatctgtaatcctagcactttgggaggccgaggcaggcggatcacttgaggtcaggagttcatgaccagcctggccaacatggggaaaccccatctctaatacaaatgcacaaattagccaggcgtggtggcctgtgcctataatcccagctactcaggagggtgaggcaggtgaattgcttgaacctgggagatggaggttgcagtgagctgagatcatgccactgtactccagcctgggcaacagagcgagactgtctcaataaataaatacatacatacatacatacagtttacaattggatgtcttttgtgtttgttt

SEQ ID NO: 916453 - DNA, 4001 bp, Homo sapiens
gtgcaatactcactgtatcactatcatcactctgggtttctgattttgcatcactctcaatgtcttctttttccaaggaggaaatgctgagtttatccaattcagcttctatttctgctttgagctttgcatcatcatcgtccattattcttcataataaagcacagaactgctttaaaaaatgaagaggctaatatgtcactaaaaattatgtgttctctaatttgtcataccaatccaacatatttatttaaatatgttttaatttaacaaacttttatcacaccttattatggttacaccaaacattgttttatctcttcaatcattctttttaaactttgactacaaaatgatcaactgtaattgtacgctaatactcttattgatttatatgtttatataattttactatatataataaagatcagaattgtttataaaatttttgtttcagttattaatacatataaatgtaggtatgtatgcatgagttgcaatgtaatatgtgttgttgttaatgttctgttttttatttttcactgttggtcttagtcccaaaaaaggtttgaaaacgtactagtcagctatcattttatttttcatgacactagtttaaacctttctttctttactcaagggcctgacctttccacctgtcttcttgttcttttcttcattccttctttccatcctctttccctttcgttaattcctcctttcactctactcaatcatctcaaaatcagttctacccataacttccaccctcactcactcactcaaaaataaaaaataaaataaaaaaaggaaaagaaagaaaagaaaagaaaaacaaagtgaaatggaactccagacagaaccagggcaaaatattatcctgcaatggaactcaaagtgcatttaaaaagctttattagaaggaaagctagattttttttttatgcctacaaagcaaaatgcacgggtatactaaactttatatagaaagagaggcaggagagtatggtggaggtaagagtcatttcctttacatgactttctctgttcatctactggctcattagatcacccctgtccaattacatatttgagcacttacgcaagtttaaattttctattagcaactttttaaaaacaaaagagaagtgcaattaatttttataatatattttatttaacccaatatatccaaaatatttcaacgtgtaataacaaaattaattattaatatcattgcaaagagtttatattctttctttggacagtaattcttagaaatctgttgtgtgttttacacctgcagcacatctcagttaggattagctgcatttcaagtcctcagtagccacctgcagttagtggttactgtatatgacgtgcagtcatggatgggtctcactgtaaatgggctacattaaagtgctctaagttgataacgaatcacttggagttcactaaagctgtcaaaagtagaaaagcttaaggaactcccccttcaacccctgtaaagaaaggggagagaaatctactttataaggttcatataaattatatattaccaaaaaaaaaagaaagaaagagagacagaaaaagaaagggtggaaaggagggcgacaagaagggaaggaaggaaggaaaataacgtcaattggtttgtggggagcggtgagtgagtaaccatcgaatgatccctacatagccaagacatctctttaagttttgaatgagttctcgaaatctccagggtggaagggagcctcgagcttcgcagagtcgcacagccatcccctgacccgcggtctctccctttgctggaagtctggccaggcagagagagtcccggctcggcctgagctcccacagctgttcacctccctcaacgggaatcccagtcttaagaccccggctcacccctcagcagcgagattccttggctttgttgtaagacagcgcccatagccgctacacaaagcgtatccatggcaacagccaatcacaaggaagagacaccggtttttccctacaggtgctctagaaggacaaacaatctcgattctaaattgaaacgaacgcagcatttcagggactggatgaggagcttacggttttttacaggtagattttaatatttaagtaactttggaaaatacttaataaaatgaaattttgttataattacccaagtagatgtaatctcacttttaaattttttaaattgtttctgagctacatatatttatatttccatctggtgatttgcccatgtataaggtgttcattccacaaacccttaatcctgaacagtgatttgtgggacatagaagtatggaagagaagtcaataagttgtttgccttccatgacaacagttttttaaaaaagaaaagaaaagaaaaaggaaaaaagaaaaaaatcatcaatcaatgcccatcaaaaacctctaactgaagggatgtgggtgagaaatttgaaaaattattttctggagttattttactgtaaaaatattgtcacacagtatttcaatataaaaccttaatttctaagtttatgtcatgctatttaattttaacttaatttattaaagttttttgtggagcaaatacatagggtacaaaataatattttaattaataacatattttttactttaattttcttttaaagtttgcaaataaggcattaaattctaaaaggaagtagccataattgtaaaaggtatctgctataaaataagctaaaagcaaatatttcactgagcctctggaaaaaaaatagactacatttcctggtaacaataaacttgaattgcatcaacataagaactaataatataaagtgagacgttaatagatttctcatattaaaagcacacatgttagtttccttttcaggaaagatgattttaaaaaataaactacacttggtttcaggtctaattaaattcagagtattttcattatcaaagtccatgctcaaatggaatttgttcttttttttaagtttggttttattgctgatttatagactattgaaattatctattttttattgtttttttagagacagggtctccctctgttgcccaggctggagtgcagtggtacaattattgctcactgtagcctccaactcttgtactcaagtaatcctcccgccttggcctcccaaagcactgggattataggtatgagctactgtgttcgaacctcaaactgttcatttaaaatagactttcatattgtgttgaagttcacataagaatcttaagattagttttatttttgattgtgaaactatccagacttctaaaaattataaatcctttaataatttcaaaattaattttgaataactagttttcataatcaaataattttggaaataatgccttagttcctttccttctcaaagcttactttgtcaaatattgacagcaaaaaagaaaaacagtgaaagattttctgaagataaattaattcatggtgatagatctcctatattgtcatgcgattttttactttggaagaaaggacaactttatcaattagtcataatttcgctagaatataactaatcaaaaataaaaggcagcagttatctaatacatttgtagattataagtaaatttaacttgacactgttgtttatcaaccatgtagtatttagcagaagtccattttaattgcattattcctagaaacggtaacttcagattgagtatgttggtttgcctatgactctttaacctgagtagacttttgtttcttttgaacatgttaacttcatttcatttaaattttaaaaacaatttgtaggtgtggttgatttatagcatattggcttaacaatgcatatttcctttagagagtacataataaatatttattgagagaatgaaagaatgagagataactgtttgttctttgttatctgacaagactaatattcctttgaaaatgtgttgtagtgaaatcattttagtttaagagcattttt

SEQ ID NO: 916454 - DNA, 4001 bp, Homo sapiens
gggttgtcaagtatagcactgccttatctagaccctgcagaccaaaacgcctacccaggatctgactgtcctgagcagtatcaagcaggagtgactctatcaagtacagagtctagggaatgaaggtggccagaatcaggcacttctgaacaccaaagcagagacaagtaagaagggatgacgtgggtgcagagcaggaagcacaataggccagtgcccaaaaagtgactcatattccacaggcaaaattccgactttgagtcttaaaagaacagcatctttattatgcctccatcttttcttggtttggtttgatagcagcgtgaaaatctataatagtcagatggaaaatatttcacagttgaaaacaaattaaaatatttcttccagatgtaaatgtcctcatatcaaagaagctagatggttcacccagactagatacagctagatacagagataaacatcaagataaagatagacccacaccactttaaagattgagatgcctcatgtctgtcaagcctctcaaccattaagaaacattggctttctgactgcacctccaaggagttcaaagtccaattctctttctctgcatgagttaacatgcagatgacaaaactgatttcagttccccaaatctctaagtgctccgaaggaagttatcaccttggcctataattttgttttgactgtaaatcattcttaattaccatttttaaggccccctttaaaaaaaaatccaagatacatagcaaatttctgggtttcctatggtacagattgtaaaagtttcacttctacatgcattttatatgacaacagttgcaaactatgagggtctcataagacatcactttctttagatactacaaggtatactacaactaaaggctagaaatctttgaattttaaaaagtgctgaactctacaagagtttgctagtgacaaagttgcattttatcactattaattattccccttttccaaactattcataatcttctcatctaggacatgctctgtattgggaagatacttggaatagtcaagtctaaacactaatgaattcatcttgccaataacgagactaaaaccgaacccatttttatcctccttctaccaccatccatactgttggttttataaagttacttcttaaagacactcagggaacacatactggggctcttcatcccgtttacattgcgtaatgatttaacaatattcccatcttaaaatcacagtcagaggttcctcaagccaaattttgggaataaccaagaactctcggctatattaacattgccagtaaaacgtctccttccaaacagaagggagaatgagttgaagtgaaaacaatgcctttacctgctgcacactcgcgactctcatataggagtccaagacgatcaacagaggcacatggatatttttgccttgaaataacttggaggctggaaaacaagtgggtggggaaaagaagcaaagtcacaatccacagcaccccctctcctttttagtctgaaacggggagaaaagtcaaaaaggtgaagaccttcctgaaattctcagctgctttctgccctaaggaaaggatatgggagtttgcggctccttaagagtccgggtttgagcagggtcaaggggaggaggacaaaatttgcaaatgtaaggagggggagaaagtttgcaaaaataaaagcacagtttattttcaagtgattaccgcgctcggagtacgtgaacaccagcagatcctccaggatttggaccagcgtttctatctgttttccttcctggacattgttcagcctgactatcaacttcttcagagtttcctcgtcctcttcgcacccctgacagctgccactagccatggtggcacctgcttccaacccgccgccctcccagcatgaacgtccgctgctcagggaaccggcaggggcgccggccacagctccccgggggcgagctcagctcaccgcccgcagccagcgctccccgcgggccccatcggcgcccacgcccgcctgtttatgaggaaggaggcagctccccgccccgcgttgccctccctctccggagccctcctgctcggcttcctcctcccccactcaggccccaaaaacgagctcaggggcctgccagaggctccgccgaggcgacgggccgcgcagaactctggcggcggccgtggggctgctggagccgggcctggctgggatgaccgtgaccgtggcccccacgcacgcctagaccggaccccgggcggacgccgcctcctgggaccagattccaccgcagcggcggcgcggccgggagtcgcgcgggaagaaactgactcagcggactccgctgagtccacaggcccggagccccgcagcggaggcgcgcagtgcgcagcccggccggccaccctccgcgacccgccagccggggatcctgcggccccacggaaggtctgggaactgggagcaggaaaaatgaaagccgcctatctccagatctaagaatagaaatcagggcgctgggaaaagaggacaccgcccagatggccccttttaggaatacattgtctttagagttccacctatagggagatgagcaattttcccccaaaggatggaaagaggggttagccatcaaaactgcccccgctactcttttttatgattttttgtgactgttagtgggagaggaaataaacattgtttccctgtgagttatctgaagctctggtcaccaaaaggccactaaattaacttttggaaatttgagttgcactaggcaggatcctgatacttgggacacccgaaaagtaatcagctctcagagctattagagctgagacaaaggacagggtacatgaaatgaaaggtgaaaagttgagagaagcaaacctaaatactcttctcttggtattcagaaatacttatgagtatgggtgtctataaccccaaagttttttggttttgtcttttgattgtttgtttgtttgttctgttaagtacctaagtaatgtgtttttaggaaaagaaacctagcaagaacattgtagacaaggctaggcaaagatgatctatccttcaggtgatgtgtctgtcctcaagatcacttacaaagaagaggattggactggaagttactacttcacaattttagttttgttttcacatctgttacttcaatcctgatgacaattctgaaatggatacaactactactatgtatccttctttcactagtgaggaaattgagatttggaattgagaagtgaagagctttgctggagtcacacaggtgggaagttgagagccaggacttcaacccagcaaatctcctaactccaggtagaaggttcttcatgctctaccactttaataagaatgctctagactttgttaatacattagattagtaagatagcaaactcctactcaacctggatattgggtctatgtcttgttgttatagagtctttaacttttacagagacatgctaaaatatttatagttgaaatggttaggatttctttcaaagtcatccagtggtggaggaaaagatgaaatgtgtggagatagagataacgataacaacttttgaattgataattgttgaagataatatgagatgggttcatgtggtctgttctactattgtatctatataaaattttccataatttaacaaaaaactcccaatcttacaatatttatcagacctacagtgtattattttctaagttgtttctaaacttgtttccatttctgatgacttaatcaatgtctcaaacatttctaggcattctccatctcatgcattccttctgttcctctgcattagtttctcccttcctgttctactgaattacaaccttgcaagaaattaaaacctacctcccttccaaagaaaaataaatctaaattaaaagatgtctcctaatttccacaattcattcatccatctattgcctatttattatctactctatattggc

SEQ ID NO: 916455 - DNA, 4001 bp, Homo sapiens
cagaggcggcccctgggctctggtgcctgggaaacgggagcagagtttgctcctcgtgggcccagacaagcttctgtcaaaccccaaagacaccagatcggctgcttaagcagcctctctccttacccctccccgcgggcctggctttcctggtctccctcttttggcagtgctgagactttctttctgccggtggggaggtgggggtgggaaaagctgggctcttcttggcagctcggaagctgctgtcgggtttccctaccagctggacttcccccgcctcagctccacgtgctcggctccctccccgcccccacctgaggcagttatctaagctgcaggggtgtcatctgagtcacaaagagacactgcccaagtagccctgacagccgggtgccaacaccccccagaaatgtggacagcttgggggtgggggagagacagggccgccaactggaacccagccccagacctgcagggaggtgcaggaatgtgaacttccgactcctggtcaggctgctcctctctccagcactgtccaaatgggtctgggggattgagagcaactgtcccgctctactcagggtgtccatgccccctgtgtgggtcaagaagccaggcaggcctggccccgctgtgtaccccccacccaagctcagtgtccagcccccactaaggctccctgacccatttgcagatggacggctgggtgcacagctgcgggacaccccagcaggttctcgcgggcctggttctcctgtcttgcccttgggctagcagggaagggctgcgatacttctctctcctgcccactcccagcctcaccctcaccagggaggcttcatgcacagctgagtgggcccatgctcatctgggggagggttcctccacacccttgtccaaggacagccacctgcaggcaagctatagggaggcccaggacctgggtctgtgcccatgcctctgacatccaggacctcctccctgccaccctccaccccaagccttcctctgacctggccctgtccccagcacctgactgccatcccaaccgcttcccatgacccccgagtttcttggggctgtctgtgcagagccgggcacaacgacagcacaaggctcttggctgcttctcccatgctgcagggaccggtttctatgccacccgggactgtcatctggcgccagcgctgccctcctccccacttcccagcagaatccacagctcttgtccccagcactgtgggctcagagttcccagtgtcgtgcacctttgggatgctcaggtgcctgagcccgagcagcttcttcggccccagcaattgcctgcaggtaggaagcaactgcagctattcctgcagggcagagatggccggtgcccacttcccatgccccgaccaccccctgtccccaccaaccctccattccttcctaccagccactcggtactcacccgtctttactctgactgcaaacgccttcaatcaggtggctctcaaccctccagtaagaccctcctgggattcctatagaaatccagacaccaccggcaggcagagcgcagtgggcactggtgccagagtctccactcagcgggagcagcggctggcacgcagcacacagcaccaggaggtggactgcttgtggcagacgggggacggggctgctgggtcagtcacaaactgagaaggaaagagagggatggagggagagagagagaggagagagggaagaaaggggcgagggaggagagcgcacgcgtgtgcgcgagcagcgagccagagtggagcggggagtgacagctggggtgcatctgtgatgacagcggcagcagcacacacaggcgcacaccagaggcaccacggccggccgcgagggcagcgctcaccctggccacgctcacatttcagtggaaaaaggcgcctgtggatgaatcgctgccgaccacagggaggaggaaagcggtttcaccaccacctccatcttccatcctgcgcctccaggctctccctcacccccccggctgcacctgtcttctgtgcctctctcctctcttcccctccatctggggaaagagggacaggcgcagacacagagcaagcggctgacttctgttccgatggaggcccccctgggaagctggtctttctcctgttttagagacatgcgaggcagagtctcccatcctgcctgagagaaggaaaaaccgaacccttctctcggtcatacgaaagaagggtacacaggcatgtccatgtgccagatgaccctacaggaaagggccctgagcccccacaaagccagggatcacatggtcatgcagaggtcactgagcctcagggtctgaccacccgacgccaggactacttagggaagcagaatgccagagttggcaggctgggagtttgggcacagggcagcctgcagcagcagcctgcagaccgttctcagtgccagggacgagcttggcttctcagggctccttgctcttatctgtgatgggtcaggcatgcgaagggaagagactgtcattcaagaacttggaggcctctttcttaaccaatcaggacaaagcaagtcagaaaaattgatatcctaagagatgggaagtggctgatctgaaggccaagtgagtcagggaccaagctagaggggagccagggccccaccagcctggagcacgaaccctaaatcccccttcctttgcgtccactgcctgtagacagatgaagcaccgtgctagcgatatatcaccgtgtcctatgtccctcttccattttgcctgctttgctggaggggttcacagccaggactggggtgggtgtagaagaaccccctggactcaggatgcccctagaaggatgctcctgctcactcccttctgtccgttctgccgggtccccgggcagcacaaggcttgagctgcagtgtcttttacctctggggagtcccgcctctgacctctcatgctggtgcctcccacacatcccactgtcaagcaaaagaggctcccacctccccataaacatacttcctgcttctccatctccatgaaagcgtgttcttccctgggcctgaaatgctctcctgcccatgggtggcttcccccttccttaaacgccccctgcaaggtgacgtttccccggaacaccacaggactggccctgctcctcctccgatctctggcattctctttgggccaccctcatgttgtgcaggagctttctgtggtctgcttcatctcctttccttttttttttttttttaatttttttagtatttattgatcattcttgggtgtttctcggagagggggatttggcagggtcataggacaatagtggagggaaggtcagcagataaacatgtgaacaaaggtctctggttttcctaggcagagggccctgccgccttccgcagtgtttgtgtccctgggtacttgagattagggagtggtgatgactctttttttttttttttaatttatttatttattttttattgatcattcttgggtgtttctcgcagagggggatttggcagggtcataggacaatagtggagggaaggtcagcagataaacaagtgaacaaaggtctctggttttcctaggcagaggaccctgcggccttccgcagtgtttgtgtccctgggtacttgagattagggagtggtgatgacttttaacgagcatgctgccttcaagcatctgtttaacaaagcacatcttgcaccgcccttaatccatttaaccctgagtggacacagcacatgtttcagtgagcacagggttgggagtaaggtcacagatcaacaggatcccaagacagaggaatttttcttagtgcagaacaaaatgaaaagtctcccatgtctacttctttctacacagacacggcaaccatccgatttctcaatcttttccccacctttcccgcctttctattccacaaagccaccattgtcatcctggcccgttctcaatgagctgttgggcacac

SEQ ID NO: 916456 - DNA, 4001 bp, Homo sapiens
acccgtcagctacattaggtatttctcctaatgctatccctcccctaggcccctacccccaacaggccctggtgtgtgatgttcccctccctgtgtccatgtgttctcattgttcaactctcacttatgagtgagaacatgcggtgtttagttttgaaactgcattgaaataggacttcagccctgcccaggcaaagttgctactgcaattaaagatagcatggtacttcaagaagaccaaagtgcgatctgcaaggaaatagatgccttcctgcttataatatcttaattttctttcttatggtacttttgttgattacctatcagtacatagaggaatcgacctatttttcaaatcaatcagtttagcaaaatgttgagggatgaagagtaagaaagtaagtacttattagttcatattaatgaaatcaaaattcagatccttcctacacaagtaggaaaaagaggcctgaaagccaccaattcttatctgcccgatctgatctgattgcttattgatgtgctttagtagatttcaccatgctacactgtgtaaaatacacatgtagcatcctgccctggtgaagaagccgaatttggctgtcttttcatgaccctcttatttttaaaatgatcttctatgaaattcttcaggtgaaaggtaccttcagatgaaaggtataaaccaaatactattgggcaatttgagcaagaacattaaatataggttatgatacagataaaatcattgaataatattccatgaatctacaacctttcttcattccaatggttatagagtttgtagaagtatgtgttttctaagtgaaataactacttggctccttggaaccaactattaaaaaagcgtattgaatcatccttagaaaatttgaacgtcccatccgttcttaaattattagaagaaagttgataagattaaaaagtagaaaggaccctgaagagagagagctgcgcctagagttagcaagcagggactgttagtttcaaagtagggcggaaagaagaggcctgcccggccggggctggaaatcctaagaggcttgagaacgactagcagggagatccagggaactaggagggagacggatgggtggtgccctgcagacctgtggattgaaataagtgttcccgggaggcaaccgtgggatcagggatcgacaggacatgggatctgagacttgggtgagattgttgactgaggaaggtgcccagggggctgggaaaagtctggggcctgaagaagggggttctgggccgcaggccgaagcaatggggaggccatggagtaattagagccaggaactaaaattatgggggctactgcaaagatgacacctaagggctgggtgagttgagaggagtggacgaggcgctggatgtgcccagggacctcggagagaggatccaggcgaggggcggaggagacatacgtataagtgggggctgagggaagggatgcagaggcgtaagcggggttgagaaggggtgctgtgagagatctgggggctgaagtgcacaacatgagttggatggaggctacagaagagcagacggggacgtggggctaggcaggggccgcggcggggtgagccggagatccgggagcccgcaaggactagggtcgaggggcagggagcccgggagaggcgggcactgggcaggcgccccactgtaccaggctgcgcagattgtcctcctgagactggaccgtgagagcagcagtcccggtcagcgtccggcgagtaaagtcgacgctgcagcgcaggtgcaggtgcttggtccggcagacggaagccggagaggccaacgaacaggtatccactatctcgggcatggctctgggggatcacacagcacagcgacctacagcccaacgctcagctaccagactcgtcgatagagaacctgaggaggagggagagaggtaaagaagaggaggagggattcgcggtgcacgccgggaaaggaagtttcttaaagtcagacgagcgttgggggatgggtgaaggaactacaagttccatggtgccgcgcggcaagcgggcgcttggctacctgggagcgtgtgtgttagggatgttgagggggaccaagcgtgctcctggagctgaagaagaggaggggagtaggggcagttagaagggtggccgaagggaaatgatgagaatggagggggagataaaactgaacactaccattttggctctgttcaactttcgtggaagctgtggtggcaaacgtaagaaaatcaggttcattggtgtttgcatatagcgagggcggggcggagcaaaaacgtagaaaaggcctatcagaaggctttctttcgtgcggttcctcgttagtatagtggtgagtatccccgcctgtcacgcgggagaccggggttcgattccccgacggggaggcacagtaattgttttttgtttttagctgtaagtaattcaaggtttaaacagttgttttgtcagtttcagtgtttattatgtatatccccagaacctgcatctctcaaacggagaaagccaacattcccatcttagaaactaatgaatttctataaaagttatgcactggtcgcaatgggagtacagagctgggacatctagctcagctctggggcctttgtggcaggtgaaggaggattgaaggatgccttgcctttagggtggggcctcaaaattaaaactggaaaaattggaagaggctaggtttcgaaggaccttaaataggtggccttttaatcctgggtgcattaatgggggacccactgaagagttttcagcaggcgactgataaagcatggtcagactcatgttataaaatgcggtatcaaaaccattagcaggagatttaggaaactattaaaatggctcaatcagaagatgctgggggcctgacataggtaagtagtaagttaggatagagaggaaggaatgaatagaaggaatacttatataagtggattcacagattgagaggagacgaaggtggcccaggctttcggcttcagtggctggctagtcattaaccagaggtagtagtctatatgaagaggacagtatgttaggctgtacttgcattgctataaatacctgagactgggaagaaaaggggtttaattggtttacagttacgcaggctgtacaggaagcatagctccagtatgcttccaggtaggcctcaggaagcttacaatcatggcagaaggtgaagaaggggcaggcctctacatggcccgagcaagagcaagagattgcggggccggtgccacacacttaaacaatcagatcccacaagacactgtggcgaggacagcaccaggccatgagggctctgcccccgtgacccaaacacctcccaccaggccctacctccaacactggagattataattcaacatgagatttggtagggacatatattcaaactaaatcagacagatttaaggggaagatgctaaattcaattttggacatatgaaatttgagaacctatgggagtggaagtggagatgtccatgagtcacttggatatttaagtccacagctctggggaagtgccaggtagacatgaccacgtcacataacgtggtggatgaaattatgacagtgggtaagctcaacccaagaagagtgtgtaaagagaagggtaatgaaaacaggttggaagctgagagaacaccagaatttattgttttaaaaagggctagaggaagagaaacccatgaaataaaccagaaagagccaaccaacaatgccagatgcagtcccgaggaccaccgaagtaagaagtgaaaattctctagatttggcagtggggtgagaatggggaaggtggtgattttgttgactgtcgtgatttggttgaagatggaagccagagagtagtggattgagcaatgaagagaagagggaggtgaagcataaaccactgtcaagttgcttggccaatgtgagaagggaagataaagggga

SEQ ID NO: 916457 - DNA, 4001 bp, Homo sapiens
ataccccataaatacatacactttttatgtcaattaaaaaaaaaacaaaaaaagaaatgtgtatccccctttacaccaagttaaatcactcagcttattatcttcaaagtagtataaacccccagttgttgttgtttttgaggcaaagtctctctgtgtcgcccaggccggagtgcagtggcacaatctcggctcactgcaagctccgcctcccgggttcacgccattttcctgtctcagcctcctgagtagctgggactacaggcgcccgccaccacgcccagctaattttttgtatttctaatagagatggggtttcaccgtgttagccaggatggtctcaatctcctgacctcgtgatccgcccacctcagcctcccaaagtgctgggattacaggcgtgagccaccgcgcctggccataaacccctagttttaaattaaacgtttctttttgtttttttttctttttttttttttttttgacagggtcttgctttgttacccaggctgaagtgcagtggcacgatctcagatcattgaaacctctgcctcctgggcgcaagtgatcctccacctgagccttctgagtagctgggaccacaggcacaagccactacgccgagctaatttttgtatttttagtttgtttgtttgtttgtttgtagtgacagggttttgccatgttgcccaggctggtctcgagctcctgagctcaagcaatgtgcccatctcagcctcccagaaagtgctggtatggcaggccaggtccactaacgcaggcctccataacaactgtttcagtactgactgagtggttaaattaaatattaaaatccagtacccttatgcaaaggctggaatgtaacaaaagcccaccaagagttttgcctaggcctttcctgaaccttaaagcatgattaaacaagtttattgggagtctgaaggaactccccaaacctccatgatttagcaggagacaagataaggataatcaccccagcacctgcacccatttagattaatttactgacgctccacaggaaggtcttcaagactcagaccttagttatagacggaaagaagttaatcacctacgtctttagatgaatgcacacttacatatagacatatagcttagaaggtatataagctctggaaaactttgtaattttgagttggtctggtgataatttccaggccttctccttagaaaaaaataaaggtccctattcctgtaaccggttacagaaataaaaactcgcttcctccccagttcacctgcatctcattattgggccacgagaaacagcagcctgaccctcactttggtccaagaacactgggattacagacgtgagccaccatgctcagctaaatcaaacttatttctatatattggtccacagcaatgttcatgattgataaatgaccagtcttactgtggccaccaggtctgtcaggatcttgatcctgcttaccattcccatctcatacttcattcttcccccaaagcactctgtccttggactgcaccttcacatcagcctatctcacaactccacttcttcgcttttgtgttatttctccagaaacatgttgctcctctttgctttctccacattctgcctagaaaactccctgacgcaacctgcagtagttggcaaagtgagaacatgtcgggtagacccgggaggtgaattgaaggggtaggcagggactcgacttgaaagaacctcacatgccttgagaaggagcttggaacttacctttaaggctgcaagaagtcgacgagtcttaactgggatatgcatggtcggtacttgtcttttagaaagatttctctgtggcagcatgggagacagattagaggaggtgtagacaggaggagagaaaataaactcccaagcccatgcatcctcttgccctcttcccttgttgctttaaaagacaaacatgcgcctgtagtcccagctactcgggaggctgaggcaggagaatggcgtgaaccccggggggcggagtctgcagtgagctgagatcgagccactgcactccagcctgggcgacagcgagactccgtctcaaaaaaaaaaaaaaaaaaaaaaagacaaacatgtagttcttttccatttagagagttttattggtgattattataggaaaacagactggagagagaataaaagtaggcgctgcagcaattctcaggtgagagatgatggtggcttggacccaggaatcagcagtagaattggtaagaagtgatcaaattcagcataaattttgaaggcagacctactaggatttcttggcagtttagatatggagtatgagggaaagggaggagtcaaagataatgccaagacttttgacctgataaaccaggaaaatgtagtaggattagctgagaaggagagattgtgggagaagcagactggagtgggcgagggtaaattcaggagtccaatcctttttttccccttaattttatttacttatttatttagagacagcggtcttgctatgttgcccaggctggtcatgaactcctggcctcaaaccatcctcctgcctcagcctctcaaagtggtgggattacaggagtgagccactgtgcccaactcaatctttcacatattcaatctgaggtgtctgtgattcgagtggaggtgctgagtaggcagttggacatatgagtatgagtccagaagaaaagctggaactgggctggagatacacatttgggagttcagcatgtggatggcacagggggaagaagagacgctagctatggagactggaaaggaatggcctcgatgaagaaggaaaaccaaggaagtccgtgtcttggatgacaagtgacatctggaaaaataaaggagcagtgtggtcagggagcctgatgaaattctgactatggatgactcactgttttgtgtaaaaagggggaagagaatttattctaaaaatttgttcatatctacataaaatacttctggagggatgctcaagaaactcatggtattgtttgcctgtgtggacagagaaggaaggccaaagaacagaggtgaaaagtagatatttcaactgaataatcttgtaagccttttgaattttaatgtgaatatatttcccagtcaaaaggttatttattgatatgaaaaaaaataaaggtcactggaatcccaaaccacaaacaaaaacagcccttgctgacttcctgtggacttcatagtgtctaccactggccccgcggggctctgcagcttccacttgagtggctcgatacaccctgcgtcagccatgctgaaccaaggtgttcaagctctctgcactctctggcccttccttgagcctgcatgcccttcccactcccactcttcccgcaaccttggcagggctctcctcctccccttcaggactctgccccccaccaccctccagtctgggctagagtctagtagaatctcccttgctaagagaacaaggtgcatgtgacacccttctcttcctcccttcagtgtgtgagcaaatagaagaaatgattttagccacatttttaatgttcaccttacaacatagttgaggcaatcctgaccagtttctccatcttctgtgaaatttcttcttccttgtgcagccatgcgcatgaattctatatttatagtcacatctccagtctgttctgcatgtcaagaaaaggtttgggactgggtgcggcagctcatgcctgtaatcccagcactttgggaggccaaggtgggcagatcaccaggtcaggagatcaggagcatgttggccaacatggtgaaaacccatcgctactaaaaatataaaaattagccgggcgtggtggcgcacacctgtagttccagctatttgggaggctaaggcaggagaatcacttgaacccaggaggcagagattgcagtgagccgagatcgcaccgctgcactacagcctggtgacagagcaaggctccatctcaaaaaaaaaaaa

SEQ ID NO: 916458 - DNA, 4001 bp, Homo sapiens
ttgttttctaacctcagaaaactgatttatccttgggaagggtcagtttcttcattaggacaatgaagaaaaatccagctgtcccttccaaggggaggtatcatgagcagtatcaaggtaagcaagggaacctggtttggaatcctggttgacaccggctttcactttaagaagtcgcaagagactgccgcaagagaggaagccacagaccaggttggaccctgagcctggagtactgccttttctcttctttgcctgctaaactccttgcttgtcaagattcagcagagatgacaccttctctgggaaggcttcctgagtctcctgcagtgagcccctaggctcccctagcccttggctcttatgtcttatctctgagaaatctgagatctgcacttttgttagaagtccgttttaaagacaatcttttaaagtgtacaaatagaaaccttatcttattgtattgcaggcctatctcctcccccggtgtgtatcaatgctcaggctgggcctttgtctgctggcttgtggagggaggcaggacaagccagtgaccacattcctgcactctgggctgcctcctgtggggcccgtgaggaagcggcagccttccctgccgcgtgcagggcctgggttgtgtgggtggctctcccgagtctcctccagccctttttgggtctgattctctgaccctcctctctctccttgctcaccacttggcactccactccttatccttttgctgcattaagtttggaaagagattttggagaaaatatagcccatcaacgaatttctcctcctcccagggcctgtctaggcgtgtgccatgcccaccctcttcctttccagcgctggccacatcctccctgcaccttcagtgcctgctttccctgcctcttcctgggctccgggtctgtgtccacagtgtcctgcgtggccctcgcgctgcctctggttgcccacattcctgcaactctgtgaccacagcaggggcgattacacattcctggcctggcagccaacagtgtaaaaaagaacagaatgtcctagggccccgcctagcccccagcttcacctgggcccctcccgggtctggacaaggttggagggggtggcgaggaatcagcaggaaagaggagggaccaggaggaggcagacgcatcccacctgagtgcgctgctcccacttagtgagcggggaggagacctgcagagacctcttctctcttctctgcagggcctgagggtgaggctgacctgtgggtgcccttggagggctgcccacttgctgagcctctagctcctggaagcacacttgggactccccccttgctctccttcctggagacagactccctttggtgctggctccttctatttgcccccaccactgccccccacctgcctctactcactcagtgcccctcctccatccctatctctctgtccttcgctgtccctctctattgtctccctctttctgccctcctgtcctcccggttccccacccaggccctctcagcctggctggccccttctccttgtgttgccctcctagctgtgggctcaggatccttctacttgttcagatctttgcccctcacctgccatcctgtcccccagcctccttgcctgtctgcgtctaaagcccctgcccagagtccgccttctcaggtccagtactcccagttcacctgccctcgggagccctccttccttcggaaaactcccggctctgactcctcctcagcccctccccccgccctgctcacctttaattgagatgctaatgagattcctgtcgcttccatccctggccggccagcgggcgggctccccagccaggccgctgcacctgtcaggtgagggggaggagaggtttggctgccagattcaactggaaaggaaccagtcccagtccagccgcaacctgggagtgggaagctggaggcagcccagacctcctggagccctgcagtcctggggcagagacagaatcaggacacagctcgaggtcagggccagaggctggagctgagggcctagagtgagagggggcaaggcaagggggggagaggaagagaggcaggattagagagaggaggcaggccagaaagaggagagcaggagagacccaaagagaaacagaaggcagatagagagggagtgagaggcaggagctgagacacagatcctggaggaagaagaccaaaggaagggggcagagacagaaagggaggtgctaggacaaaactcgaaaggtggccctatcagggaagcagaggagaggccgttctagggaagcccagctccggcacttttggccccaactcccgcaggtctgctggctccaggaaaggtggaggagggagggaggagtgggagaatgtgggcgcagggtgggacatgggcatggccaggggcagcctcactcgggttccaggggtgatgggagagggcactcagggcccagagctcagccttgaccctgacccttgctctccccaatccactccggggctcatgaaggggaacaagctggaggagcaggaccctagacctctgcagcccataccaggtctcatggaggggaacaagctggaggagcaggactctagccctccacagtccactccagggctcatgaaggggaacaagcgtgaggagcaggggctgggccccgaacctgcggcgccccagcagcccacggcggaggaggaggccctgatcgagttccaccgctcctaccgagagctcttcgagttcttctgcaacaacaccaccatccacggcgccatccgcctggtgtgctcccagcacaaccgcatgaagacggccttctgggcagtgctgtggctctgcacctttggcatgatgtactggcaattcggcctgcttttcggagagtacttcagctaccccgtcagcctcaacatcaacctcaactcggacaagctcgtcttccccgcagtgaccatctgcaccctcaatccctacaggtcggttagtccctctgccccttccctggtgcctgcgcctggaagggtggtccagggtgctgaggtgctcactgggcaggcagagcctcagacctgagggtgggaactgacacccctgtcccaggtagagctcactgctggcaaaatgaggagcctccagcttactggactggcgtccctgcccagtggagccatcctagcaccccaggctcacccagagtgtggttgttggagcagcattgccctcccctgccctctcttctccttccctcccattcccttctccctcctgcaagtgggagggagtgcttgcaaaagggcaggggtgtgctcagctgcatcccttttctggagcaagatgccagcaaagtataagacctcgtccacctcagcaggagagtctgatggaggggtgaggctaggtgaggggaggcgagaccgtgcaggtgctgtggaggtggtgctgtcagtctttgtttagaaggggaatttattatggagaaagcaaagagggggatcgtggaggttagggctgcaagtgagcccaaaggctgggggcaggggccttacagaacaaggagaatgggtcaggctagagagcagctccttgtgaagctcttcccccaaaagacccaggctaaaatgctgcactgttgacctgcccaggtgcctgacctttacgtgcttgggtgtgtcctgaacttttgggtttcatcggtgctctttgccaatgttgggtctggaaaccggagcaggtggtaagcgtggagaagagaggagggcagggctgagtgcttttgtataccttttatttgtattcactcagccatgccacaccttgggaacacctgcttcaagccagacacagggctaggcacctggcaaaatggattcatgaataattcataagccctttattgaaggccaggtagtttgctgtgttgtggagacagataaaataagatagcagagacaggcatataagccagtaactgtggca

SEQ ID NO: 916459 - DNA, 4001 bp, Homo sapiens
atgggcaaaagggaggggccctttgccggcctgtgagtttcctttaagcctcaggatgcccatccaccccattgcgtagctctcacctttcccaagctctgctttgctgccttttttttttttttttttgagacggagtcttgctctgtcgcccaggctggagtgcagtggcgcgatctcggctcactgcaagctccgcctcccaagttcacgccattctcctgcctcagcctcccgagtagctgggatacaggcgcccaccaccacgcccggctaattttttgtatttttagtagagacggggtttcactgtgttagccaggatggtctcgatctcctgacctcgtgatccgcccacctcggcctcccaaagtgctgggattacaggcgtgggccaccacacccggcctactgcctaccattttgcccaagcttcccagtactgagaagaaccacctcctgtgtcccctgcacctgtcccagttccatgtccctccagaacccttctgtgagcctctgcatggaatgagaagaggaattttaagccaaggatctggggggtcgccgtggacacagtaccatattccctgctcccacttgagatccctggcacccagcctccttttcacatccagcccctcagggacctctgacctttgagctcggcttcagtgccaggcgggcagtcagaaagtagctcgcagtgtgtacactcgagggcccaggcagcacagaacattcccggctggcagcggcactgggtcttccgtttgcttgtgcagggggcaatctcctcgaggcccatcactggcggggagacgggagggctcagggaggggccaagctccaggggatccagcccccccgcaggcacatccccactcacctgggtcacaggggcggcacagctggcagatggtcaggtagttccagtgctcgttgtaggaattctcggcacatgtggcacaaactgtgtcccggatgcggctacatttagctgagacataggtgcctagaacgtgagtggagcagtagagcctcaggagacgaggctccaccctcacctccgctgcctgtagtgtgaccctggcctttccctcggtctctctggccccccatcatcctgccagtggccctccggctccctctcagtgaggtaaggaaagaggaggcccagtggggagggccagtcccatctcctccacgtgatgtccagggtttcccacgctcgtctccagcagccagttttcctgggggacagtgcccaccttccctctgaggccgcgagggggctggagcccccgtgacccacttccgaggcccaggttcgtcctgccattgcctctcacctggcgggcagcgggagcagcagatgcggtgctggggctcatagtattccttttcctggtccctgcaggtctggttctccgacgcatatggaggcaccttcaaagggagatggagaagaggagagaagaattagtcaggggtcagcttgggagggcagagggaatggagcgacggctgcccagatccctcttgcccaccctcgcccactcctaccaggccccttcctcaccgcctggggctgcgatgctgccaggagcccgaagaggcccagcaccagaggcccccaggccaggccgggggcagaggtggcccaaggcaggagcatggcggccactcggccaggcggccagcaacgtgggggcctgggaggaaggcaggaggcccgacgtcctgggcagcggtggcggcggctgcccgagcccagagcctgggacgggactcagggccgatgtgcaccccagggccgggagcggccaggccgggcctccagggctcccatggcggagctcaggaagtgggagtggagcgagctggccgcggggcggggacagggagcgctgggagccaggccggcctgtcgcaatcgcagcccagggaagaggaacaggcttgtctgcctcgatgcggggcgggaggggcggccgggaaagcacgtgagggccgcggggccggaaccggcctcctcccttcttcggaagcccgatcgggagagcggactgcggacagccctggcccagccgagggaagggcggcgggcccggggtcagcccttggacaagcctcgcagggagagcagagggagttccagagagcgcaagggacagctgggtgcgggatctggaaagcgaggggcccaggacgggcagtcatggagagggcagggcgcggggactgcaaggccgcagaagcagctctgagaccgaggagaaccggctggcagatgcccgggttcctcccccgttgtcctgccctactgtgggagtttttcagacaaattacaagggactagcaaatcagccagccccccacgctaccaacccagcccaatccgcacaggagtgggcacaggtcacctaggagacccttgagagctgtgcagcttgccctgctccctgtcctcagggaacctccctcccaaagagagggggaggatatgcggaggggagtcctggggccagcaggctggacctgggcactcagtccctctgctctggcttctttgcccatgaaccttcaaaccccttagaactggagaaagctgagagcccacgcagtccagccccctcaccttaagcatggagagggaggctaagggtgatacataagggaaccgggattccagggtggcctggtctcgttcctgccctgtttcatcctcccatctccctcaacccaacaccccacccacccgtggagttacttgcagctgcccccttttacacgtggttctctggtccccaagtttccgtcttcctaactcccacctgtccttgaggcttcactgaggctctggaaggcaacctctgccctaggttgcacagtccccgtgaagactgccctctgtacctggctgtcttgtttgcttcccaccaggctgtgagtgccaccatggcccaggctgaatcttcaagtctgtgttccccatgcttagcagagtctggcacataccatgtgcccaataggtatttatggaataaatgagtgatggccacatcacagagccagtccaccgcagagccagctacaatctgggtctcctgatgtctaggtcccaactcattccagcagtcctgccaactccttgtggctcagggatgtctcccttgggatgaggggctaacctctcttgagataggtcacttgggcactatccccctccctgaaggactctgttcagcactcgtccttacactggtctgtctaacttcaggtctgatgtctggacaggtgcaggtgatgggaagtgtgcatggggaggagaggtcacaaaagggggaaaggacctgcctaggctgtaggcatttcactctgtgaggctctctcccctcacctggtgcaggcagctcaccgtacagatgggccaaagatggctggaaagggcagaagtatcagaacagcatgcactgcgcggggctgctgagccttccagggccctagcgctgggggctgggatgagagtccctgctgagctcttaaacgcgtaaaggaatgtgtgtgtagcgaccctaggtccttttttctctctcttctttttactttttactgtggaaattccacatgcaagataatataccaaaagagaaaaagtaatattgggagtctcccatatactccttacccagcttcaactcactgtcagtttcatttattctgtataccccctcccccaccaacgcacacactcttcaaatccctcattattattttgaagtaaatcccagacatcatatcatttcatttgaaaatatttcaggattttaccctaaaagacagggactctttctctattctatttttctttttttccccaccctgtcttatgctgctgagaccctttcttttaatagaggtgtaacatataatacaatgaaaccgtaaggtacactgatcttacagatacagctcagagagtcttcacttttgtgtattct

SEQ ID NO: 916460 - DNA, 4001 bp, Homo sapiens
acaggtagagaaagatagtattttccaagttttcaattagagttatagtctctctcaattactcacaagttctctactttcttcatgccaaaatcgaagatgccatggtttgcatatctggcttttagtggcctcacagaatggaggtgggagagaggtgtgatgtttttaaagtttggatttaatactggtgttagaactatctagtaaattattcaattgagaatatgaatttgaaataatgtgtaacagttatcttctcataggaacatgtttctaaggtgaggctcaaaaaagtacatttcaatgtcttaggtgcagcaatttagatatgggaaaattggaatataagagttagacttttatagagtgaacagttgtggctgaggcaaagttggtagccctgggagataaatcattaatgtgacgaaagatctacattctaatagataactgagaatattatatctttctatgaaagtatgattacaagcttttggatcaaagtagtttgggataagcaggatctttggggttagaaactgaaaacgtcttttatttgttttaatttgaaattgtaaggcactttatttcagatcagatggaacgttataaaacagcttttagaaatactttgattgctgacataaggtaacatgtagccagattctcagtaaattactctctaagattttaatgggggcatttaattttgctgacagaacttggccataataataattgcatagcactaaaaagaacgtgatgacatattcccagagttattttaagttatagaatgtaaatactgtaaagatttgtcttgctttattaataagctattttaaatttactatacaccaaaatatggcaactataatgtgagtattaaatagtaatgaaaaatgcttccatattttttggcaaagtaaaaacaaggatgctgaattgaatgagagtttgcaaccatataatgactccactatgaggcaaaatcacactgtactaccctcagttttttcaaatacctgtggctatagagaaaatgctgttttcaaaaacgaaatcatttcccagaactttttaaaaaactcgttccttaaggcatatatccaagaaacaaattttttaaattaacaaaacagaaataaataatccataagagttcctaaatcttttagctcatgttttataacatagaacgtttattgtaaattataacaaattgtcacaatatgcttattaaaagatattttgaatgctgattaaaatgacttttctttgctccagtattagggtccaatactaacatatataactaactagcatacataacaaacatattaatttctatattttttcactgtgtctactttaactattttctcattctaaccttgaaactttttataacttctcttgccaagcaatacagcatatactgtataaaatctcaaatctataaatcatggaaaacatattaacaaaatgtgaaactaaatgctcagaactgtggatttgctgttgaatagcaattggcaaaattgctctggaatttttcctgttcctgttacaaaaaacgctgtcccaaacagttaacatccccagtgcaatagttaaaacagcacttaccttactgtcttgacactgctttcgttaattcttaaagcagatgcactatggacaagaatccaccaatatatgctgtgaactctgtcaggacggaactggctgccagattctgagtgatacaagagctgaaggggggtggggagacccagcccagtcacgccagtctctgaatggagttatgtcattgtggggatcttgtggtgtggcatgtgaacactgctctctaacgaagtgcaggtgaacgtggggagaaaggacagcccagctcattccctatggaatgggagagagatatgtgtttaactagctcaaataccatagcttttaaccaagaattgagtcctgcttcaaataaggaagctcactgtgagaacatttttcttacaagcctctttacatctgtggctgtggcaacaattaagtgcaatgtgctcagccaactatcatgtttatctaaagatctcagaaatcataagcagggcaaataatttcaggaaaacgcaaatgaacagactcagaggaattgaatccctttgcctatcacttttgaaatcaatattgatttacttggactaacttaattttttggccatgagggtagcttacattagttttaaaaatataaaatatgcttcatatacacttggatacacatgataaatatcaacatttcaagtttacttctaatgctaaggagactcattttatgttattcaggtctggaaccaatcagcaaagtcttgcctgttttttattttgtggatttcgtttaggaattcacccaaaaccttacttggggagagcattctatagcttaatgccaaaaaacataaaagaacagagaaaaaaataaatttatactaaaagtatcacaaggcaagaatctttcattgcatgctagtaattttttttcaaagttaaaagttattcaaagttataatctcccaaaggcctggctggatatatctttcattatcagctcctgatgcatggtttcagcaaatgagagatgtacttaaatccttgtctatttcattttgtgattttatcagatatatttatgagatttttttctaaaatgttcatttcctcatgtttataagaacttttacaccaatatattttaatataagttgtcacattgtatttttgtctttaaaaataactatatcacattttagcagtgagacttgtggaaaattaactccatgactaatactgcatttgtccgaaaaaaagactattagaataaatggcttatttttgtaatagcagtgttcaaaaacaaaaagtaatcttcttgaaagtaactaatggaattgtaagatgattcataaacataacatttttcctaatattattttaagaaaattattgataggcctcagtttcaacaaagtaactgaataaatttataaggaattaagaaaaaaagacaaatcaatcgaatataattaagtgatcttgttataagaggattcttaaaacaatgctatgtattaattttgagtgtatcaaattctataatctgagctcttgttagaaaaactccacctatccattccttaagatttttctttataaagcaatacatgtgttgtggtatttataacagacctcaaatgcattatattggatttagctcattgtaaagtcttgtcaacatatactttttaataaaatcagttctgtgaaaccaataattgaataattttgtgcgtttcagagcatattttcagggtccaatagaaagaaatgaaattaacatttatagtggatctaatatattccatgatttatactcagagttttcacatttcttcctttaaatttcatacattaaaattcctatggtatgttttactactctattttcaggagtataaatggagagtcagaaagtctcattcatttgctaaaagtcacctaacaagtaaatgtaagaataaaaccatgaacatcttcactcactgggaagagggtgaacaggatggagctgagacaatgtagttcactcaatcagcttaaaatactttatagacaatgttactatcagttgagaaaaagcagaaatattaaataggcaatagttatttaaaaagtcaaatgttaattaagcaatagtttctttccttttacattacacactaacatataacatgcatagccacatccacatctcagaacttttgggtaacgtataaacattccatcctggccaatggtgattcacatcattggtgataatgagcattggaggctaaatgcatttcatcacaatacaggttaaaatgatgggagttctcattgttcacctcccacttatgagtgagaacatggggaacaatacacacccgggcctgtcaggg

SEQ ID NO: 916461 - DNA, 4001 bp, Homo sapiens
aatttgttcttctttgatatgttaacttatatgaattaatgcagtttatctttttttttttttgagacggagtcttgctctgttgacccggctggagtgtagtggtgcgatcttggctcactgcaacctccctctcccgggttcaagcgattcccgtctcagcctccagagcagctgggattacaggtgctgatcaccacgcccggctaattttttgtattattttagtagagacggggtttcactgtgttatccaggatggtctccatctccagacctcgtgatccacccactttggcctctcaaaatgctgggattacaggcgtgagccaccacaccaggcaatgcagtttatctttatgcagttgaccttgaagcatttaggtttactttagccactaagagaaataggtctccttgggttcacaatgtagtgaataaacaattttgagttcagcagggccctgaggctgctcctgaactctgcatgaagtcatggaggttactgttttaagtaaagagccaagagttaaggactaagagaagccccctattattctgaaaacttggatgtgtgcgctggatgagacagcggttgcagtccccattgatagttttttccccctgtcattctaggctaaggagttaggacttaaccagttccagttccaggctaatggaaaattgtcattttactgggggttatgtggtggccaaagttgttaatcattgttccccatggggtagatacagtgagagcttcagtaaagcctttcctctaaaagcccactattttaaggtaacttgggattactgaactatctccttaccccgatgaatcctaacttgagttgactgaggtgttttatcattaaacattagttttactgaaactaatttaaaaggaagccttaactttcatatcaaacagctatggtaaactgagtaagaactctgtacgaagtcgctattaaaatgtttttatcttgctaccaggatatggatgtaaaatgctaataactattacacaacctataatagttacaggttacaatagggataataacactttaacccacaaagactagcttagtcctactacttatctatgaataatgcatgtagtcaataacactggaagggatagagcattataaacttataattcagagatgagaaatggtgccagtaatttaaaagtatttcaggtctcataatgctaaaacagggtgtaggtatgccctacaattacagagaactcagtcgggcttgaggagaacagcctcacttaattgtagttttcctgtcggtgtaaggtgccggcgtttcttcatgtgggaggagactgaaattctaaaggttgtgtggttagtaaaattagtctgtgacctcgggaaactaatgagtctttggggcctcagcgatcttcatgttaaggaatattttagccaggaattgcttcattttcaattcttgtttagggcgctcttaggaaaaaggacgcgtacgctgcacagaaagtaaacaatagagcagaaagaagaatccgaaggtcattaatcttaaaataaccaaccctctggagccaacttatttctctctttaaattgcggaatgagccccatccccctgctggattaaaccgcagaggcccaggcctcccaccgggtgtccgctgcatgaaccagtcgcatgcctgtttccttctcgaaaccctcacagaaagacccaacacactctaggaaataaaccgtcaacgtcaggagacgctcagaaccctcttcccacacccggtggtcctcgcccagagcatatttcgcctccagaccccaggatccgggaaatggaacaaaactccccggcggcggcactcacgcactttccggcacgccggagccgcaaaagcctcgaccgctacgactcctctgtccgtctactgcgaagcggggtggcgttgggggaggtgggcaacctgtcagtaaagggggcggggcgccggccggaagagcctccgcgcggctgcgctcttttcctggagctcaagtgggcggggcctgtcgtccgggcaacccgggagcgtttgtccacacaatttctgctccgactctgcggactactgcagtggagcttgactcttaatggtgagcaaggcaaatgaggcagacaggtggaggggcgaccactgattctgcttcaccagtgttaaataatgtaatcaagagccagtcatattttacagcgaagcgggtcggtttgggaaataactcataccttggggtgggtcggccctcttctcagcaatggctttccttacctggaccaggcggacaggtaggagtcccaaaccagtttctgcaaacgggagatggtcaaagctgtcacacggtatcctgatctcgaatgttgctaagcttgaaaattggtcccaacctagtaactttcagtagtgatagacgttcccactaaattttcttattgcaacttggcggaaatgttttagtacttctccagcagttaattaaaagctaatgcaatttactctgctttgaaaaaatattttatgtcgtcttttgtgggaatatgaattgttttgtgattcaaggttctcatcctgcattagttaaatatgataaggcttctcattttgtttttctgcactcctcaactgccatgttttcagcaaggagacaggccaacatgtagctatgagagtatctctgattttcttaaatgtggtttccatcaagacattttctataattaaaaccagaggaagtggagaatgtaattacttatttaattcattaattaagggaaaaatgtggagtgcattctttgtacttggcactgggctagaagccaagaataccaagaagaacatgacgacaactctgcttataggatacagattaaacaaattaattacaatacagctttacaactgtaacaattgaagcatctaaaatggggtaacacacagttggaaatgatgaaatttcagtgaggggaaacaagggaaggagagtggtgcttttcaacctgttttaaagtataaatacgagttttccacatatggtgggaagaaatagggagtggaggcctggcgcggtggctcacccctgtaatcccagcactttgggaggccgaggcgggcagatcacgatgtcaggagttcgagaccagcctggtcaacatggtgaaacccagtctctactaaaaatacaaaaattagccgggcgtgttggcgcgcacctgtaattccagctactcagggggctgaagcaagagaatcgcttgaacctgggaggcggaggttgcagtgagccgagattgtgccactgcactccagcctgggtgacagagcgagactccgtctcaaaaaaaaaagagaaaaaaagaaatagggagtggagagcattcctggcggaatgcaaatggaccttaagtcaatttataattgctaataaattgggggaacagtaagcacttacttgttaccttccaatttgttacctgagtttcttcttcttcttagatccttctcccaatgtttctcaaagtgtggcccatggaacatttatttctaatgcacccggagtacttgttaaaaatgcagattccaggaacccactcaactccaaatctactgtattagtttcctaagtctgccaagtaaggaattgccacaaactgagtggttaaagaaaagaaatttattgtctcgtagttctggagactagaagtccaagatcaaagtgtcagcaggtctgtgatacctctgagggccttagggagagatctgttcagacctttcctggcttctagtagtttcttggtttgtggcaacaaaacttcattcttcacatggcattctccatctgagtatattaaaattattattatataaggacacaaatcatattggattaggggcccaccctattcagtatggcttcatcttaatttaactaataaaatcagcagtgaccctgtctccaatt

SEQ ID NO: 916462 - DNA, 4001 bp, Homo sapiens
aacctttcaaggctttttcatttgtattgagtctcaattcttgtaagtataaccagattggtcaaatattagcttgtcttaccactgcaggataaatgacaggcattaactgctcctggggttttgccatcattacaccagtagcggctattgatctgaaatatcccataatcagtgcttctgtctccagcattgtagtttgtagctcgtgtgttgtaaccactctcccatttggccaaacacatccctgaaaagaacttatttttagtaataaacagcaacactaagtgacttatactctatagcaaaatcagttctacttagctacttctattttactgatttgttttataagtataaagatttacttataaaatatcttagcactttagtgttaagataagggacttgtaagagaatccttttgtaatgcaaatcatcttgtaacaccaacgaacaatataacatacttttaaaatattaaaatacatgtttgttccattgcttttacccttcccgtgctcccatccctcaggcaacattcagccaagaacagaaaaatcaacagagctgttgagtagattttgtaaattcatagcagatacataggctgatggaaaaatgctttttttaatcagaaaaacataaggattttctgatagaaattttcttataatatctaaaggtgaatttggatatcaagttagaatcttgaaaacaagactattccgtgatttcatcccttcactcattcattcaaaaatagctattgaggggaaatgtctgaattcaatctgaaaactacagagattattacatcgacaactatgtactaaactataaaataacttttcctcatggcacatcttgaattgtgtgggagaaaatgaaagatagttaatcaagtagagtagataaaaataataaaacatttcatgctgagtttctgggatcctatacaaagagtgactgaagggaactaggttcctactgctcttgtgtagggaattcaatatattctttaaaaacatcactgttaaaaatcccatgtcggctgggtgcagtggttcacacctgtaatcctaccactttgggaggctgaggtgggcagatcatttgaggccaggagttcaagaccagcttggccaacatggtgaaaccccatctgtactgaaaatacaaaaaattagctgggtgtggtggtacacacctgtagtcacagctactcagaaggctgaagcacgagaatcacttgagcccagaaggcagaggttgcagtgagctgagatcatgccactgcactccagcctgggccacacagtgagactgtctttaaaaataaaataaaataaaataaaaataaaaataaaaatcccacatcacggcaggggacttgaagacaagaaaaatactgcatcactctaggctctcagagcccaagttcaaaatgggaaataactggagtcacataccaaggacttgagagagctctgccaggtcctcaaatgtatctttcagtcagcttacatgtgccattgaatctcaggcacccagcaaacttcctagcactagaacagtacaacaggtcctgttttacttagaatggaattttcccctgccatgcccgtattcctttatcgggtatctctggttataaagaaccaaactgatgtttttagccattgtaagtatacaaacccacaaagaaataaaacatctattcactcaaagccccttcttcttcttccttctctcctagtgtctgttccatacgtagctaattctctggaattatggagagtagacttacagtttgctaggctgattcccctgtagccatccattcccaatcttttcagagttctggccaactcacacctttcaaagaccttgccctggaccgtaacagaaaggaggacaagccccagaacaatgagagccttcatgttgactgctaggtcagagtgctaggctgaccagggtgagctggccccagtatttaacatcttttaacttccttcttccccttgtggtttgggggctccaccctttcagttgtgtggaaaacaggaactgtctattgatccactgactctaaagagatttttttaatgcttgaagagagatatgctgatgtcctaagaattagtctacaggaaaataatgaaatggaattgtttaaagtactggctctggaagaattggggcatagcactacttccaagacaggaactttcttctgtttgattatgaatttgagcaattataaagaaaaaaatgactattttgtgcagcttaaaatgagctgtgatttttgagtaacattcaattttgtgaaattgttttgtatgcattcacttttttatatttatcttttttacttaaaattattttacatatcttttccacaaaatggacatgacacatgtgcctgttgtcttaatgggtgtatagtgtgacaccacgttgctcagctagtttcttactctagactctttttgttactatagcaaattttttattattataaatcagtgttttactattataaataaggttcatgtgaacaactttaccaactacctttttttttttttttttgagatggagtcttactctgtcaccaggctggagtgcagtggcgcaatctcagttcattgcaacctctgcctcccgggttcaagcaattctcctgcctcagcctcccaggtagctgggactacaggcatgtaccaccatgcccagctaatttttgtatttttagtagagacagggtttcaccatgtggccaggatggtctggatctcttgacctcgtgatccgcccgcctcggccttccaaagtgctgggattacaggtgtgagccaccacatccggcctactttaccaactacttttcacaatactttgcctcccctttccatattagaacataaggggtcattagaaagcaacagcattttaaaaataaaacctacccaaacatatatccaactaaatgctacctttgaaaatagcaatctcaggaggctgtgcacagcttttaaaacaatgctaccagaactcaaaaagaactgcacttctgtatctgcctaagaggacagattctgagccacacaaagtgtcatcactttgtagttacccttatttttcatcagtggcctctaaagattaccagatttggttttaaatgacagttcaaggaccctgttcaaaaatcaagaataatctcatttttcaggctaggcctaattttgattcttcaataataaatagggccaggtgcagtggctcatgcctgtaatcccagcactttgggaggctgaggtgggtggatcacctgaggtcaggcgttcaagaccagcctggccaacatggtgaaactccgtctctactaaaaatacaaaattagctgggcgtggtggtgcgcctataattccagctacttgggaggctgaggcaggagaattacttgaacccgggaggcggaggttgtggtgaactgagatcacaccactgcactccagcctgggcaacagagtgagactctgtctcaaaaaaaaaaaaaaaaaaaagaaagaaaaaaaaaatggccagctgcggtggctcatgcctgtaatcccagcactttgaaagcccaaggcaggctgatcacctgaggtcaggagttcgagaccagcctggccagcatggtgaaaccccgtctctacgaaaaatagaaaaattagttgggtgtggtggtgggtgcctataatcccagctacctgggatgctgaggcaggagaatcgcttgaaccgaggaggcggaggttgcagtgagccgagattgtgccattgcactccagcctgggaaagagagtgagactctgtctcaaataataataataataataataataataaatagtgagacagattttcaggacccaaagagacagaaaccaattaaaagagttagtcttggctgggcgcagtggctcatgcctgtatttccagcacta

SEQ ID NO: 916463 - DNA, 4001 bp, Homo sapiens
gaacaactacatgtatatttccactatgtgcataacaattttttggagatgagagtagacagccaaaactgtgggtttttttttttttctactaagaagtgaaggggaagtgattcctcacacagttgactgaataggaggtgaaataaagaactcagacctccaactcccaccttccctaagttaacccactgctcaacacacaacttgaccagctgactcactaaaaagaaataggagactccttcttctagactgacttagcctgccattttcctttccagtctctcaggacctaattaaaaactgacagttgatttcttttcctaaattagaacaaggaatctcacaaaattaggaagggatgaaaggttaaacacctcagccattagctgagttgaactatctttcatttgcttattattcaaaaagttaggataataaatttatactgtattcttctttcctgcttaaggcttgtctttaaatttaagctgcttctctttaattcagtggcatatgcgctaaatgttttccctagattatgttcattcatcttcacaacccagaaaataggtataatttttcatacttcacagatgagaaaactgatgctttacagaattacttgttaaattacttgctgtacattacacagatattaaatgtgtgtgaagttactggggcaatttagacgattcgtggcataaagataactgctggaaaacttataaacataggggtgcaacaatcaggaagagaatgaaatggaagggcccagtagcccccttttaatatgctacaattagattctcaaggtacaagagtttgtctatatactttggaaataaggagcaggattttatgatcttgaaaaatctttcagttttcttattctctaacgacagatctattttatttggcaatgctaaaaattatcctttattagggtggccaatgactaagccagcaactgggaagcagcttacaccactgggcctctgtagcactcacttccccatctgttaagacagccatggccatttaccagtggaatttctactgtcttcccgctggctcctttctgatgtagcagtccttatccctttttctccagcagcctacatgtttagaaaagcagcctcaattggctaaaaggcctaatgctgaaagaactcaagagagaaggagcctcagacaagtagcggctatgtcccaagagcggaagctccccacaacgaggaacacaagataatccgtccatcagccattcttatccacaccacagtcgcatccccctcaaagctctcccagggtgccagaaattctcgctctgtctagtgtcccgactttccaagcgcttgtagccataccctctccaaatgatgccacttgacctcccaccgtgatgcaggccaaaattcctcctacaaataaatccaccaacacctccaacggactccatacttggggtattttcctttccctgctttctaaatatcgtaaatcccctctctggtcttggaagtcctttctccctcacacctttcggaactccgtgactctccgctctcatgcctccgcctccattctacccttagggctcctcagccagatctttggctagaaccatggtcaagggagaatgcgattccggctcctgtcacagacgcttaagtgtgagcgcaacccagcccgcctcctcctccacgcccctcacactcacgtgtcgtgggaaactggagtagccaaagctcagaatccccagtgaatacccttctggggatgggagacggggccagctaggggccggccgcagaccccggtcccagagctagtttcagaggccagcgttccccctagcgcctcgctgtgccccactctgggaaccggaaacaggaagcgccaagaggccgctgggcaaccgctcctcccaccagaccccgcggcatgtgaccatagaaccatttcgcccctttccccttcccgggctccctgataatcttaaactctgattggccagtattctgggactttagctccgccctcgttccatcagctccaatcactatcgaggttgtcgtttcgccttttctggttgcctttctttcaatggggtcccagagtcccgcttccagggcctctcggctcgcgcaccccggtcacgcggggtcacgcgcctgaccgctcccgggtagggttcgagtgaagagggtgagaggggcaggtggcggaagcggaagttacgcaggcagctcgccctcgggctccgcgggagttgtagttctcacgctaggtctcctccgggcgcttccctagcccgttcgccgcctgagagggacgctgttccgccgcgtggaagcttcgagtctcgactccactgttgacccctagacgagagtagtgcagcgacggggccgtgatgtgcgtcctggctttcttaacgacacctctcctctgtatttcctttttccagttgagtaccttggggtgaattattattgttactgttatctctgtcgttccttactgcttcgtggtattttgcttgataagcatgctctgcaaccacctctgttcgccagaggttacttctgcaaagtaggaagaaacgagcaatacgatggtaatctttgcgcctttgctaagatcttttgtaggttccttatgtcttactagccacttgttgaagtcctgctcattcttaaactctgttcagatgttatttttcctgtaacttcgtgcattcactctcttcagaattaacaatttcttcctgtggaccctcgcttgtggcttgtacctggctttagcatgttttcattccgcttccactcttacgttgcttctatgtgtgcctctctggctctatgcaggtgcctggatttttgattcttacccctctcattagaactactacagtgttttgagtctaataataataaaagctaacggatgcatatctcggtggtgcccggcacttttgtaagtgctttaaacgatagttaattcacttggtcttcacaccaaccttatgaggaagtatcttatcccaagtttacagatgagtaaattaaagcagatagaagctaagtaacaccgtgggtcccaagctattaagttatggagccagtatttaaatagtctccataatccatgctctcaagcactacgctttaccgactgtatgccattctgcatttctttgtttattagtaatacattcagttcaggctaggtagtaatcatatctgggttggatgttgccccaataaaaaaaaaaattaaatttttttcttcctgaaaatgaaagtaatttgtgatcagataacacagaaaacaacaaaacaaaaatcatacataaactcaccaggagggtgtgtatttccttcatgaatatatgttgtttccttttttcaaaaatgtatcagtcccacactgtggctcatgcccgtaatcccagcactttgggattccggggcagaaggatcacttgaggtcaggaattcaagactagcctgggcaacatagtgagaccccttctttcaaaaaaaaaaatcagctgggcttggtggtgcacacctgtagtcccagctgcttgggagcctgaggctggaagattgcttgagcctgggagttggaggctgcagtgagctatggtcttgccactaccctccagccttggtgatagagtgagaacctatctcaaaaagatatgtatgtatcaaatatttttccatatccttgactttacaaataaactttttaatagcataatatttagttctatgcattgctacttaaccaatgacattaatgttgagcatttaagttatttctactgacttattttttatcaagtaactcaacacagctttactgagcaattactatgtgccaaaaccacagaatatataatatagatcttggggatacagcagagaaaaaagacaaaaatccctgttacaatccgttctagaattgatgttcctttgttggtt

SEQ ID NO: 916464 - DNA, 4001 bp, Homo sapiens
taagattcctttaaagtttgttatatgtctgtatcggtgctaagtgcctcacccagagcatttaatctaatctgtaaaacaatcccaaaaatcgggttttattctctcacctattcataggagagaaaacaaagttaagtaacttaaccagggtcacacaagattcagatctagatctactttctttcaatactcaggctttccccactacaccaaaatgttctcttttaaaaatttttttccttcaaatgtatgcatgcaattataatgcagacattttagaattatgactaggaagcatacaaacgatgcttctggatcaaagttgatgagtttgttagctagtttatatttaattttaatccatcatgattgctgtattatctgatgtatgcttccccttatggctagtcagttgcccagacacagctataatgtgcaacaggtactctaaaatgatagaaatgacagtctttgatggcttggcaccaggcacagtggctcatgcctgtaatcccagcaatttgggaggctgagatgggtggatcacctgaggtcagcagttagagaccagcctggccaacatggagaaaccccgtctctactaaaaatacgaaaaaatagccaggcatggtggcccatgcctgcaatcccagctactcgggaggatgaggcaggagaatcgcttcaatccacgaggcggaggttgcagtgagccgagatcgcaccactgcactgcagcctggacgacagagcaagactctgtctcaaaaaaaaaaaaaaaaaaaaaaaaaaaagaaaagaaacgcgtcttcgggaggctcaatatcaccaatggaagtatgtgtaacagtgtagtggcagatacattgattagaaccactgttctagcataaaacttccctgataatattcaggtacttaattcatgtgacctgctaaaagtgatagggacaagcttgatggtgttcgcaggcagaggaactgaaaataatactacataaagaatagatgaattcaggtaaatttagctgaatttatggggacggtaaggttaaatacagtgattaaggtttctaaataattgcagggctggcccggtggctcatgcttgtaatcccaggactgtgggtggctgacgctggtggatcccttgacctcaggggtttgaagccagcctgggcaacatggggaaacccatctctacaaaaaataacataacataacataacataacataacataacataacataacataacataacataattagctgggtgaggtggcgtgggcctgtattcccagcacctcggcaggctgaggtgagggatcacttgcactagggagggggaggttgcagtgagctgagatcgtgccactgcactcagatctgggtgacagagtgagaccttgtttcaaaataataataataataataattgcaggactgtagttaacgtgagttctgcctgaaatgcttgatactcttctcctttcctaatatacgttccttctctaattttttattcttgctctcacagaacattgtccaaagcctgcttataggacttaatatgcatactgctttatagttaaatgtctgtgcctcccaccaagacaaatctgctttagttaaatttgtcttactcattactgtaccttaaaattttgtatttgcttgttgtccagcacaaaacgtgcattcaaaaaaacccaaaaaatatatatccaaatgaactttcttgttgcaggtaggcaagatcaatgtaacattctctaaggatagcgctgtcagaaaacacactgttgcacactacttgggtagcagtttcacctcatcctctgctcatactgctctggaagtctgtttttttctctcaaaggccaagtctctcatttcgagactcatctcaagagtgccgtcctctaagaagatcttcctgactccctcctgtggaactttacctctcccctcttgcttggtactcttcatgcgtcctatggtgaacaattacacgtaaacacctaaaacatattattattctcatttgttaacacgttgggctcctccccttcaaagaaaacacacagcctaaatgaaaaaaaggtactggtcaccacaagattttattcatccactggaccacccgctggtgggggtgttttcaaaaaagtgctagcattttcaatcagggcgacgatctagagtcccttctggtgcactgttacagaattctgattactgtaggttcaacttttcagtttgtgacaggattagctttaatttattgcaattaattctctttcatttataaaaccaacttatgcctcctctattcttaagctcctatttccttcgagggaagcagtggcctccgccgcctgtaccctccacaccacccggcctctcggtctcgctcccctttcccagcaccgcgtgccgtgggcctcttctcaccgtccggccgaaattcgaactccagaaactcgtgcccaaacttgcccttgtgccctacgtagtagcgcaggtagaaatcgctagccacagccatttttgtacccgggaagcccgccgaaaacgcagccaacgtgtcccccggcgccttgcagtgacgtcatcgcgcggaataagtgcgtcaccacaggcgcttctcttcctcctgcagtgcagccctagactaaagcgtgaaagccgagtatcgcgtgagagtccggaggcgctgaagggagggtcgcagcgccgtgactttcgctttactaggaatggaggcacattgttttcaaaataaagattacattatactagcaaagattagaaatgtgagcatatgatagtcttttttatggacttagagctaaaggtttgcaagtcacttttacttttctggtctcccaatccttgcggcgtttgtgaggtgggtgtggctctatgccccctttaactgtgagctaaataaagataaagcttagaatcgaaatggcagaccgggaatataaactatttttcttacttaatttctaacagggtgctttccctttggatagcgattggtagttacccgggacctctaagcctataataatagagacaaagtcaaaggaatccaactcttaaaaccctcacaccccccacacctgaaaaaccctgacagtcaccgtgctttttttaacagcagaacttctaaggttcttaattcattcaataagggttaacttttagtagcctgtgaagttttggcaatttgacttacgatacaataatggtttagcccattattgtttctcgccagatagaattaaattgggggaatgaaagaatgctccagtgtggcgtagtttttaaggtaagggaaagacttttacacaaagtttccttttcagatattattgatcacccttttgttatcaacacacagagtaatcctatctgtcggttgacaaccttcagtgatttttagtagaaagtggtggagagaagacctgggattcaatcccaacacttaacagctaactaacctcgggcaagtgactatctctaagcctgtttgttcatcagcctaatgcatatacagcaatctacattgccaagctcacagaattcttgagagatctaatgagataatatgtaaaataagctttaaattttataaaacattagttttaacaaacatttcctatgtgacagtttgaaactagaaataagccatttgatctggtagtctagaaaagaaagcaaacacgtaaggcgaataccagcacaagggagcaattgctataattaagaatatatgtgccatcctggccagcatggtgaaaccccgtctctattaaaaatacaaaaaaattagctgggcgtggtggcgcgtgcctgtaataccagatacgcgggaggctgaggcaggagaattgcttgaaccctggaggcagaggtttcagtgagctgagatcgtgccactgcattccagcctgggcaacaagagcgaaactctgtctcaaaaa

SEQ ID NO: 916465 - DNA, 4001 bp, Homo sapiens
tggtggcccatgcctgcaatcccagctactcgggaggatgaggcaggagaatcgcttcaatccacgaggcggaggttgcagtgagccgagatcgcaccactgcactgcagcctggacgacagagcaagactctgtctcaaaaaaaaaaaaaaaaaaaaaaaaaaaagaaaagaaacgcgtcttcgggaggctcaatatcaccaatggaagtatgtgtaacagtgtagtggcagatacattgattagaaccactgttctagcataaaacttccctgataatattcaggtacttaattcatgtgacctgctaaaagtgatagggacaagcttgatggtgttcgcaggcagaggaactgaaaataatactacataaagaatagatgaattcaggtaaatttagctgaatttatggggacggtaaggttaaatacagtgattaaggtttctaaataattgcagggctggcccggtggctcatgcttgtaatcccaggactgtgggtggctgacgctggtggatcccttgacctcaggggtttgaagccagcctgggcaacatggggaaacccatctctacaaaaaataacataacataacataacataacataacataacataacataacataacataacataattagctgggtgaggtggcgtgggcctgtattcccagcacctcggcaggctgaggtgagggatcacttgcactagggagggggaggttgcagtgagctgagatcgtgccactgcactcagatctgggtgacagagtgagaccttgtttcaaaataataataataataataattgcaggactgtagttaacgtgagttctgcctgaaatgcttgatactcttctcctttcctaatatacgttccttctctaattttttattcttgctctcacagaacattgtccaaagcctgcttataggacttaatatgcatactgctttatagttaaatgtctgtgcctcccaccaagacaaatctgctttagttaaatttgtcttactcattactgtaccttaaaattttgtatttgcttgttgtccagcacaaaacgtgcattcaaaaaaacccaaaaaatatatatccaaatgaactttcttgttgcaggtaggcaagatcaatgtaacattctctaaggatagcgctgtcagaaaacacactgttgcacactacttgggtagcagtttcacctcatcctctgctcatactgctctggaagtctgtttttttctctcaaaggccaagtctctcatttcgagactcatctcaagagtgccgtcctctaagaagatcttcctgactccctcctgtggaactttacctctcccctcttgcttggtactcttcatgcgtcctatggtgaacaattacacgtaaacacctaaaacatattattattctcatttgttaacacgttgggctcctccccttcaaagaaaacacacagcctaaatgaaaaaaaggtactggtcaccacaagattttattcatccactggaccacccgctggtgggggtgttttcaaaaaagtgctagcattttcaatcagggcgacgatctagagtcccttctggtgcactgttacagaattctgattactgtaggttcaacttttcagtttgtgacaggattagctttaatttattgcaattaattctctttcatttataaaaccaacttatgcctcctctattcttaagctcctatttccttcgagggaagcagtggcctccgccgcctgtaccctccacaccacccggcctctcggtctcgctcccctttcccagcaccgcgtgccgtgggcctcttctcaccgtccggccgaaattcgaactccagaaactcgtgcccaaacttgcccttgtgccctacgtagtagcgcaggtagaaatcgctagccacagccatttttgtacccgggaagcccgccgaaaacgcagccaacgtgtcccccggcgccttgcagtgacgtcatcgcgcggaataagtgcgtcaccacaggcgcttctcttcctcctgcagtgcagccctagactaaagcgtgaaagccgagtatcgcgtgagagtccggaggcgctgaagggagggtcgcagcgccgtgactttcgctttactaggaatggaggcacattgttttcaaaataaagattacattatactagcaaagattagaaatgtgagcatatgatagtcttttttatggacttagagctaaaggtttgcaagtcacttttacttttctggtctcccaatccttgcggcgtttgtgaggtgggtgtggctctatgccccctttaactgtgagctaaataaagataaagcttagaatcgaaatggcagaccgggaatataaactatttttcttacttaatttctaacagggtgctttccctttggatagcgattggtagttacccgggacctctaagcctataataatagagacaaagtcaaaggaatccaactcttaaaaccctcacaccccccacacctgaaaaaccctgacagtcaccgtgctttttttaacagcagaacttctaaggttcttaattcattcaataagggttaacttttagtagcctgtgaagttttggcaatttgacttacgatacaataatggtttagcccattattgtttctcgccagatagaattaaattgggggaatgaaagaatgctccagtgtggcgtagtttttaaggtaagggaaagacttttacacaaagtttccttttcagatattattgatcacccttttgttatcaacacacagagtaatcctatctgtcggttgacaaccttcagtgatttttagtagaaagtggtggagagaagacctgggattcaatcccaacacttaacagctaactaacctcgggcaagtgactatctctaagcctgtttgttcatcagcctaatgcatatacagcaatctacattgccaagctcacagaattcttgagagatctaatgagataatatgtaaaataagctttaaattttataaaacattagttttaacaaacatttcctatgtgacagtttgaaactagaaataagccatttgatctggtagtctagaaaagaaagcaaacacgtaaggcgaataccagcacaagggagcaattgctataattaagaatatatgtgccatcctggccagcatggtgaaaccccgtctctattaaaaatacaaaaaaattagctgggcgtggtggcgcgtgcctgtaataccagatacgcgggaggctgaggcaggagaattgcttgaaccctggaggcagaggtttcagtgagctgagatcgtgccactgcattccagcctgggcaacaagagcgaaactctgtctcaaaaaaaaaaaaaaaaaaaaaagaaaaagaaaagaaagcctatatgtggccgggcgcagtggctcatgcctgtaatcccagcactttgggaggccaaagggggcaaatcacccgaggtcaggagttcaagaccagcctggccaacatggcaaaaccttgtctttactaaaaatacaaaaattagccaggtttggtggcacgtgcctgtaatcctagctactcaggaggctgaggcaggagaatcgcttgaacccgagaggcggagatcgcgcagttgcactccagcctgggtgacaagagcgaaacttcgtctaaaaaaaaaaaagtgtgtaaaacatgccggtagtacagcagaggaagcaagagcattctattgcagagtagggaaatttgaaaaaagagtattggaaaaggcttgtcaacggaagtgtttgaattggaccttgagaagtaagttctgtgtatgttcagtgggatgaaaaagcattccaggcagaaaatgacccgagcaaagacagtggtgtgaaaattcatgtttggggaacactaagaaattcggtatagctagagcataaggttcaagtagaatgactaaaaaggcaaattgggccacgtttccttgagtccatattagta

SEQ ID NO: 916466 - DNA, 4001 bp, Homo sapiens
tccacacaaaaatctgcaatagaatatttgtagtagctttattcataattgccaaaaactaaaagcaaccaagatgcccatcaatagatgaataaacaaaatgagatacatccatacattggaatattactcagtaataaaaataaatgaactatcaagccacaaaaagacatggaggaatcttaactgcatattcctaagtcaaagaagccagtctgaacagatatgaatctaactgtatgacgttctaaaaaaggcaaactacagcggcagtaagaaggccagtggtcaccaggagaacaggagtgggaggatgaatcggtggagtgcaagggatatttggggcattgagactattctgtataacactgtaatggaggatacatgttattgaacatctgtcaaaacccatagaaatgtaaaacacacagagtgaacattatgtgaactatggacttttagttttaaaaaaaggtaaaaccaaaaaaaaaaaaaaacccagaaacaaaccagtatatggtaataaaacacaagtctaatacttttcttgctgtttgtcaaaattctgtatacagtaaaatagtaacatttattgcgtctaaaatgccagtttctatgctaagcactttatatatatcatgtcatttaatctttacagatcccattattatcctcattttagttaaaacttacaaaaagttgtgggacataatatgtgcttctttattaacctattaagtaacaagtggtcatctaataactgccataattttgacgtggtattgagtatagataatattttgaaacgtgcaacaagtcatgtgatataaagatatcggcaatatttacagggggcaaatcatagctactgctaatactactgtggcttttgcctacattccatttcagaagtcggtgaaataataattttttccactcaagttcacagacatcctgaattctatccatggataccttatcgtggactccccaggttaataattctggccaaggtacttaatacgctgccatattttgcaagcctctagggaatcaagagaaaaccaggccaatactttattttgaatggattctaatgtagcctcttttcaagcttttgcaaagaaacctgaactatgtaaggagatggggcaggagttgttttcagtatgcagcattgagagaagtgtttaagagttttatatcattaaagaggctcagcaatattaggttagcgacgttttctaatccattattatttaggctttaagggcctgaagtcgagttgaatcttgttgaaagacggggtaaaaggatacaggcgggtgagagaggatgcccctgagttttaacgtctgcatacaagagtcgctaaaacttactcgcacgtaattagttcaaatattggaaatcgtcttacagcacactataatttaccaagatgcttataactgtatacacacacacactctacagagaattagacaattagcagtttcaataatgaatacagagtcaacgacaagaaaacagggaacattttctcttcctttgaggaaatgcatgttgcctactgagctattcttctgcctctccttctgatgtcaacgcagagccagagccatttatggcaggtgccttgagcccgcctagaggtcccctttggaatactgcagcgactcaaggatcctggtcagcccttattggccccagctggtcctttggatgctcgggtgtgggtgaaggagcctcggcccctggaaaggaggggaccgactctctccgcaggtagcgacgtcgcctgcggccggtcgggggtgggtattggggagacccctttacctggcgtcgagaggaccccggcgcccctgctgccatccaggtgcgaggacagctctgtcgcgcccgcgggaaggaccggcgaatccgcgcgggggtctcggcgaggaccgcagcggatgctccgcagctcccgcaccggcctggcgggttttgtggttagcaagttcctgcttccgtcgcagcgacggcaagtttgccgcgggggaagggcacgttcctgccctgcaacccggagctgcttcccggcaacattagcgcgtccctccccgcggaggctccgggctcccggccccagcgctgagccccgcagggaggtggctccccccaccgccccgcgctcccccccagctcagccacaccgctgaccccgggctgggcgcgctgcgagggggagtgcgtgcctccctgctggtggcccgagggtctgcaggtgagccttgcctcgcggcccgcgcaagttaaaataaatgcacatggggaaaatgtcaaacagtacaaaaatagacacagagacaagtctacccctcacccccgtgccccagtctcctagtctccctcctcagaggcaaccactgagagcagttttttgatgttcaagggcttatagtgcatcctattgggggcatagttctgagaatcctctttccataattggaggatggagtcctcaattaaagatggcaattcttgagttaaatattatctgcaagacaaacttcagggaaggtatttggctttctgcgggatttattgtttgtagataggataataatggtgaaaatgctggtgtctgtaacatatattaaaactgtatccctaacacttagcatagtgcctggtacacaataggtgctcagtaaatatttaactaaaatatttttgttgactgaatgaatggaaaagaactgcatagggcataggttgtggaagtttctaaattactgctggccccatccccacctccataaacacacacacaaatgcaacgttactaaaccattgacacttagtttgccatatggtctaacctttgacagtatcttcacctctgttttgaaagagcttgcagacctgaagcgctatgcaattgcaagttaagtctaggcctgtacggccaacagctacacaccctagtcttaaccaataactacaggaggattaggttgactgagaatgcttgtgaacaaaggtccattgtgtgaaactaactctacttgtaaccaaaggatgactcttgaattacaatgttgctaaagctaggtttgaaagagttaccaaagaaaagtaaacaccagagtaatttcccattgcagtgattttcctgatgcaacaagggactgatctgcaagtgtgttttatcttttatcatctgatacacttcagggttcagggtgtagagctatcacagtttttgaatctctctacatggggtaatccatgctagttacaaagtagacctttccattattagaaacttcgtattcggtgctttaatacaatgaacctgtttctttttttgttttgttttgtgttttgtttgtttttagagacggagtctcgctgtgttgcccaggctggagtgcagtggtgtgatctcggctcactgcaacctccacctcccgggttatagcaattcttttgcctcagactcctgagtagctgggactacaggcacatgccgccacgcccagctaatttttttctattttagtagagatggggtttcaccgtgttgcccaggctggtctcgaactcctgagctcaggcaatccgcccgcctcggcgtcccaaagtgctaggattacaggcgtgagccactgtgcccggcctgaacctgttttcattgaagtgatatgttattttttcagttatgacagtgaacaaaggatattgattaaaataatgattaaagaaatattttctattatatatgtttaatttataaatatcattgtttatttattcatttttttagacagggtctcgctctgttgcccacactggagtgcaatggcacaatcacgactcactgcagctttgaccacctgggctcaagtgattcttttgcctcagtctcttgagtagctgggaccacaaacgcacaccacacccagctaatgttcttaattttttttttttttttaattttgagatggagt

SEQ ID NO: 916467 - DNA, 4001 bp, Homo sapiens
ggacaattttgaaacatgttttacattccttgtatacgttttggcatcccagctctgagcaggattgtggcattttaaagttatggcttccagctaaaaactggaatgtgccttcctgttctttcttgttctgaaggaagaaagccacaactgggaagttacacgggctttaaaatcatgggattgccctatacgcttacagtatccccgacagtccaaaggccagagcttctctgctgtggagtcaggtaaattcatgctacgggaaaattcaagaaagcgtcctgcccctccgctatctcccctcagtgaggacttacgggagttaaaagcatctggaaggtggaaatccagattggctatcttttcaaaaagatttcctcttattaaattaattattgtagctccaattttcatctcaaaaatcttacatacataatcttacatacacaaaaatcttacataggtaattgggcaagaggcattggaaattaacaagttgatatgaaaccatggaaagaaagtgtagaacaaccaagggaattattttaaagtgctgtgttgcttttgctgtttattttcaagtagcattaaaatcttggaaaaatgaaaaagaaatgaaagaagtctttaggcaattataacttgaaatcctgcaataataaaataaacattcttaattgcaggtcttgatcatattatatggatgaagtctacacgcagattccatgtgacagacaaaacatctatgaggaatatttggaaatatgattttggggcgggtatttgacatatatctccctgtttctttcaaaacatgaatcgcactctaaattgttttttaatacattccacatttggtaaacccaagtcagcacattttagtttagttgtgtgtgtttgtgtgtgagagagagagagagagagtcagtctcactctgttgcccaggcttgagtgcactggtgcgatctcggctcactgcaacctctgcctcctgggttcaagcgattctccaaactcagccccccgcgtagctgggattacaggcgcctgccaccacccctggctaatttttgtatttttagtagagagggggtttcaccatgttggccaggttggtctccaactcctgacctcgagtgatccacccacctcggcctcccaaaattctgagattacaggcattagccaccgcacctggcccagcacattaaaaaaaatttgatatgatactaatatcacaaaatgtactttgaaagggaaattataataaatatttgactgggtgcagtggttcacatctgtaatcccagcactttgggaggctgaggcaggaggatcacctgagtccaggagttcgagaccagcccgggcaacatagtgagaccctgtctctaaaaatttaaaataaaatgagaaataaataaatatttttaaaatcatgtatattttgagctgtaaaaatattgtaaattaaccttaggggaaatactttcatttagcattttggtgaagaaaagaggattctgtttcctgtaggtgctatcaaattctgggtcattattagatctgtaaatagagcctgctgtggcccagactgtgaaatcagtttcactggctctcttacctctccctctctctcccacaccctagggcatcttctctagttctttacaactgtttactggcctctgcctaaggctcctcacttagggcttcatccttggaagtttcttcttatttttgcccaagcatatcatgaatacttaccatccttccgaagacagcagctcctactgcacttctggccagtgctttcagaataatacttcaagaactgggctcccagcttctgagactcctccagattgattagaagacctgggaagcgacggatccagcagtctctgtaaaaaattgtgggtgagcagagagagtctgatgtccaccccatgcttaggagcaatatcacgttcactgctacctctgccacatgcatttttcctgtatgaaggaagactcgaagataagtctgatttccagacagaagctgaacactggagtttaggacagtctctggaacgtcagaggtgttgttaagggagagcttccttgcagcttttctggagagtcactttctagcaaaataagaccactctttgcacattgatttttcttttcttcccgagctccaggtgaacatttgatttgctggcattctttctgaacactttccaggctatttcaataccctgtcccttagcatcttaagacgtgcattctcttttctgcttttcttctttctctgaaagtgaatagtcacagacaccttttgctaagtaaatataaaggcaagtggaaaccttagtcaagaggctttctgagggaaacaacaagttagtcacttgacatcagataaaggaagtatccatttcatcataaacaagacatgattttgtgagggcacttctgtttgatttttaaagaacttgtgattgcagattgttttttaaaaaatcatctcgatttctttgaacttaagttctggcattcaggttcaccaaaaataatttttttgcactggtttgggttttcattcttacttaaaaaaaaaaccttggccaggcacagtggctcacacctgtaatctcaacactttgggaggctgaggtgggagactgcttgagcctgggaggtagaggttgcagtcagctgagatgacactactgcactccagcctgggtgacagagcgagaccctgtcccagaaaaatcaaaccaaacaaacaaacaaacaaaaaacactaggaaaatggtgaaatctttttaaatttctaaatagtaataaaatcatttcaattgcaatgcccaaacatttgaaaaggcagtgaaaatggactgttgcttttgtgaaagttgtgggtttcatatcctgtgacatccaaggtgacaaattagctcaaagcataaaactgttgcttttttgtatccaattttatatgaagcattagtgataatcagcttttggcacaaagcactctactgtttcttctaaaaaaagagaaactttctaatctgtgatccgtatttcttttatacctttttatacaatgactcattcaccttcttgacacaaaaatcatcagcattctttgaacgttcatctcttcaactgtttcctaataatagtcaatctagttattacatatctttttatttttagaaacatgataataattgataatgaaaaggaaagtagttaagactgaatagctttaaatatgaaacacttcattttcttctgagcaaaaattatattatgcactaactcctaaccttgcctaagccacatagaatacacaaaatgataaatatttcattctattgaacttcttacagaaagcaaatttcagttgctcacctgcaaagactcagacatttccatctgtttgaagggatagggaagagaggttttataatggcaaaggaaggaagggaaaggatgagtaacaaaaaattactctcgatattttatgagattccatggctatttctcttagaaaatgccctcgagacataaacaggaaggtctactctctaatcttataatcttcaagtctttgagtcatattaagtataggttcttttgtgtgctatataattctttgaagttctcgtattcctttcagggataatggaacaagccacaattgtttaacccttttgctgtcagattatatttaaataaagatcaaagtttcattttaaaggacctagaagtcttggccaggcggggtggctaatgcctataatcccagcactgtgggaggctgaggcaggaggactgcttgagcctaggagttcgagaccagcctgggcaacacagggagacagggtctctacttactaactaactaaagccctgcaggggctggtgctattaagaaacaaaaaacaaacaaacaaaaaagggatctacaagtctcaatgtaaaagcatgc

SEQ ID NO: 916468 - DNA, 4001 bp, Homo sapiens
tttgtagctgcaaaactccaatcctcacttccaagttcctctgggacttcctctctgtgtgtctaatctacccatctacctctgccacacttttttttttttattttgagacagggtctcacttggtcacccaggctggagtacagtggtgccatcatagctcactgcagcctcgaacttctgggctcaagagatcctcctgtctcagcctcacaagtagctgggaccacaggcacacaccactgtcccccacagctttttttctgagatggagtcgtgctctgttgcccaagctggagtacagtggcacaatctcagctcactgcaacctctgcttcccggattcaagtgattcttgtgtctcagcctcccaagtagcggggactacaggcatacactaccatgcccagctaatttttgtagttttagtagagatggggttaagccatattgggcaagctggtcttgaactcctggcctcaagtgacctgcccaccttggactcccaaggtgctgggattagaggtgtaagccactatgcccagcctttttttttttttaaactatttgtagaaacagggtctccctatgttgcccaagctggatctgccttccttttataaggatacctgtcattggatttgaggtccacccaggtagtctaggatgattcaatcttgagatcctaaaattaatttacacctgcaaagatcctttctccattaaggtcacattcacaggtgctgcagcacattagactgtggacatatcttttctttttttggtggaggtgtgactggggagacactattaaacccactacagtgtaaaagtaggccagatgtgatggttcacacctgtaatcccaagactttgggaggccgaggtgggcggatcacttgaggtcaggagttcgagaccagcctggccaacatggcgaaacctcgtctctactaaaaatacaaaaattagctgggcgtggtggcgcacctgtaatcccagctagtcggaaggctgaggcaggagaatcacttgaacccaggaggcagaggttgcagcgagccgagagcgcgccactgcattccagcctgggcgacagaggaagactctatctaaatatatatatatacatatacatacatatatatatatatatatatatatatatatatatatatatatatatatatatagccaaacttagctttatttcagagccgttgctgggcctgggagtggagagagatcaggagagcgccaccagcttggatcggttagtgagctgcggtggtttttgtttttgttttttttttcttgacagtgtctcctattgttttgtatttctcttttgttttgaggttttctgccatcttttctggaaggtgcatgatgctcagctctgtggttatttttgcccaacagctgtgtttccggtgagcggctgtgggattcttctgactcagcaaaactggagcagtaaccgtcaagaagccattcaagcaaggctagaaataaagaagctgtttcttcaccgtcccctcctcctcctctcacttccctccccatgggtaccttttgaaagtctcacaaagcactttgaaaaaactacttggaccagtatgctggagggttgactgaaggtggcccctccgctgggctttaagcaaacagataaattctggaaaggactctgccctgccagcctggctgtggccttcggaaggcccctcccaacatgcccccacccgccgatcacatggactgtgtcttacaagtttcccacaggtctgactagtgaaagcagaggctgtggggacttttgtggtttttctagggtgtggccccactttgccttcaccaggcctgagtatctatgccgtgcagcttgcctgcttctcaaaggtcatgatttccaccctggggctgggaggcagctacatattcctacccgctggcacaggatctggccctgcactcccgagaggtggctgcgagccttgcggaggcagagagagaacaaaatggaaaggaatcttcctcccggagagccatcttctgtgcatgccggtgcctgcaaaagacaggcgaggcgagacagctgcacctcgggcctcgtcgctgttgctgagaaagaaaggaacaaataaatttagctccatcctacgcatcctttgcagctgctgattgaccaaacagaaagaggcctctatttcaaccctggcttctcagctttttgcctgatggggtctgctatcgccctttacaagggacttttgaaggaggaaacgggccgtggccttatttagcgcctggccggctggaggctgcacagacaggagttcaagtttagggtgtctcttcttgcccatcccaaagcaaaatggtggcccggaaacgtttccaaatgggcttcggctcctggaatttccaatgtatttatttggaagccagaacatggtgggtggagagatgtgtaactgtgccgaggccagcctatagctcccgaagccattagtttaatagcaccatttgtggaaataaagaactcgctgactgggcttgaaggtaaaagactggaacgaagcactgagggggtttcgtggggctcactagcgtggagaggtccctgcgggatgggggacaagctgtgtggactttgagtcagatagacttgggttccagtcctagctctatcacctaaaggcacgttgtctctggacaaagagagcctttgctctgtgatatgtaagtgaaatgctagctgtgacactgaacctctctgagcctcagttccttatctgtaaaacagcaatgatgacacgaggtcgtcacaaggattaaatgacaaagaatactgaacctacatagcccagctcttgctgtgccatgatggtgtagagtggcccctgtttgacctgcccaggcccattctccaaagaagctgtacaggtgaggtggctcacccctgtaatcccagtactttgggaggccgagaagggaggatcacttgagcccaggagtttgaggccagcctgggcaacatagagagaccccatctctgcaaaaaaataaaaaaaattagctgggtgtggcggtgcacgcctgtggtcccagctacacaggaggctaaggtgggaggatcccttgagcccaagaggtccaggctgcagcctgggtgacagagcaagaccctgtctctaaaaaaaaaaaaaaaaaaaaaaaatagaaggtgtttcttccccaatcctctcctttcatttccctccccgtgagtactatttggaagtctcacacggcactttttaaaaaccactttaagtccgggtgcagtggctcatgcctgtaatcccagtactttgggaggccagggtgggtggattacttgagatcaggagttcaaaaccagcctggccaacatggtgaagcctcatctctaccaaaaatacaaaaattagcgggacacggtggcacatgcctgtagtcccagctactcaggaggctgaggcaggagaatcgcttgaacccgggaggtggaggttgcagtgagccgagattgtactactgccctctagtatgggtggcagagtgagaccctgtctcaaacaataacaacactttaaccagtatccgggagggctgctgaaggtggcctctgctaggctttacacaagcagatgggttctggaaaggactccaccaaaccagcctggctttgcctttggaaggcccctcccaagatgcccccactcgccactcacatggactgggactctgtcttacaagtttcccactggcctgagcagaaggtgggaggaatttctgtggttttctaggttggccacagaatactactcttcctcctcccactcttttttccgtaagatttggggctcaacttactctcaaactctggaagtgaggaggtggcccaggcctgatcatggggtctcatatgcccctggccatagtgattcatttctggaaacatccctgggactcaa

SEQ ID NO: 916469 - DNA, 4001 bp, Homo sapiens
agtggctggcgtgaggggcagacatttccacctcactggaagaagcatggcagctgggggtcccagggcttgactggtgtagggctgaggacctgaatgtaggggtgatctccagtccaccctagcaaggacttcttacagggttgattccttctttctctccagatccaggcaggggagagggaggactgtgcattacgagagtccgggctgtgagtggtagaaccaagagtcctcttcctagaaaagcctgatcctaccacagtgtcaccacgaggggaaaagcaattggtttttagaagggttctgccctcttcagctataaggaagcctaggaaatcctgagccatgtctaacttcttgcctcctctgtccataactgggatggatatttagctggtgtctccatgttgagagctggggttttcctaacattaccccagttgacaatgggagtgagtggatgaatgatacgcttgaggggacacactttttttcacctgtaagtgtgagataggagggagtggggccctaaagctcagagaaacttcagtgtctggacaggaaggctcagggggcacttgagtcctatccttcctaaatcctttctgttagccttagcttggtaggaccctctggctgaaactcagagctcctagagcaatggagtccaccttgagaactgcaagggaaatgtgtttagagggatgcactgactgtggcttgagacgactctgggtggggtgaggagacctcatgtgcactcccttctgattggaggccactcacctacgctcctctgaaaaaggcagcagatgagcatctacaaggtaggactcctcccttaattctaagggacacctcactgtttcctcccactgtctacagagccttgactcttccctcctctcagtcaaggccttggttaccagcaagtctcaactcttgtttatttttaagccaatgagtttgaggagtgtttgtgggaaagggaggaggtttttggagggcctgactgggggagatgggttaggggagccagaggagatggagagaaagaggagggagaaacccacacgtgaatgggggaggggaggatgcaacagctggatggaggtgaatgccacagctggaggtgaatgccacagctggaggggattaggaggatcacagcttgaaggggagggggaccaacgcctgggcatgcaggaacaggtgctctctgactaatcttcaggtccagcctgctgtgtgtgtgtgtgtgtgtgtgtgtgtgtgtgtgtgtgtgtgtgtgtgtgtgtgtgtgtgtgtgtgtgtgtgtgtgtgtgtgtgtgtgtgtgtgtggagatggtgggtatatcagtccttgcccttcctttccttccctagagggggccaaaactctccctcctccttccctctctctcttcctgaggatgagtgggaggagatgttctcttgccctctgtcctttaagtctgtcccccaatcatcctccaccccaccccaatacggtcctttccagctctggaggcccttcgtctccaagctgggccgcggcatccctccgctccattcccttccttcccagccccacaggcgtcgggtccaggtccccagttcctccatccccacagcctcagcatccccacgccatcaccccgcaccaggccacatctgcatcccgaccctccctccacgcccggatcccaggacccagacccatccctgccccccacccccccacaactcggccaggctctcacctcgggggctccgcggccgcagcacaaaaggcggcgctgctgcagctccgctccggatgctgctcccgcctcctcctccttctcctcctccttccctcctccccccgctgccctccaccggacccggggcgctgtcacaggcgatgctcgtgcggtgtccggatgcacgggtgtcagcttcagctttctgcccccaccccccgacccctagccccgtccctgctcggcttgaactcccgctccttccagggcccccgcccctggccccccgggacggacacgccctgagcgggggatgctgcgatggagccgccggcctcttaaaggagcccgctgctgccatccggcgcgctccaggctcgtacctggcccgcctgggccccgcgcctccctgctggcggtgtcctatggaggtcccacctcaggcctcaggctgattccacaggaaccccctatgacccgtcttatagactcctttctacatcggagagagcagcccctcagttgggatccctagcgctctggcattgctccccctatcataccgatcttgccagctctccttcccttgattgtcaccactcactccaatttcacccacttggaattcactcggctctaggccccatcctcctccagtgttcctggatgacccctcattatcatttcaagattcctctggacctccaaccccggctcagagtaagacatctttcttgaccccttctcagaacactcattagaaccttttttttttttaatgtggtctctccctttctctctccaaggtcacaagatttccctcagcccagtggttgtgcaactttgggggaggaggcaatggggctctaggactaaacaatgcgcgtctgctcaacacccagatcagttgattaatcttaggcggccaaaattcacttttgctctcttcagctgagagacccaagactcatggaagagggaacaagaccaccaaggtgcctagtccttctaatcctgtcgtcccacattacagcctgattatcaggccccagaggtttcctcgccagttaaagagaggttcactagagcggttctaaaaaggtttcacaaaagaagcaacacctgaagggaggtgaaggacgacctaggaaaaggaagcaagttctgtgtcacggaggcccaagggcaaggggcttaggctgtgggttgaggggactgtctgagacggacttaaacctgcaccagctccagagccctgcggaaacagagatcggtcccctccggcgtctaggtaaggcccaccctcccagaccgcaaagagccaggatccgacggcagcctctccggaccaatcacaaccttccttcatcaaggaggcggggtcggggggggctgacttttccttgtctccgcccctttagtcgaagtaaccaatctcagtgcacctaggggaagtaatcgcaatgggagtaaccaatgacgccatgaagcttctcgtgcgtgcttgaccctgcctctccagctgcgacacagatggcgcgcgggctcttgggttctgtagttttctcgcgatccaaaaggctccgtgcccaagtgagtccttaccgcctccctacccagcggcttcccctccgctagtacgcatgtccacagcttcacggaccgggagagagggggcgcggaaggaaggaggcgggacggtattacaaacaaaaaaatacggccttctcgagaagcgacggcggagggcccgctcctcccagaaggcggtgcagcctgcccgggcgagccacgcacgcagagggttgtggggcggatagctcccctccagatggaggctcacgaagtagggtgggcgggggactccatatcccagcgtgccccgcggcgggccctaccggccgcgactccgggcttggccccggccctagctcgtcggctgtgtattggggcgcgtggaggctgcagtcacggtggcgcccgcggggacggaggagggaatgagtgaagaggagcaaggctccggcactaccacgggctgcgggctgcctaggtgagccgtctcgtaccgattccttcagggcgaaaagcgtggggccgtgcggagggagtagcggcgcggccccagcatgcacctggcctgagggttgttcccggcaagcactggggcagtgggcagtggttcccggcgtgcaccggggcagtggctgctgcctccagctctaaatagtttggggttggcccggttcccag

SEQ ID NO: 916470 - DNA, 4001 bp, Homo sapiens
acaaagccagactccgactcaaaaaaaaaaacaaaacccaaaacaaaagaaggatatgtcaaggcagtcttttagaatctttatgatttaaaacctcgtcttccttgggccaggcacggtggctcacgcctgtaatcccaccattttgggaggccaaggcgggcagatcacgaggtcaggagatcgagcccatcctggctattacggtgaaaccccgtctctactaaaaatacaaacaaaagaaaaaattagcagggcgtggtgggtgggcgcctgtaatcccagctactcgggaggctgaggcaggagaatggcgtgaacccaggaggcggaacttgcagtgagccaagatcgggccactgcactccagcctgggcgacagagtgagactccgtctcaaaaacaaacaaacagacaaaaaacctggtcttccttaatgtatatgttatatgttgatgcctcctttaaagggttaagtttctttggaatgacttgatgattttgagaaactatatacaccacctaaagaattggtagaaatgtaaattcttaatcattactagtaactgtcttgaaggggaaaataaccccaagctgccaatagatgcctgtccttcaagataaaatgaaattattcaatgcactgggctgacttaacactacaaataagtaaataatacatcaaactttaagcgtcaatgtttaattttcataagactaatttcttagctacagctgtcaagacagataactggccctgagtgggcaaaatgtgcctttaaaaaaaaaaaaagttaaaaacaggttttagaaaacttattttatttgtgtaattttcgaacacacatttgcttttcttttggtttaagtgcagttaagtcacaggaactgttaacttttcctaagtaaactcaatgcttcctaggagaaagaagaggaaaaagaaaaaggggagaatacacggaaaagtgaggacaacctattccccaaaggacaggttttgtacggcgaaccacctttttccaactgcagatttccagaaggctgatttcaaacaaatcgggagggatggataaattccaactctccaagttctgtagaccatccggaagcaaatgctggcggccttggggagtgatcgaaacgtgtagtagtagtagtagggctctcttcgtcccattcattgacacttaatagtgtctccaggccactcacctctgttccagctgagcacaaatcacactcaccagggaagctggcgggagtcggacacacacctacacccacacccataacccttggccccagggctgtaaagcgcgatccacggaatccgggggaggccgaaacccggtagtcgatggaacctctcactgcaaaatctccctgctttttgaggctagagccgagaagaacgccacaggacaacgcgggggaagagggggcacctcccccttaccttgatggctttgtccatgtcgctctcctccgacatactcagtggggcccccacagccgggagaggcggaggctgctcagcagccctgtccccgcgcggccgagggagcaaagggctcggcactcgggcccctgggcctcgtggcgacgggcagcagccgcccctcgggaccggtggggatgaggaccccggcgccggctctgcttcggcgggcggctctaggctggcggcagcagcagcggcggaggcggcggcccctggggacaggtctttgtgctgggccccacgcggccgcctcctagcctcatccccagctggggaggcaggctcctggggtagggcgaggcggggagggcctcgacccggggcgccgtgcaagggcctcgcggggccgccgcttagacctgggctcgccaggtcctaaagaagagcctgcgcctccgcctccgccgcctgcaccgccgcgaagccgaagccgaagccgaagcagagctcggcgccgctgctcccgccgccgcctcagcgccacacatcgccgggacacccgcgccgggcagccccgccggccgccctcacgcacgcgctgtgccccgcgggagctccaggccgcccctcctgccgcccagcttcgtgactccacggccccacgcgccccttgctgccttccgctggggtttccgagccgcccccgaaccgcgcacccgacttgcaggcgtccgcctgggcctccctaagacacgccgcatacaggacaggcccctgggccttccgcggcgatggcgctgcgctaatgacgtcataggcccggactcgcgtgagtgcgcgtgcgttggggcctcagcctttatctccactctgcggagattcacgcctggaaaacgctcttctgagaggatctgtggaggtcaacccaggagagagaagacaggactgaagcactgaaagggtcctgccgttaagggcgcaggattgtatagaatatataatagcagtagcagctctgtttacggagcattaaccttacgtggagttatttcctgcatttcctcctttcgtctttacaaggtagccgtttggcgtcgtgaggtatggatgttcccatccctaatttgcaaaataggtaactgaggctcaggagagctagactagtttgtgcacagccgagaagtggtcaagctagaatgggaccccaggtttgtgctccctactctccaccgataacctatcaaagggctttgcaagagcttttgactaatcgtctgtcaatggttcttcattcacgtattaattgcacatcagtatgtgccaaatctactagacattggagaaacagtaggaacaacacatggtaccggcacatggatctttcaggaaaacgaagtaggtaataaacaggaaaaagcccgagtctgatgctaagaagaacataaacaggatgctgaggtaagagaataactggatgtggggacttcttcgtattagatgattaaggaaggaatctcaggaggtaacatttaagctgagacccctgaggaatgagaaagggctggctattggaaatccaaggaaagatttctgggcagatgggtagaaattttaaggtggaaataagctaaatatgttcaagaatcagcaagaaggtcattgtagctggagtagatcgagtaggaggagactgataaagggtgaggttggaggctgggcgcggtgggtcacgcctgtaatcccagcacttcgggaggccaaggcgggcggatcacttgaagtcaggagttcgagaccggcctggccaacatggcgaaaccccgtctctatttcaaaaaaagaaaaaaaaaagtataaaaaggatgaggttggagatgtgggcaggggctgcatcatatgtggcctttgggggtcataatcaggactttggattttattctaagctattgtaaggttttaaagtaaagagtgatgtgaacaaatttgttttaaaagatcactctgctttgtagagaatagaatataggaaagcaagaatggaaacagagctattaggaggctattggagaataatgcagatgagagattattacactgtctgaactaaggaggtggcggtaaaggtgtagagaagatggatttttttttttaaacggtcccactgtctagagtgcagtggcgtgatcacagctcactgcaacctagacctcctgggctcaggcgatcctcccacctcagcatcctgagtagctgggactataggcgcatgccaccatgcctggctaatttttcgtattttttttgtagagattgggtctctccacattgccccggctgctctccaacccctgagttcaagtgattcacctcccttggcctcccaaagtactgggattacaggcgtgagccaccgtgcctggctgagaagatggatttaagacatattttggaggtaacattgtcaggacttcctgaaggattagatgtggaagggaaggataagaaacagaccaaggataactttcaaatgtatgcttaagcaactggatggataatg

SEQ ID NO: 916471 - DNA, 4001 bp, Homo sapiens
tccttgcacctcacctgcagtgggttcttggtgctgatcgccaggacctggtacttgaagtagcagagctcacagctccaggagcccctctcgctgatccagcggatgaggcagggctgatgcgtgcagcgcactgagccgtcgcagcggcaggggcttaagagctccccctggaggaagagtgaggaggggccctgtcagccatcaccaccccgaccccactcagccgcgctccccgacagggaaacctcctcttcaggtcactttcccaccttaaataactcaggcctttcacccaagacagggcaagaggctaagtaaggctgcaacagaaaagaagcttcccttggagatcaagggaaacttcccataccaaagagatgaaagatggaaagggatggggggattagaggggagaagggctgggtcttctcttttcctagaatttgggatgggtagtctttaagacttctcaaaagaaaggcttcctcttaggatctggagggaggggagtgttagagcttctgagccatgctttccttcccccaccccatcattgtaaagttacttcacagatctggcgcaaactgggatgggttatggtcctcggtttccacgtactaaaaaggggagaaatcgcggaggtgggagtgaagggtgtttccctttaatcatggaatcaattctcactacacagagacaccccctggcactattctgggacaactttgcccataaaattttaacaaagaatactctttagaatgagatagaaagttgcagaatgggaagtgaaaaaaagtgccccacggggagaaatactgagctaagcaagggcgctggctgggcccctcccttcaaggggggcacagaagcactctcctttctgcccacctgcaagagaacaggtccccttagcttacggagaccctggggcgagggaaataggagagaacagcagtccctgttaatgggtgagagggattttgcgctctccggggagaaagccccaccccttcctggggacccttgaccctccgacacaaacaagcgctccaggagtcccctgccagcccctcggcctcaccccattcccactccgtgtcctggggcccgcccagcctccttaggcgccgcgcctgctcgcggtctccgctgacaccccaggtgcgcgcctccaccctccgcgcccggccaggtgcccaggcctgacctgctccgggccctggaagcagatccggcactgaggggttcggagtccgctgtccaggctactgctgagcgacagggcgtccagcgcgcccgggggcggcagcggcggcgcgggcggcggcaggggtccggcccgcggctccttgtcgccggccaggccccgggcccgcggctccgacccgtagtactcctcctcgtcgccgtcgccgtcccgggtggagcagccagcgaagggcgcccagccgcagccgcctccccggcccccccggggttgcggctcggcccggggccgccccccgcctgtcagcaccagcagcttcagctcgttcagaaacatgcggagccgagacttgagcatcgtccggacaccgggggcggggggcagcgtgcaaggggggctcgctagcggcggggggaggggagaggacaaggccgggaagggggcgcgcgctagagagccgagccgggccggggtcttcggggcctgcgacagccgttcactgctgccaccgccggggctccggtgcttgcggggccgagcgggctggcggcccgggggcggcggggtgggcggccatggccagggcagggggcggggaggggggctcagggtgccgcaccccgcgggtctgggtctggagcgggccgggcccccggggttacgcgcccgggtcctcctgcggcggggccgccccccatcgccgttctctcggtcccagtccccctccggctccgggatcaggcttggctcggcccgtgcgctcggcggtggcaaatggcggctccttccggcggcggcggcggcggagacccccccggagtggcgggcgggcggggcgggcgccggggagcgggtgaaggatggagggaggggcggggcggggagggggagaggagaaggggccgcggctgcgcatccccgccctgccccgcacgagcaggtgtcccaggggcgggggcaagtgtgggatcccgaggagggtggaggaaggggagtggccaaggaaggggagtgtgcacacaagttgactaggtgtgtgtctgggagtgggggatgagcgggtgagcatggaaggtgagtggttaaatgacgcaggtgtaccagggagggtgaggcttgtgcaaaatgggaatgtgcaaagaaagagctgtgcaagtgtcggaggtgtgagggaggtacatgggcaggggtgggactcaagcaatatacactttacccaaagggctgaaaagtgtgatcgatggggactgggaaagagaggtgtgtaaggaatggaatcggattgtctgagaaacagaagcctgtgattgtaatgtgtgaaggaggtgagggagggagcaggggaggtaggcgtgctaaagggatgggagtgtctttcctggtactctcctgccctcacctccactacactgaagtgaacaatacacacacttacccctttccttttatggagacttccctctgaggccaagttctacccccatcacatttttttctttcttacacttacattctccctctcctcccctttgcaaagctgagggaaaagggattccaggggagctcattgggtcaaacatactgggaaaaaatttaattagtgaaagagtaattaacagaagaagggaggggacagagcctgggacagactgccaaattaaggttcctcaatagaaagtgatggagagacagtaatgttcccatgaagtattcaaatgttttggatggactaatgaatgaatcagaaaaaggggctgggacccaagcagacagagaggacgtcttctgttgcaaagacagtaagctgtgaaggtcttatgtggaaggtgaggctgaagtggggaatgctggtgtgggaagggagtttgaaaaactcacagacaattatcttagccttccagaaggcttacaaagcacccacccctagcaaggtagccaataaaacattcacctcttgagccccttagtcagttcagtccttgaggtttttcttactagtgttccagctgcccttgccaggaggggcccagggctacaagtatcaggatggaaagaggaggcatctgtattaatatgtattctattttgctctaagtcatggtttatattcatcttctagtttgaactcttatattctcagccagatggttaaggaaaacagaagttagagtggaaggagtggcaaatagggtaataaaatggctttagattttagacaaattctcacaaatgagacactaaccgctttcctcctttactcccatacccccaaagggctgggagataaagaccttggagccaataaaacaaagtaggagaaatctacttgtgtctacctaggtgtctgggcagaggccatttgggaacaagtgtgttctggacagtgctaagtgctaagaaagcggcactagggaaaaagagggaagcacaataactccaaatgagtagtcacaaggtttgcagaagggggcatgtcattttcattcattgtggtggtctggagggtgcagggggtgtggtggtaactttcttgcacatgtgcaatcctgtatccgtcttatatatgatgtgataaataatatcatatacatacatatatacatagaagcatatatgcacacatacaaatatcacataatcatagaaccttcctactggaaaaaaaaaaaaaacttaaaaggtcaagtattcctgtctcctgctcatcaataacttctctgccagatggcctcaggtctttgcattaacactcccagggaggtttggaagttggaaaagtgagaggatt

SEQ ID NO: 916472 - DNA, 4001 bp, Homo sapiens
cttgcagtaatgggtatagggctccccacaaaacaatgtcggctagagattctgtctcctttgttggggatagaaaaggaaaatgtacacaaatgagacactcagtttcttcccaatggtaatatctaacatttactgagcactttatatgtcaagcactgtattaagcactttatatgatctcacttaatcctcacaataactcactgagataggtactaatattatcccatttcacaactgaaaaaaattgaggattagagagattaagtgatttgccaagattacactactagtaagtggcagtgttgggttcgaacactctgaatacagtcttccctcttaatccttacaccataagccttccccagtcctcatctcaagacccaactcaccccagccaggaaaggacagttctgacgactcaagctgtggtcaatgtgagtcagggctctccgcactgaaccaagaacatcttcccccttcttgccttggaccactaaatagtacagggcagcagacaaagctggctaaaatgcaggggacatgagtcaggatggccacgcagaacaagggcctgcctgacatcccccataccttagtcctacctgcagctctgtcgcttcccattccagccactggttagtgaggtcatcttgctcccagccagataacaaaaaaaaatatctgcccagagagagagcaacagatgatggacttagaggggcccatttagcccatttctcatcacacagggaaacaatggctgcaaataaagccacacaaatgacagtgaggcctgatttgattcagccacctccctacaccaaggaccaatactgaccggcagattgcactagtggagaagaggtagttgccgctatccagctgcaagacagggaccttaggccgggtcaggaacgggaccacacaatctgatgcaagaatggaaaatgggttaaaaaaaaaaaaggaaaagaaaagaaatactttgtcaacttaggataaccttgcattgttcagtgagtaaaaaaagaaagatgggcagtctcaacccagaagttccaggataggaccactgaaagggggtggtccggaatgggctggagaggccagcaggtgttcagctgaaactgccagctggaagcaacagatggggactgcagaggaggtggtggtattgggatagtgctgcagccaagaacttaacgactgaaagtaactgggatatcttcataattatctgaaggtcacagtgggagaacaaaattaaaagaactgagaagacttacaagagaacctcctaagagtcacccaaacaatcggctgagaatgagaagaggtaaacagaaaggaacgtgtgtgtgtgttaggaggggagagagggatttcctaagaacacaaaagggtgcctgggggctgtcatgctagtaactaaagagcagagggggatgcctgataggtgtaggagaaggttgggaagggaagagcagtttactggggtgaggcggggaccgggaagacggaagaggggaggagagagataagggaagggtattatattgagggtaattaaaggaagtgaaagatgtgactgggagggaagaaggcgtggagtgatcaaggataataggagaagtggtcgattggggtgtgtggcgagggctaggggtttggcaaagacagctgcagagaatctggcgtgtttcggtcccgcccccccatccaccgcccaccagcaccagcacgagtaccttccgggcctacagtgctgatgagcacctctgctctgccccgggctctcccggcggcggccagcaccggcaagcaacccgggacgccatcactcacgaacagtctcatttcgccgtgaatccctcgctgatgcaaccggaaccggcctcccgcttctgagttcagcggcctccgcgaggcacgccgggaaatggagttccgtattaggccactgccctggcaccgctaccggaaagtagactatttctcccatcatgcaacgctaagacacaggaaaagactatcatcgagatgaagaggccgcagatgcgggctagactgcacttttttttttttttttttttttttgtgagagggcgtctccctctgtcacctgggctgaagtgcagtggcacggtcttggctcgctgcaacctctgcctccagggttcaagtgattctccggcctcagcctcccatgcagctgggactacaggcacgtgccaccacgctcggctaatttttgtatttttagtagaggcgggctttgaccattttggctaggctggtctcgaagtcctcacctcagatgatccgcccgcctcggcctgccaaagtgctaggattacaggcgtgagccactgcgcccggcctagagcagcactttttttctggagatccagaagagacgtttaggttttagggcaagtcgcacttttatcctcttacgctgctggagggcggtgactgaagccgcggctgcttctcttgttgtggagaatgaaatggccatgtcataacagcagctactcgcagtggctctcgatgcaagctcttaacggtcagagttttagagttcggagttaccatgtgcggaattagtgacaaagtggaagttagtgtacatatccatcctatcaacaacaacaacaaaaatgtacataggccgggcgcggtggcttatgcatgtaatccagcactttggggagtcgaggcgggcggatcacctgaggtcagcagttcgagaccagcctggccaacatgctgaaaccccgtctctactaaaaatacaaaattagctgggcatggtggcaggcgcctgtaatcccagctacccgggagactgaggcaaaaaaaatcgcctgaacccgggaagcggaggttgcagtgagccgagaccgcgccattgcactccagcctgggcaacaagaggaaactccgtctcgaaaaaaaagaatgtagacaagtaaaatattaataccagtctgagttcatatacagctcgacgtctcatcaaaggggtagaagagcatctcttttttttttttttctttgagacggagtcttgctctgccccccagtctggactgcagtggcgcgatctcggctcactgcaacctccgtcccccggggttcacgccattctcctgcctcagcctcccgagtagctggaactacaggtgcccgccaccacgctcggctaattttttgtatttttagtagagacggggtttcaccgtgttagccaggatggtctcgatcccccgacctcgtgatccgcccgcctcagcctcccaaagtgctgggattacaggcgtgcagccgcgcccggccaaacatctctagggaaaagatgaaattgagaagtaaggccgggcgcggtggctcacgcctgtaaccccagcacgttgggaggccgaggcgagcagatgacttgaggtcaggagtttgggaccagcctggccaacgtggtgaaaccccttctttagtgaaaatacaaaaattagctgggtgtggtggtgcacgcctgtcatcccagctactcaggaggctgagccaggagaatcacttgaacccaggaggcagaggttgcagtgagccgagatcgtgcctctacactccagcctgcacaatagagcaagacttcgtctcaaaaaaaaaaaaattgagattcaagatggctaagagtttggcaataagtatatattatgcaaggaagcacatacctgttattgagaaagggacgcttcttattcatctttatattattttaagaataattaatatctaatagtacttatgagctaggcactgttttaagcactttatatttgatctcagaaaattctatggaggttctgggccttttgaagctaggccataagaagttttgcagcttcagttgcaggctatctagcacactggtagctttgagctgccatgtaagaaatcctaccactttgagctgccatgctagagaggtctca

SEQ ID NO: 916473 - DNA, 4001 bp, Homo sapiens
cattaagacttttagcttatctctgtactctcaggcgcccctcaccactctgaccttggggacattaagtggacactccagaccgcacttgcaggtcccatcgctgaggaggtagctccgggtttgctccaaggaagacagctctgtgccacttggactgcgagaggacagggtcagaggacatggggttagctggcagcgaatcaggcaatactcctaaagcacagtgcttaagttacagatcctcctagaagaacagaggataaggaatgtgggaagacacagaaaaagggagaatggattcaaaggcccagagctacagaaagcaaaaaggctgaggaaggaaggggaagagaggagagcaatcgggtaccagagagctgagctgagagaagaaacggaagaaagaaaacctgggcaactggagtggcagagcttggggacctgtgaagatccgtacctgatgtagagcacagcaccctctcgcacacagcgctgccagccgatggggacagatgtggccacagggcccccagctctgtctgctccactgctctcattgcccccattcattgtgtgtaatcagctcccgcgtgcctgataacacagacatccatgtaggcactaggaggattaaactgagcgaagtacctgagagaggactccaggaaggcaaaggttgtggggagacccaagaaaactcaggggaagccccagaggagcaaggggaacccctcagctgggagggagactgaggagtcctctgccgtatcaccacagctacctgaacatctctgcaaacattgtggggtccagtctaaagccggggccaccagcttagcccacacctgcaacgcaagtagagagatgggactgtcaggagtctgcccaactctaaagagcagcacagcccagcaccctctcaaaagaaagatccttaacaatgtgaggcaagcacctataaagatctcggggatctgctggcttagtctacaaccatcctttccaagcccagtccctagggaccagagggtcagaacctcagctccctgggaccaagaaagtctagcccaattcttaggcatatgaagggcaaggcctccctccattcggagtagaagacttcaaccaggagtatgggcacattcccataatgctaggccactaggaagtttcccagagtgtctggctcctgttgttctctacccaggaagatgatataaaaagtacagattgccccacaggtcaccaggcaattgcccaactgcccgctggggtggtaccagcagaactccccccatgcctgctccatcagacaatcgctgatatagttcattcgggtcttaagaggtgaggatcacagctcagtcttctcccaggatcctgggaagctcctgattttccctcaagcctacggcaaagggattcagaacctcctattccactggcttccgattatctccaagagagcctgtcctccgatagaaggggaagcccctccaacctgcaggtatcctccccagcctcaccattgctcccaccccacactggcggcttccaaactttccctctcacaacaaggcgccctgtcacccagactgcttccctcagcttgaggaggaggggaaggcgcacgaagtaggaaggaacttggggagagggcgggcggagggtgggcgaagcactgaggggagggcggtgaggaaggcagaagtctggcagtgagagggagaagcggcgggggcaggtgagggcgggggagtggggatggggccggggaaaggggccgagaggacgcggagggggcagagggtagggacgggagggggaggggcagggtggggggggccgggccccgcactcaccgcggcccatggttcggccggccccgccctgcgcagtcgcggcccagagggtgagtgggagggggtgggaggagggtcggtggagcccgagcctccggtacggccccggccggtcctagcaggaagcgccgctgccgccgccgcggatcaccgagcggcctcccgcgcatgcgccatgggggccaggggcagccctggggattccgttcccagaaggcactgcgcaggctgctgccgctgccgccgccgccgtcgctgccgcagccgccgccgcaggagccgccgcctccgccgctgcccggacgggagaggggcggggccgggcccccgcccagcggacagcgacgagccaactggaggggctgcagtgcgcatgcgggagcgcgcctacccctcccccacaaccccccattaatccccaagagaacaaacaccccacgcggcccccccgccctccgcggaaggatctgcgcctcttcccaggccactggtggccaatcccagccctcctcagggaggggccccttccaaagccacagtctgttgcgggaaccaggaatgccaggtccgggaggggccaggccccgaaagatgaaagtcgcgacttgccctgccccgccccaaaggcttcccgggtagtgtgctgggacttgacccgcctccccaggtcaacatgtcacaacacgacctcagcctgtcaagtcacatgacctctgcctgtcactgacaacctggtctgtctttaggccaggggagaccatctggtccaccctccacactacccccattttcagagaggaaatggaggtgtggagcagcggagcagcctaaccaaagacctgtcattgccacaccactccagtcacaaccggccttgtgacagtttctacttaaactctggctgcccccatgagggtatgacaggatatgtaacaggccaccacatggcctctgttttcaaggcacaagaaaaatactttgcattctgggtggtgcgttttacttttggtcaagttgcctccaagttcatggttctcattttaccttcacaacttttatctttaatttacaaacaaggacggtaagatcccttggcaagtgatggggagttgagtctaaaatcgcggctccggtctccccagtccagggcagtcctgcgctgaagtgcactcacacgtcccgggatgagactccgctgtaaatctcgacccgaacacctaggaggcaggcctgtgccgcgctcctcacacagggagtcacaggacttgctgtctggtacagcaagagagggtcttggagaaagccataggagtaccgtgggggaaaataggtggccaaacagaatcgggtccactgggcaaaatacatgacttctggcaggctgagggcttaccaactacaaggtaaaagtcaagggcgctgttctgagagaagcggaaaatgactaccaagggattccagtacctcggccccttttgggagatttacggggctagaacaggagaccacccccgtttttttgtttgtttgttttgttttttgtttttggtgaaacgtagtctcgctctgtcacccaggctggagtgcagtggcgcgatctcggtcactgcaacatccgcctccagggttcaagcgattcttctgcctctgcctccagagtagctgggattacaggcgcgcatcaccacacccggctaatttttgtatttttagtagagacggggtttcaccatgttggtcaggctgatctcgaactcctgacctcaagtgatccgctctcctcagcctcccaaagtgctgggattacaggcgtaagccactgagcccggccaggagacctctttaagaagactcgagatgtcgacaatcccagtggatggataccaactttaaaaagaaaagttcaaaaggcctatgtgcccattagctgggaggggccaagaaatatgggagtcccttatagtgggggtaaaacggcgggtaaagctaggtgggcggaacagcagcttctgggggagacaagcggcaaagaggctcacgaccgactaggggcgaccaaggctgatagccgttggggccgttgggcgccgggagctggcgccccgccctctctcctctcccccaccctccgcacct

SEQ ID NO: 916474 - DNA, 4001 bp, Homo sapiens
gtcccagtacctccccactgctggaaccagctcccactcacttggagatgacaggatcgtagagcagggcgtaccaacgctcctggacctcccgaagggtgaagcggcagctgaatttcacgcccaggtggacggaggtcaggtcgttggtctgcaaggccccagaaggatttgctccagccttggagctgggaacaacccttctttgccacccacagggccctgttgggctaattttggggtgcgaactggaggttgggggaaaggggcacactgagcctatggtgggggcactacctgcaacacagcatttatgagcaggaggtcatctgcaggcttccagcggcccagatccttggtcacctgaagtggctgtttactcttcttcacacgcttggtgagtccaggggctggggctgggctgggtggcacaggagtgctgggggctttggatacctgggcagaggacaggaacaaaccaagctcaaagccagcatccagtcagctggcgcttcatgactagagtttcacatactctgtggcagcggcagccccagccccagcctcagcaccaactccagcccacaacaggaagcacaggaaaggagctcagctttctaatacccacccccatcccaccaagttacttctatatagtccttgaccatacggggtcttctctttgctggcagtatccccgaccccagagtgaaagttgggtggggaggataccgggaaatcactcttgctggtgcagtgtctagggccacagcaatgccacctgggggttatttttacactctgcaatgctgggaacaggctgtctgctcccagaatagatgcatgctccatgcctcccacacggaatgtgatacaggatgcaatggcagggttgggggtgggggctgcagcaagaaatggggagtagggagaggtgtgttcccaggaggggggcatctgagatgagggctggggcagcttggtcctctcaccagcctgctctgcagggctcttggcagctggcaaaggttctggggaaacatgaaatctggcactacctcccatcccctaagtctcccaattcctcaccttcttcttctcactggaggagggttcactccccgaacagcgccctggttccaccccactggccccctttgcccgggtagaagattttgccaggctgctctccaccagctcatcatcgaacttcttcctcttgatgaacctgtaaagggtcctgcccagtgaacactccttaccccaccctggtacccattcacacacccccagcccccaaaagagagcaggtgcccagtagggtgctatctgctccagcctgctttcactttacgccacagcctggttgtggccatggaactgctacactccagccctctgagatgacagggtatcacaccacaaagacttcacgtcagagacctaagatctccctcccctgccctcagtcccacagggaaggatttagcagggacaggaaaagcacaaggctctgccaatactaaggccccagaggggctcaggcagccattcccaacagatggggaggcatgtggcacttaacgccacagaccttctaccctttcccagttcctggccctccgaacccttactacctggaggagcttctccgtttagggatggtgcccaaggcctgggaggaggctcgcttctgccctgccagtgactcctcatcctctgagcggctggcagtgcctgatgccatcagggatgaatctagcagcccctgagaatctagcaagagagaaatggtggattcgggcctcctaagatcctagagcctctgcaaatgggacccctccccagcccccttcccctgccagccctcttggcccctcccctgcctccttgacacttgaggttttaaggtagagttccttggccatccagatcccatctgggctcagacctggcccagaccttccacgctgggcagttcccccggtgccacgtgtcatgtcgtgcagcacatggtgctcaggtcagactggtgatgccgacacgctgggctctgggcataactgctccctctgccatcaaaatgcagccgtgctaaagagcagcagctcaacagcaagtcagtcaactgtggctctgccgacaggtacatgggtggtgctggcccagggggaggtggcaaggcctagccaggaccgaaagacacacgtgccaggcacagagtggaatcagcagatgcttggcgcccgagcatttggggagctgtcccggcctcatactacctttgtccatcctcttacagtcccaaagccactggttccaaaccaccgggctaggaggaacggtcccacaggctcatccaaggattctgaccaggtgagcttaaaggctgagaggagattctgcaaaggagaaatgaggctccctgaggctcagatttccaactggccagcctcacttccttatactggctcaggtcccccagggtcccataagctagggaagacataaggacaggaaagaggcataaggccccactctgccaataatagccttagacatcagtcttgtgaaggtcactggcacctttcagagtatgataacagctatggactgcagaaaagggtgcaaacacatactattttagagggttcatagaccctttaattctactggtatctcctaggttaagcgccttgactataaactagcaagagacaagggattctttggcccacatttttctttacttcagctgtccactcagctcagcagcaccagccttcccctcccaggccaaagcaggaaaaaagaaagggagacaaaactccaaccagtccatctcgttttttttttgtttttcttttccatttggggtttttactgaagatttagtaagtggtatttccatgagataccatctcgtggaaaccaaaaaccactgtttgggaactgcgtgattatcaaccacgctgtgccccaacaacccctagagaacccaggtactggactttctcggggcgctcctctcgtgagtccccacttctaaccagggtggctcttagctcagtgttctagccctgtccccaggtgagcctgtcgctctccgctccataggctacgactaagaatcttgacatctgaggagagggcgaaggggcccgagcttgccggcaaactgaggtagggtctgtgccccttccttaccggaccctccgcccctcgttctcccaagagtgcacacccaaggtaggggatcggtccaggtctgtctcaagaactcggggtaggagcattgatgaagtcacctctgcaactcaaagcagagcaccaagtagccttggtttgagacccacaggctggtggctggggaggtgggggtaaactcgcaagcccattctcaccccacggtctccatgcctttgcgcatgcgtaacacttcgagccagattctaacccggtccggcccacgcatgcgcagcttttcggggcgccactggggcggggccccaaacttggggggtggtcgtccccggcggcactctgcaaaactccatttcatccccaactcctctgagaaccctcagaggcgaaccgcgaggtctcaccattcctagactgccagatccaacaatttctccgcggcgacggtagcagccgcagggccaaagccggcttccgtgaggtacgtctacttccggttaacgaaccagggggctggcaatctcttccggttcgtcttggcaacgtgtgtgaagggggcgtggccatggtacggaaagtgtaaatattttaccaatagcggaaagtaaaggctttcctagttgggacagcatatagggaaacgttaaggattataggcaccggagaggtaacccggcttgaggggttggttaaagggaaaggcgagacttagggcgagaccgagcggggctaattgaggcgacccggggaggggcgggaccgcggactggatttcgacttccaaattcccacgaggt

SEQ ID NO: 916475 - DNA, 4001 bp, Homo sapiens
gactcctcatcctctgagcggctggcagtgcctgatgccatcagggatgaatctagcagcccctgagaatctagcaagagagaaatggtggattcgggcctcctaagatcctagagcctctgcaaatgggacccctccccagcccccttcccctgccagccctcttggcccctcccctgcctccttgacacttgaggttttaaggtagagttccttggccatccagatcccatctgggctcagacctggcccagaccttccacgctgggcagttcccccggtgccacgtgtcatgtcgtgcagcacatggtgctcaggtcagactggtgatgccgacacgctgggctctgggcataactgctccctctgccatcaaaatgcagccgtgctaaagagcagcagctcaacagcaagtcagtcaactgtggctctgccgacaggtacatgggtggtgctggcccagggggaggtggcaaggcctagccaggaccgaaagacacacgtgccaggcacagagtggaatcagcagatgcttggcgcccgagcatttggggagctgtcccggcctcatactacctttgtccatcctcttacagtcccaaagccactggttccaaaccaccgggctaggaggaacggtcccacaggctcatccaaggattctgaccaggtgagcttaaaggctgagaggagattctgcaaaggagaaatgaggctccctgaggctcagatttccaactggccagcctcacttccttatactggctcaggtcccccagggtcccataagctagggaagacataaggacaggaaagaggcataaggccccactctgccaataatagccttagacatcagtcttgtgaaggtcactggcacctttcagagtatgataacagctatggactgcagaaaagggtgcaaacacatactattttagagggttcatagaccctttaattctactggtatctcctaggttaagcgccttgactataaactagcaagagacaagggattctttggcccacatttttctttacttcagctgtccactcagctcagcagcaccagccttcccctcccaggccaaagcaggaaaaaagaaagggagacaaaactccaaccagtccatctcgttttttttttgtttttcttttccatttggggtttttactgaagatttagtaagtggtatttccatgagataccatctcgtggaaaccaaaaaccactgtttgggaactgcgtgattatcaaccacgctgtgccccaacaacccctagagaacccaggtactggactttctcggggcgctcctctcgtgagtccccacttctaaccagggtggctcttagctcagtgttctagccctgtccccaggtgagcctgtcgctctccgctccataggctacgactaagaatcttgacatctgaggagagggcgaaggggcccgagcttgccggcaaactgaggtagggtctgtgccccttccttaccggaccctccgcccctcgttctcccaagagtgcacacccaaggtaggggatcggtccaggtctgtctcaagaactcggggtaggagcattgatgaagtcacctctgcaactcaaagcagagcaccaagtagccttggtttgagacccacaggctggtggctggggaggtgggggtaaactcgcaagcccattctcaccccacggtctccatgcctttgcgcatgcgtaacacttcgagccagattctaacccggtccggcccacgcatgcgcagcttttcggggcgccactggggcggggccccaaacttggggggtggtcgtccccggcggcactctgcaaaactccatttcatccccaactcctctgagaaccctcagaggcgaaccgcgaggtctcaccattcctagactgccagatccaacaatttctccgcggcgacggtagcagccgcagggccaaagccggcttccgtgaggtacgtctacttccggttaacgaaccagggggctggcaatctcttccggttcgtcttggcaacgtgtgtgaagggggcgtggccatggtacggaaagtgtaaatattttaccaatagcggaaagtaaaggctttcctagttgggacagcatatagggaaacgttaaggattataggcaccggagaggtaacccggcttgaggggttggttaaagggaaaggcgagacttagggcgagaccgagcggggctaattgaggcgacccggggaggggcgggaccgcggactggatttcgacttccaaattcccacgaggtataggagtctgagggttgcacaggaccttatgcattgtttgactcctccagagcctttagagaaacttctatcaggcccgcctgctaggcactagtcggggagataatgtagccagggagatgtggcggacagaaagggcagagaggctctctgaggagcggatggaggatcgtgggccgctttactgagaaggaagagaccctgcgagaaggagtagtgtcgacttggtcccgtcagccggaccccacctggacggctggggccacttgtggtcgccgggaggtaagagagaaaaccaatggaagcaccttcagaggagagtgccttggaaggaatcttggggtgggagaacgaacctgtcggaaaaattgggaatttggggctgtgagagatgttccggaaaactagaaagactgttgtctaaaagaggaattctgttttatgcttcctttgcgaggtactaaagtctagcagctatagagagacatacttcagctcagaataagaaagattcagttccaaagctgtccatcagaggtgtcaagaacacataacatggacattgctagggaattcaagtgtcaaatgagagactggcccttttggccctgacggtatactatggccctctgcttcgagagtaccaacctcatttactgttctgtggacttgtttaatgagtatgtacttattttaactcccatgaaagagtgtgtgttttattttttaacaggcacttgattaaatatattatgtaaacttgtgaaaatatcagaaaaccaatgaaattttttttttttgagacagagtcccgctccatagcccaggctggagtgcagtggcacaatctcggctcactgcaacctccggcccccgggtctcggttcaggcaattctcctgcctcagcctcccgagtagctaggattacaggcacgtgccaccatgcccagctaagtttttttttttttttttttgtagagacaggttttcaccatgttggccaggctggtcttgaactcctgatctcatgatcaggctgcctcggcctcccaaagtgctgggattacaggcatgagccacagcacccggcctgaaataatttttataaaaagtgattacacagaacattaataatattaatgttattaaatatatatgaattcatgataactattaaaaacatacaaaggaaaagacagttgaaggaaatgcaccagaatgttaacacatgtccaagtggtagtagtagtaattcttctctctaattattttccagttttttaatacatggtttttaaattttgttttattttttttgagacagagccttcctctgtcacccaggctggagtgcagtggagcgatctcggctcctgcaacctacacctcccgggttcaagcgattctcatgcctcagcctcctgagtagctgggattgcaggtgtgcgccaccatgcctggataatttttgtgtttttagtagagatggggtttcactatgttgaccaggatggtctcaaactcctgacctcaaatgattcacgcacctcagcctcccaaagtgctgggattacaggtgtgagccactgcgcccggccatattttacaatgaaaaaaaaaataggttctacacaacttctttttattgattgattgattttgaggcagagtctcgctctgtcacccaggctggagtacagtggc

SEQ ID NO: 916476 - DNA, 4001 bp, Homo sapiens
gacgaaccccaaattacaaagtttttcagagcttatataccttctaagctatatgtctacgtgtaagtgtgcattcatctaaggatataagtgattaacttcttttaatctataactaaggtctgagtcctgaagaccttcttctggagcatcagtaaatttacttaatctaaatgggtctaggtgctgggctgattacccttatcttgtctcctgctgaatcatggaggtttgaggagttccttcagaccgccaataaatttgtggaggcctggggagtttcttcagacccccagtaaaacttgtttaatcctaaacggatcctgttaagaattccttattttgtcatgctttatggcccaggaaaggcctaggcaatactcttgatgggcttttgtgacatcccagcctttgtgtaagggcactggctttttttagctttcaatatttaacttaaccgctcagtcagtaccgaaacagttgtgatggaggcctccattagtgaaacctggcctgccacactagctgctgggaatagtcctggctcatagtaaaccttcaataaatacttgattaataaatgaataaatcaaccaggccaactgaacttttaatatatcatttggtaaacttagcccaaggtttacttagcccaagttataacggcttggcccaagttataaacttagcccaggttagaatggctattagcctgctcaacttacctaattgatctgatctaagtccagcccatgggtactttcgccccacggaggaattacaagactcggacaaataagactttttccacaggaagttcctctggtattcactcagcccctgtaatgcaaagtacacttttgagtacagtccaattaatgaatgatgttttaaagcagacatcggtgaaaaataatttctgaacctcccaaaagagacttaagactgaaaattaaacacagacgagctccttaataagagctaatattcacccagccctgtgctaagcagttcacacgtgttatatcctttaatccacaacaccacttgaggcagatgctaccaggaattccaggctcagaggttaccctttcactgattatctgattccaaagcatgagttcttgtcggataactaatgacaatctaaattctcatcattctagatttatcgcaggttttcaccgagtacacaatattatgtaccatgcctaggaccttttgctatttgataaagtcaacaaaaggcaaactccccttccattctgaatacacgcctttaagataaatgagtcaggagatgtgggacgctgtggccacctgtgaagttgcagggtgctagtccctgacagctaccagctacctggaacttttaacatacgctaagaatgcacaacgatgaaaaacgtgtatttctttatacgctgtctttactaagaacccatttctcaagcctttaaaagccacatacactaaagttttaaaggtaatgggggttaaatgctaagctaaatgggccacaggtgtcccaatctgaagtcgcctttagttctcttcgcaaagggacctcctcccatctccactcctcttgagtccccctaagtaaatgtgtctcgcaccatctgactcttcgacacactgcagcttgcaaatgtgagtgagcggagagggaactaggttaagaggcggcgggcagattctggggcccctcgagcaggccctggggctggcagcttccgccgggcagagggctgcagcgcagaaaagcagcgtgacctcggcgctccacacctccccggccatggctccccccagccacattccggcccggggaccccagcctcaccttgaagcgcaccggcatgtcgcccggcgccggagcccccgctactccgacagttaactggagaaaaagctccgagggggcggggcgataacagtgttccctagcaaagcctcggcccggcgtccccgactacgcgccggcgcactccgcgcttcccgcctagaggcctgtcggtctgtttttccccgccctttttggagcctagggaccaatagagactcgcagagtgccttacctccattaggatttgaccaatgagtggccgaaagggagccgcctacctcccttgccaaatccctggggctgatagagatggcgggcggaaggccggccaataaggctcccggaaccgggctgggcgggaccccgggggtgccttcctgggttgggtggaccggtccctggttcgccgggtcctgcgcagcaatgcgtctgcttgctggtggaattcgccagccgccagcctcgctggcccaggtgcttgacagcatcaaaggtcaaagtgtgttcttcatgctaacatctatgagaaaaccgaacgcttctttttctgaaagtgctcagatttattctgctgaatatcggttcgtacaaacgacagccgcattacagtttattgtcacatcaaaagggaaaggccaaaaaaatatataacttaggcaagatttttgaaactttattgaaactcgaaagacaaactgctgtctcttcctccagtgatgttcttcctccttcaatctctaccttccccaaaatgatgtacatacagcccttagatgagaaaacgtttattgaagatggttgtctcaacttccaaaccttcagccttgtctctccgctcaacctttttttaaaaataaaacttcatctgattttaatcgactattgccatcatcgtcgataaatgtttcttgacagaatactgctgattctgagaattgggaaagaaagaaattgtccagatagttctctgatatacttgggaaggacatacatctttatttatttatttattcattatttattcaataatggtgtaatgtgacatgtgctaaatttctaaatgaaaggtgtcaataataagggctacaggatctgggagcagggagtcatttcggacggcagaagatgcgtcaggaggaaatattcagactgaaaggactgcaataagtaaaaagtgggacgatgaaagggcagatgtctgaatggaatgctgccaggcttcttccaggaacaacaaatgagtgccttttacatttgtcatgtgttgactgaataaaagtataccactcttaaactttcaaatatcaacaccaatccttgatgcttccctttaagcattttccgcaaaagctgtcttcctgaatcctgattgatgtctttgttcttcatcatcatcgagatacttaaaaatcatttgaagaagccacctgatatctggaacaaagagcatattaaattagtcccaatgcagccatgcatccagggggcccttgattaatgttaattggtgatgacagcatctctgtcgtgtaaattaagaatggcacaaacaagacacagtggaacatagaacaaaagtcatctgcaggaaggcagcccatcttacagagtaagaaaggcacaactttggttgtgcacacagctttgttaccacaaaatgctaaggtgagatcagcaaaagcaagtgtgtagaatgtagcctgcctgctaaacaagcgcaatgatcactgcagaagagctctgctgagcagggagtaaatgacaggaaaaccaaacagcagattgtaaaaataactcagtcacatcccaggcttgctagagaagtatcataaagacttaaggaagaagattttactttgctattgttaaacaaaagcctacccaagtttaagaggcaaagatataggaatgggaaaaaaaaaagtgactaccttagtaaatgagttttgtagcctgtgttttaccagctcttatcttctctgctactgcaggaaacagtacccagtaccctacaaagctccacccatgttttggggagtccctaggaggtatttcacatgtgctcgcagcaaccacatagcgtatgccgggcagcactgccccttgttccaatagccatgcatctgtaggtgtcactcttgctgctggctat

SEQ ID NO: 916477 - DNA, 4001 bp, Homo sapiens
ggcgcatgcctgtaatcccagctactccagaggctgaggcaagagaatcgcttgaacccgtgaggcagaggttgcaatgagacaagatctcgccattgcactccagcctgggcaacaggagtgaaactctgtctcaaaaaaaacaaaaacaaaaacaaaaaggaaaggtgcccagcctcaccaagaaactagagaaaaatgaatttaaacaatggtacagtaccttttatcaaaaaaatagtaataataataaaagaggccaggcgcagtgactcacgcctgtaatcccagcactttgggaggccgaggcgggcggatcaccaggtcaggggatcaagatcatcctggctaacatggtgaaaccccgtctctactaaaaatacaaaaaattagccgggcgtggtggtgggcgcctgtagtcccagctactcgggaggctgaggcaggggaatggcgtgaacccggggaacggagattgcagtgagccgagattgtgccactgcactccagcctgggagacagagcaagactccgcctcaaaaaaaataataataataataattaaagattggtgatattcagtattggcaggagtgaaactgttagagccttttggtgagcaagttaccagtagcaatcaaatagtaaaattgagaactcaggagttctaattctctaaaatctttttcttttcttttttttttttttagacggagtttcgctcttatcgcccaggctggagtgaaatggcgcaatcttggctcaccgcaacctctgcctcctgggttcaagcgattctcctgccccagcctcctcagcaggggattataggcgcgcgccaccatgcccgactaatttttgtatttttagtagagacaggttttcaccatgttggccaggctagtcttgaactcctcatctcaggtgatcggtccgccttggcctcccaaagtgatgggattacaggggtgagccaccgaggccagcctataattctataaaatctttcttacagaaatagtcacacgggatgcatgtacaaagcggcactatctgtaatactcaaaaacaggaggcaatttttaaaaacctatcagtaaaggcataaataatttttaaaatggtatactcatgctgtggaatactatgcagccattaaaaagaattctgtagactttatttattgacaaggatgcaagtcacagaacaactacagtttcatcttgttagtacaacaaacaggacaataacatagatttaaattcaaatgtaaatatatgtgggtacgcacacaaaaaatctaaaaggaaacatggagcaaaaagcctggaattttcaggttttactttaaaatttctctaatgacaaaaatctttaaaacaagcacgaataacttttttgacttttagaaaccatttttaaaaattaaatactgggaggtcaaaaaggaaaaaaaaatcagtcacgtaacaaacgtaacttcaaccacgcttaacaatgtaatggaactaatttttaaagcaaatgtggcaaatggctaaaaaaatactgaccagttcttaacagtttttaactccacgcagttacgccagaggtagcacactttaagctatgcacatacaattttatttacagagccatgctacaattgaggtatacgaaatttagtttatcacttcataaaataaattattcttaaaagttacacgagacaaaaatactaaccagggtctcttgttccgaagctggaatctgtgaggtggttacagcaccatcagtaggtacagacatgttggtattgcacatttgcctacaaggaaaaaaaagacacgatgaaaactggaaatcatgaaacatctgtggaaaatacatcatatataaagaacataaacaacagttaaaactaaagctacaagcaagtcggtgcttacctggatcagcagagaaaaagtggcgtgcgtccgtgcccacaggtctaccctccaatcgccactgaacacagctgggaaaatgcatggtttaaatagccccagctggagacaagtcaggacttaactccttttactgcagtttcggaacgtgtctgaacttgaccagctcaagaggaaaagctgagtcaacctgcccactgaaccggcccaatcccgcccagactacgcgcagcgttcacactagtgacccgacaggcacctgcgatcatccggacctcccgcgccgaagcggccccgcagcccccggcccccgtgacctttaccctgaactcccgcggagacctccgaaccacccccacccccaccgccgcgagagccgtccgaaatcccgccctcctccctggcggcgactgcctagccccagtccaacaaaacctccgcaaagccacgtgccccatgccccgcgccccgcgccccgagcccccagccacgaaccgcacaaaggctgcgaacgggcagaggctgggaaccagcgatagaggggacaccgtcagagcccagacccaaaagtgaccgctcgctgccgggccagtacctgctcctcaccatccggggttttcgcgcttggagtcgggggtccctcaagactccccagtttccttcacggggcgcgcggaagcacgacgccctgggcctcggggatcattccactctccgggccagggcactgggcgctcgtacgcactaatccggggagggacggtgctcctggctgcgaaagcagcaggatctcggtcagaggggtcgcggccgcccctcgggctcggcttcttgctccatctttccgacacacagggccacacaggccccagaagcagccaagctcgccgcggtgcctcggtgcgcgccccctaccgcccgaggggagcgcgcgggtcgtcgcggcgcatccgggcatttgtgcgcgcgcacacaaccggccccgcttccgccaattgggtccggggctcggccgcaccacctccgggatgatggagtggggggtgtcgccccgcgggcgcggcgggctgtgaggcggggtgggggtgttggccgcgagctgagagggtggggctcggcctggcgcggagccagcaaggtttggcgctgtgacactcctttagccgttgcgctatgtttgtatttcttgtgtttacacttcccgcccgcggtggaaactgcgacaaatgcggatctccgtgtcgctgttaccaaaaagaaaccaaaattaacagctgtttaatatattaagcccactccaccagccgctggagttgtacccaaatgagttattttaaggcctgtttttaaaaaagattaaaaatagcacttaaggcaggcttatacaccggtgcatacagctgttctggttggagaacgaagatgctggttaccgttggcggggaggggagcggttactctgcgcttttagaatgtttgggtttggctgggcgcggtggctcacgcttgtaatcccatcactttgggtaggccgaggcgggtggatcacttgaggtcaggagttcaagaccaacctggccaacatgggaaacgccgtctctactaaaaactacaaaaattagtcgggcgtggtggcggtcacctgtaatcccagctactctactccggaggctgaggcaggacaatcctgtgaacccgggaggcagaggctgcagtgagccaagatcatgccattgcactccagcctgggcgacagggcaagactctcaaaaaaacaaaaacaaagtttgggtttgttaatctacacattcattatcattaaaatatatacttatatattatgcactcattctgactcacctactttcccacagagatgtggcaaaaacgtttttgatgcggtctcataaattgaggacataaagaattgagttagctaaacccaaaaacacagccattgcaaagaaggaacacgtttcttctctggccagtaagtgattagctccttgtgaacaaggacctttttttataaagttatatccttcccttctgcagcttttttttttttat

SEQ ID NO: 916478 - DNA, 4001 bp, Homo sapiens
gcccgactaatttttgtatttttagtagagacaggttttcaccatgttggccaggctagtcttgaactcctcatctcaggtgatcggtccgccttggcctcccaaagtgatgggattacaggggtgagccaccgaggccagcctataattctataaaatctttcttacagaaatagtcacacgggatgcatgtacaaagcggcactatctgtaatactcaaaaacaggaggcaatttttaaaaacctatcagtaaaggcataaataatttttaaaatggtatactcatgctgtggaatactatgcagccattaaaaagaattctgtagactttatttattgacaaggatgcaagtcacagaacaactacagtttcatcttgttagtacaacaaacaggacaataacatagatttaaattcaaatgtaaatatatgtgggtacgcacacaaaaaatctaaaaggaaacatggagcaaaaagcctggaattttcaggttttactttaaaatttctctaatgacaaaaatctttaaaacaagcacgaataacttttttgacttttagaaaccatttttaaaaattaaatactgggaggtcaaaaaggaaaaaaaaatcagtcacgtaacaaacgtaacttcaaccacgcttaacaatgtaatggaactaatttttaaagcaaatgtggcaaatggctaaaaaaatactgaccagttcttaacagtttttaactccacgcagttacgccagaggtagcacactttaagctatgcacatacaattttatttacagagccatgctacaattgaggtatacgaaatttagtttatcacttcataaaataaattattcttaaaagttacacgagacaaaaatactaaccagggtctcttgttccgaagctggaatctgtgaggtggttacagcaccatcagtaggtacagacatgttggtattgcacatttgcctacaaggaaaaaaaagacacgatgaaaactggaaatcatgaaacatctgtggaaaatacatcatatataaagaacataaacaacagttaaaactaaagctacaagcaagtcggtgcttacctggatcagcagagaaaaagtggcgtgcgtccgtgcccacaggtctaccctccaatcgccactgaacacagctgggaaaatgcatggtttaaatagccccagctggagacaagtcaggacttaactccttttactgcagtttcggaacgtgtctgaacttgaccagctcaagaggaaaagctgagtcaacctgcccactgaaccggcccaatcccgcccagactacgcgcagcgttcacactagtgacccgacaggcacctgcgatcatccggacctcccgcgccgaagcggccccgcagcccccggcccccgtgacctttaccctgaactcccgcggagacctccgaaccacccccacccccaccgccgcgagagccgtccgaaatcccgccctcctccctggcggcgactgcctagccccagtccaacaaaacctccgcaaagccacgtgccccatgccccgcgccccgcgccccgagcccccagccacgaaccgcacaaaggctgcgaacgggcagaggctgggaaccagcgatagaggggacaccgtcagagcccagacccaaaagtgaccgctcgctgccgggccagtacctgctcctcaccatccggggttttcgcgcttggagtcgggggtccctcaagactccccagtttccttcacggggcgcgcggaagcacgacgccctgggcctcggggatcattccactctccgggccagggcactgggcgctcgtacgcactaatccggggagggacggtgctcctggctgcgaaagcagcaggatctcggtcagaggggtcgcggccgcccctcgggctcggcttcttgctccatctttccgacacacagggccacacaggccccagaagcagccaagctcgccgcggtgcctcggtgcgcgccccctaccgcccgaggggagcgcgcgggtcgtcgcggcgcatccgggcatttgtgcgcgcgcacacaaccggccccgcttccgccaattgggtccggggctcggccgcaccacctccgggatgatggagtggggggtgtcgccccgcgggcgcggcgggctgtgaggcggggtgggggtgttggccgcgagctgagagggtggggctcggcctggcgcggagccagcaaggtttggcgctgtgacactcctttagccgttgcgctatgtttgtatttcttgtgtttacacttcccgcccgcggtggaaactgcgacaaatgcggatctccgtgtcgctgttaccaaaaagaaaccaaaattaacagctgtttaatatattaagcccactccaccagccgctggagttgtacccaaatgagttattttaaggcctgtttttaaaaaagattaaaaatagcacttaaggcaggcttatacaccggtgcatacagctgttctggttggagaacgaagatgctggttaccgttggcggggaggggagcggttactctgcgcttttagaatgtttgggtttggctgggcgcggtggctcacgcttgtaatcccatcactttgggtaggccgaggcgggtggatcacttgaggtcaggagttcaagaccaacctggccaacatgggaaacgccgtctctactaaaaactacaaaaattagtcgggcgtggtggcggtcacctgtaatcccagctactctactccggaggctgaggcaggacaatcctgtgaacccgggaggcagaggctgcagtgagccaagatcatgccattgcactccagcctgggcgacagggcaagactctcaaaaaaacaaaaacaaagtttgggtttgttaatctacacattcattatcattaaaatatatacttatatattatgcactcattctgactcacctactttcccacagagatgtggcaaaaacgtttttgatgcggtctcataaattgaggacataaagaattgagttagctaaacccaaaaacacagccattgcaaagaaggaacacgtttcttctctggccagtaagtgattagctccttgtgaacaaggacctttttttataaagttatatccttcccttctgcagcttttttttttttataaagttatatccttcccttctcccgcttcccagcctaccagaaaggaaacttccttaaacatagtggtcactcagttgatttaagttgattgccaatattattaacttaagagatttaatatgtggcttttaaaaagataatctcatcttcatcagatcatatacagtggggtttctaatagactcagtgcttgaccctggatgaaagaaaatctcaagcagtgagaaaatgtaagcatgaaaagataagtgataggctgcgcacggtggctcacgcttgtaatcccagcactttgggaggctgaggtgggtggatcacgaggttaggagttcgagaccagcctggccaagatggtgaaaccttgtctctactaaaaatacaaaaattagccgggccccgtggcgggcgcctgtaatcctagccacttgggaggctgaggcagaagaatcgcttgatctcgggaggcagaggttgcagtgagcggagatcgcgccactgcagtccagcctgggtgacagagcaagactccatctcagaagaaaaaaaaaaaaaaagagataagtgatagaggttgatatttgttaaatatcaagtgaacgaatgggtttgtgctataaaagttcagagacagaattaattgcttagtaaatgctggaggcagttcacaaaggcctcagagatcacacatattttgtgtcttgaaagatggtgagacttaaataaaagcagagaatattccaggcacaagaaaattatcaaaaaatacagaaaggaaaatataagaggactgtttgagatacaataaataaatccgtttgacttgcatgaaagtcaagaagaagtt

SEQ ID NO: 916479 - DNA, 4001 bp, Homo sapiens
ccattttaaataccccttgatcaatatgtttgctaatctatggaagtccctgaacctgactgatactaaatgataagactgaggagggaaaaagttgaggcaaaagggggttttactcccacataccaaaaaatcaagggaaaattatcacaatactaagagaaagaattccaacttataaatgaattttaagattaaatatctggattaaaatatttcatttaaaaaaatttacctgattttactagagtgggagcaatgatactatgtctttgtaggtaaaaatcacgtgttgattttttggtctgcattgtaacacatttaataaagtaacactttcatttgaaaagttggcgagaatttgcatttctccattagtctcatagcaaaaaggcatctatgccacccataattaaatgtaactaattacaatttgaacactaaattatttatccagtgtaaacaaggattaagagggaaataatgcttctatctacagcgggggttacagaaaataatttccaaaatgcatgctctccaaaagggactcacctcccccccaaaaaaaacagggtacacaacttaaaacaagttgggtgtttttaaggctaaattaaataaaccgttcagccaattttccaattatattctacgcttgaaacgtaattgccttacatctgtttacaaatctttgctcaatatttaaacaaattcgtactctcctgggcacatagctatacatacagtaactcatgcacaaagcacatatttaaagaccacgcactgcaattattagcctaaacgccaggtttaacaacgtgaatgttttcagaggtaggtaatacgacccaataaaaagcaaagatggcatttaccaccaaatgtcactgacaccgccaggaaaagagttgctggagccctatacatttttaatttcgatgaatctagacaccgtcggcgggtgccaggcttccacgagaacaattgacaccctaactgcttcaagattaaggcaggcgattcaaatccgaaggaaaagttgtcaattatcagaaagagagagcgcgagagaggcgaaggcagataaaagcgatgttatcaaaccgaccagcttgttgcttttgtgtgtgtgtgtgtgtgtgtgtgtgtgtgtgtgtgtgtgtgtgcggattcgttgttaggatagagaaaaacagtttttaaaagacacaggaggagagaaagaagaaaaagctttctccaccttccgtcggctcggtgcaatggctttacggctctccagcatagtaagccccgagaggcaggcggctgtcgatgtttacaatcgcgggagcttcgggtgcaagagtcctttcctgacacaatcgcattcaatcaactattttagggcgaaattgcaggtgtcattatggaatttaaaaaaattcaaaaggcaggcgggcgggcaggcagctgatccaacaacgggggaagaggttgccgatcggaggcgcggcagcacaaggcaaagccttccacatttacggggggaaaaaaaggggggaaaggggaggagaaggggagtgcgattgcaacagagggtgggcgttcgaagtgcgacccagaatccgcagctccgagacttccacatgcaaattccacgccgagcgccgcgctcacaaatgatttttaaagagccaaataaacactggatgggatccaaggcgagagagagacgatccaaaagggggagaatcggcgagaggcgaacggcggggagacgcgagggaggggcgaagtcccggcggcgggaggagaaagttggtcggcggcggaggtcggggacccccccccttccccggcacagccccctccccgcagcccggctactcaccagcgaaaagaggttggagtgacaatcctccaggctcgccccgttcgccacccagttcgctgccgcagtcatgatcctccgcgagcccggccgccagagcggggcatgtcggagcgaggcgtccgaggcgaggccgggccgggcggcggcgcctcgccggggagcgcggggcggccgggccgccgccgccgccgggggagggcgcgagggccggcgggcaggcgggaggcgccgcggcgacgccgcgccgggggcagcgggcccgggctggcggggggggcgcgcgccccgggccggcgctgcgggccggccaccgcctccgccttccctgctcctcagccgccgccgccgccgctgctgccgctgccgccgccttgtttatctccagccaccgactccccctcggcccccgccggcgcgcgaggggaggcgagccccggagccgccgccgccgcctcggagccgccgccgccgcggagcgcgaactcgcgaaggggggggtgcggacgaagccagcgggcgaccccggcagccgagcgacgtcccctccttcctcttcctcccccacccccccctcctccccagtcagcctcgcttctcctccctccccgggctcgcttgctctgacagcaatggcggccgccgaccgcggctcggcccgccattggctggcgcttggtcacgtgacgggcgccggccgcgcggggggagcgaggggcgggcgggggaggggtccggagtggcggcggcggcggcggctcgcgggaggcgctgctgagctgagcgcggccgggtcctccggccgggaagagggagggagggaggcagagagggagagaaagaagtgcgggcggccgggctccccggcgggcggcggactgccggcccgtggctgccgtgggctgcccctcgtggccgccccgccccctcgcggtgcactgatcgtggcggggcgggaccgtgggtcccgggcgcgcccgtggtggccgcggaggagggcgcgggacccccggcctgtgccctcgcagcccaggccggctggcgtggcgcggcggccgcgatgtgggccaggcagcgggtccgagtgccctggggaatgtgtcctcagaggctcgcgccgccgtccgccttttgcagaggagaaaactaaagcacaaagggattaaatcacttgcccgaggtcgcacacttgggaagaggagtccagattcgaacccgcgcacagtgaagccaagctcttggacaaggtttcacaggcttcgcccagggatattcacggctgccatagacggagcgcttactgtgttccagacactgtgcgtttaatacagaaatgtttattgagcccttactcctagttactgtgtgcactcattcattcattcattcattcattacataaatgtttcctgagctcctgctgtgtgccagaatctgttataacttccaggcactgtgctaaggccgtgttgggagcagacccttcttcctggcgtcattcattggataaccaacatttcctgagtgtatatggcctgggagtccggaggagtgctgctatgaagagaagctctcccagtcctcaagaaatggatccccgaaaagggggaggagaaaacaatgtcttcactaatacgcctccaaacatggaacaatcagctgtttcaggtagattaagctaaaagaggaagagtggatggctggcacagtggctcacgccggtaatcctagccgaggtttaagaccagcctgagcaatgtagcaagaacccccgtcatgacaaaaaaaataaaatacaaaaatacaaaaattagccaggcgtagtgtggcatgtgcctgtagccctagctactcgaaaggctgaggtgggaggataacttgagccctggaggcagaggctgcagtgagcccagtgagccgaggtcgcatcaccgtactccagcctgagtgacagagagaggccctgtctcaaaaaaaaaaaaaaaaaaaaaaaggaagagtagaaagcagggaagagatgagagtgtataataagagaagtcttaagacacgtgaactgagttttggaactaccacaaatactgctaaagcaaaactcatgagcaacatgttataatgtgtattatca

SEQ ID NO: 916480 - DNA, 4001 bp, Homo sapiens
agtagttccctgaggaaggctggctggcagcccaggcaagtccctgcagggtagaatttatcttggtgaattcaacacttagaggctggtcctctcagcttaaaaactagtgttattcacccagggtagatcagttttatcacaagtagattcacactcttcaagtgtacaaattctgatgtattaagaaaaatgccaagttattagcttacagtgaggaaaaaaaaaactggcaaggaaaccaggtacttaggttttcctatcagcatgttttctctctagccccttatctaggacattaaatcacaatcagacaatgagaaacataactatcaatggaaaactatttagcagaaaacaatctaactcgtaatggtaataagtacacccattgccgcatgggaatacccactgacgtcttggtcaacgggatgcacatattatgtcagtcccctatggttataataaagctgaaaaattcttattgcctagtgacatcgtagcagtactaacgctgtagcgcaatgcgttccttagtgcttgtggtgatgctgctgtaaatcaacctaccacactgccagtgtatgaaagcatagcacatacaattatgtgcagtccatgacacttgataatgatactaaatgactttgttactggtttatgtattactgttttatcgttattttacattgtacttctacttattaaaacaaaaaaaaaagttatcgccaaaaccatgcatttctcagaacatgaccccttcattaggggcccatgactgcgcatcctctggctttgcttctactttccactcaggcatagtgtggaggaaaaataaccagaaggaacaaagctggggagctacttactagacttggcctttaatagagagtagaatttgggggagacattaaaaaggacttgtaggccgggcacggtggctcacacctgtaatcccagcactatgggaggccgaggcgggaggatcgcttgaggccgggagtttgagaccagcctggacaacatggtgaaaccccgtctctactaaaaatacaaacattagccgggcgtggtggagggcgcctgtaatcccagctactttggctcagacaggagaatcgcttgaacccgggaggcggaggatgcagtgagcagagatcgcgccactgcactccagcctgggcgaaaggcactgtctccaaagtaaaaaaaaaaaaaaaaagaaaagaaaaaagactcaaataagcggaaagacatacgaggattagaagatttcctatcataaagatgtccccaaactgatgtattctgagggatggccaagaggcaagagatggaaggatactctgggcccaaaggaacgagctaagatgaaagaaaatctctcacctcacctcagcatcgctcccgcaccaacctgaaagcgctggtgaaggaatactctcggctgacatttcattacaaaaacccagtcatccagagcatgagatctcccttggtggattaaaattgatgaggaaagaaaaaagctcctgcttctcctcccaacccccaaaagaaagagaacccgtaagcaccactgacaagaaaataaaactgtcctcagggaacacgacaggaccgcgcagcccacaagtcctggcggcctcacccggacaagaacgatcttcccggtctcctcaagcgaaagagtctgctccctcccgcaccttcaagcaccgcccggcagccggcctcaaacctccgagttcgcggtggcgcctcccgagagagcgctttatgccgaagccctgtctctcagtccgctccccactttcaagttttgcctcttgggcccctttcctcccttgctttacctcaagaaagagaaagacagaggctaatcgaatgaaattcctcaccgaattcacagcgtcctgaagctgcgtgagccgatccgccatgttcctaccgcagcaaacagacgccaaaacagctgctcttccgcgactgggcagctctggcacgcgtcatggccaatcacagggctgcgtccttggaacgggtggggtcggagagaactccccgccccgtcaggagtgggtggtactcccgaggcggcctttctagagcgggctacacctgaggagaggctggatcttttgagtaactgggggaatggtctggggtccaatcgctttgaaatacagtccaagagccgaaatactccccttggggttgttaggtgttaaaggcttcagagattgttggattctgcggggattttttttttttaagtaatttctcgtaccctctcgtgtttatttattgaccaaattgaagagtaaatatatttatttttatttatttatttatttatttatttatttatttgagacggagtctcgttctgtcgcccaggctggagtgcagtggtgcgatctcggctcactgccagctccgcctcccgggttcacgccattctcctgcctcagcctccggagtagctgggactacaggcgtccgcaccacgcccggcattttttttttttttttgtacttttagtagagacggggtttcaccatgttagccaggatggtctcgatctcccgacctcgtgctccgcccgcctcggcctctcaaagtgctgggattacaggcgtgagccaccgtgctcggccaagaaaaattagctgcacaatttagatttagagttgggacttattgagagtttaagtgtgaaaagtgataatcgaaacttggtatttaaggaaatttagcctgaggatagtctggtaagaaatgagtttggaatcggcaaataacaggtttgtagacttcaaaaaactctcatatcctctttctcaggctgattatccgtgattaccttcctgtggctgcggggaaggtggaagacacagtccctggggaactcagcttgttggatttatcccaacacttactgtgaagcaccacttctgcttcacaccaatgccccaccctcagccccaaacagtctacagacttactggagcctcattaagaacgtggatgaggcatgttccccataatgggactaatgagaaatcactctgtaatttgttttcactgtaacttggggggattctacaaccttctcctcccaccctcacttgagagtgtaccttacggaatggctgccacatgccaggaagtatatccagtgctcaatttgcaaagatgaataagccaaggactcactaaggaaggttttgcagttgtccaagattaagatgagctgggcctagaatagggtgttgaccctgataagcggggaaagaaagactaaaatatatttttgagaaaaaaaattaatatggattggtgactgattggatatagtttagtccactccataagaatactaagttttgcagcctgattgaagggaacttgggcagttgaagtagagaagccacttcaagacattcatattgtgacacagtttttgtcctgccattatcttcctaataggtcttctgtgcctccacagagacctcaggttgatgtccaactatctctgcctggttttcaagatttactataatctggctccagcaaacagacccagcctcacctcctgataattttctgagtgaaataatctgtttcagccaaggtccctgaccccttggttttcctggttcttcagcctctttcggccacggatctttttaagaatcagataaaagctgtggaccctttccccagaccagactctcaacttagcctacatttgaaaaggggtttaggaagctcttgaagctgtagacttcaagaataacccacctgccaaatatagtctgtgcatctagctcaggatttctcaatggctgcactcttgacttttcaggctagattattctttgctgtgggatgctgacctgtgcactgtaggatgtttagagcatccctgtcccttacccctgagatgccggtagcatccccccaatccatttatgccaacataaagtatctccag

SEQ ID NO: 916481 - DNA, 4001 bp, Homo sapiens
tcaaatctaatacagacactttcccactagaatatgctctaatgatcttggaaaacttacaaatcctttcctcaggaaacaaaaacagaaacattattgtgaacataacagaattcgtttaatgacagaaaaatcttccatacctacacagtattgtccattcattaatttactcaacaaaatatccattacacacactagcagctaaaagataaacagcgtgaactggtctctatcctcaagtagtttaacttgtaatagtggtcagcaattagacttaacaaatacttaaacaccagataggtaataaatgctgaaggccttaggaaaaagattcatgtgcaacaccccggggcagcctggtttcatgaataaggatatcacgatgggctgggtaaagtcaaaataaataggcaaagacagtccattactaaaaaactaaaacgctcaaatatctaagcacaagaccaggcccctgctctggaagtgattataacctacctataagagcaatatgttacatgcattaatagtatcaggtagcacgaaatgaagtgacattctggctactggagagaattcatattaagaaatacaactgttaaaaatacattaggatcagtcagcttaacaccttacaagacaaacagcagtgtttgaatttcactcgaaatccaggaacagccaccagagtaacaaattttgctctggaagagttccagcaacgctacaactctccttccattcctatctaatcaaaatttcagaaagatgaagattagctctcttcgacctctctcaattccatcttaatcgcttctgacttctccattttctgtttctctggcgattttaattagaaacaagtaaaaataatttttattaaggtgaaggagcttgtgcagcaaaaacacagacttctcaaaatatgtaagttcctagttcataatatccaactgtaaactctcagcagttctccttgccttaccagtggatttagaggttaagacctcagaagttccattctgagccacagaatatcctatctgcactgcctgcaattggtatcataattcaggtctaaaggccctaaagcttggcgatgctatgggattaggcaggtgaaaattcgttatcaccaccacaaattctgcaattaatgacatgagcgcgcgggcaaacacacatgtacacacaccccaaaagtgcaggctgcaacaaccccaacgtgaaacgggatagtgggaggaggtgtgctctccattacatttgcccacccccaaagaaaataagtcctagcttgctccagcaaaccagcaaagacgcggcaatacggatcagaatcggatttttgaggcggcggccaaatcgcgcgaaagatggtagggctgtgctctgcgcacaatctcaagaccgtgccacgatgtgcgtgggagctgagttctggtaatacaggggctcgggcccagcgaccccagaggtaccacacgccaacctcaggcactcttttctcccccaccagccctctagtcccacaggaggagatgacgcctcttctcagactaggaatctatagcccggctttgccaccctgtcaggcccaagaatcagtctagtcggggctctggggccccggtcccggccccctcaacgggcctgagccaaacagttcagccgttcccggaggggactgggaaaacataaaactctctttacctgcagaaggccctttgctcttcttcttctttcgtctttttttcttggctgcttcctcagccgtagaggcagctccttcttccctgtcgtctggatccaggtcgccattcaggtggctcccggaggccgctacctcctccacacccgccatgttgcccgagagagcgcgagggaatgagacagagcggcgagggccccgatccttctccacccgcctacaccagccacgccggaagctgctctcgatggtagggacgcagggaatgctgggacggcggaggactcagctgagggtgtcgggctagcttcgggccgggcgtgcaggagtctcggcttggagccccgcctggctggagtcgactggggccagacccgactgcttcgtccggtgcctcgggcattcccgaagcaaatcggcaagcgcagggtgaagtttaaaggggaagttgagctctagagtcagccggagatacctgtggagacgggcaacccgccgtagcaagcggcgtctctgctggaacggaaatattttatatttgcgtttttataaatcacacaggcagtggggaaacgggctaagaaatgtgttcacttgtacacatttctattgtcatgactccacatatctcttaaatctaagagatttaatcaaatctgcgttgacattcacaatcacagctctccgcgaggctctgtaggcactggagagaattttggaagctggagttccgtgttagtttattgtactactcaaccccggacggttcaagatgggaacccgtcacactccgctcactttccaattcaggacaagaatgacaggttttaacacacggggacacggtctctctcattaatgcaaaagatcacactccgttttctctatttctggtcacctttcttttggatttaggacgtttcaccagaaactaattgaattttgcccatttctttacttcttatgttttgagcctcatgttcaaaccgcagtttgagatttagtttgtggcgtaagtggattgtgattggctgcctgcaccaactccttctcaatttctcctgaatatggctttgtccacctggagagtttaggtgttttcattagttttaaactaggcaccaagcttcatgggcatcaaaatgtcgttaagagccttattgccagtgagtttacagtaaacctcacacaggctctgactgcagctgcataaatgtacattctctgtcttaaagcttcaggcagcacctatccaatagtaataaaaactgttcctcttattcttgtacagatctttatctctttaaatctatccctatttagattttaaattgttttccctagttgattgctggcaatataaaagttggtaaaccggccgggcgctgtggctcacgcctgtaatcccagcactttgggagggcgaggtgggcagatcacaaggtcaggagttcgagaccagcctggccaatatggtgaaaccccgtctccactaaaaatacaaaaattagccgggcgtggtggcaggcgcctgtagtcccagctactagggaggctgaggcaggacaatcgcttgaaccccgggggaggttgcagtgagctgagattgcgccactgcactccagcctgggcgacagagcgagactccatcccccccaaaaaagtaaataaaataaaaaataaaaagttggtaaaccaaacataataccacaaaaataaaaatagaagtagcttccatgtgtccaaaatcctttaaaatgcccggcaagacccagccatatctacttctccaatgtctccactctcttactattatagctccagctctcaaagctctttctgaccttggagcatttcaaactcactgttacttttatctgggctgctctttgcttggctgacatattcacttattcactcatccatccattcgttcaatgcctactataaacctagatctggcaatatttagagagcaaaaacagagatgatccttgtcatcatagagccagttaacaaaaatagacatcaagcaatgatgctaataaaagcaaatttacaactgctgctatgagagcatattacaaagggacttgcctaggtaggatggcctggtagagtttcctgaggaagtagcaattaggctgagatctgaaggataaataggcaaaggggaggggaaaggtttagagagagtatttttttttttttgagacggagtctcgttctatcacccaggttggagtgcagtggcctgatcttagctcactgcaacctccgcctccca

SEQ ID NO: 916482 - DNA, 4001 bp, Homo sapiens
tgtcaccaggaccagaatgggagggctgaggatacatgtatatttgccattgctttagagttttccacagtgttttcacacattgtgttatttcatccttataacactctgtggtaaattgtgaagataaggaaactgagggtcagatatgccgaagatcatagagttaagaaggggcagaactggaacttatttatttgagatggagtcttgctctgtcacccaggctggagtgcagtggcacaatcttggctcactgcaatctctgcctcccaggttcaagtaattctcctgcctcagcctcctgagtagctggtcttgaactcctggcctcaagtggtccacctgcctcagcctcccaaagtgttgggattacaggtgtgagccactgtgcccaggcagaactggaccttaaaccaaggttttctgcctctatgtaccatgctcttcttctctatcaggctgttatctgtttgggaagatctaaaaatagggagtggcttggcatgcatgggtgggacaatacagacaatacaagaggaacccaaaaaacaggagagtggggcagaaggaatgagatctggcgagggaggggcaaaggggaggggagatggtagaatctctgagaaaagacagttcaggatcactggccacaacggctaatctctgatgcttgtgctgaccagctcactgacccggaacctggcagatgaaatggctcatgtagggattgacgccagaaaggacaacccaggttttaagaagcatttgaggcagccccctccactctccagggcaaaggtcacagacccagagtagagggtaggtggagcctctccatgctgatgtcaccagtgtctggacgaaaggggaaaggccaattatgaccccccacaaaagttgctgaggcagcagaagctactaggcctcttctcaccccaaaaagagggcctgagtgttacctaacaggccaccatagccacagcctatgtctgcaaactccacttgggcctgagctctcttttctttcttatcctttgggtcatcgtggctctgattttgagtgagtggagcgaagaactctgggtatagctcagaccagtccatctcctctggcttcacagggctattggaaagaagacataagaagcatgagaaggttggtcacaccattgcagaagtggtactgtgagagtgtgtgggtgggtgagggtgggaggtaaaagggaggagggtttctcaaaaattctgtaacactgggccctgtggcctctaagagggacaatggaaaccacccttaactcccagtgtgaatcataggaccatcatgaggcccataaacgctgacctgcccaactccacttctggcggttgatgtgaccctggccgggtaactgccctttctggggcacaagttccccttctcccgagactggctgcctaatgcactgggatcctactttgtgtttgtgctctgcggggagggaaggtaaggtaaggtgcgggcaggattgtgtatatgtttgcctttttattaaatccaacaaacaaaagcaaaagatggaaacgacattctgcctctatcacttcagtctcagtaacaatttatttctcttcccaaacttagcaccgctacccagacttaggcccgaacgccacgcccactctcaacccgccaactcctctctcggtcgaatctcccggtcccacccccaaaaactgacgtcacccatctgatcctcccgggtctaccccaaatcctcccagcagttgcagcacaactgctctcccggctgctttgagaatcccgccctcctctctctccctctgcccactcctcactagcgcagcgtgtggtccgccatggggttggagtgagcacgttgccggtagtagcgcttctggggcggtggggcctctgctccggccacgttccgagtctcggctgccatgatcccagtccggggtttctctaccaaatccacgtggaggcgcaggccagaggcgcaagttaatgacgcagccatgcgcgttggtggcagttcccgccccttaaagacccaagagcaaattcagctgggctgggctgggctgggctgggctaggtggggagggctgtaaggagcgagtgctggagggaacctccgcaccgttagcctccaactgggagggcgaggccaggcccagggacccaacgttttctcttagcttgcttctgcctggtctgggttaccatcctggttgcaggcacctgtgcaccccacaggtgagaggggtctagagacctcgccttctacagtggcatcagtcctcgctcctgtccccttactcctggtctcggaccagtccgcccggtctgactcttgtggtcccgtgtgggtttcgtcgagtgtgcgctcggggccggggcgggaggggcagctcctcattccacctccaggaaatcgaactggaggaaggagggcaaactcagggaggcggggctcgttccacagggacaccacgacggctcgcggcccccagcctctaccccgctccggatccgggatctgagcgccggccgcggtgcccaggcactcccttggcgggccggatggcggaccccggcccagatcccgaatctgagtcggaatcggtgttcccgcgggaggtcgggctctttgcagactcttactcggagaagagccagttctgtttctgtgggcatgtgctgaccatcacgcagaactttgggtcccgcctcggggtggcggcgcgcgtgtgggacgcggtgaggaatgggctgcgccgggtgagggtccgtgggaggtccagatcccggactccgcctctcccatatggagccatcctcacgactgtctttttctctgtcttttctcccgtaggccctgagcctgtgcaattatttcgagagtcaaaatgtggatttccgaggcaagaaggtgatcgaactgggtgcggggacaggcatcgtggggatcttggcagcgctgcagggtgcgtgagctggctttttacgggagagagtggggacccaggggcgcggagaaatggtcacttcgtggatctttgggggagaggggagaactttgggcccagtctaaccccttctttttaacaaatttttttttaaaatttgtttttgtttttattttggcgtctgcttctgcgtgccagacagcgcgaattgcctgtcaaagcacctagggtgggtgattggggagggcaggaaataaaactcaggcaggcctataagaaggagttgtttctatcgtgttgctttttttttgtttttaattttttttgtttttttgagacggagtctcactgtgtcgcccaggctggagtgcagtggctgctatccccactaactgcaaccgctgcctcccgggttcaagcaattctcatgcctcagcctccgaagtagctggaattacaggcttgcgctaccatacccggctactttttgtatttttagtagaagacgtttcaccatgttggccaggctggtctcgaactcctgacctcaggtgatccatctgcctcgcgaggcgcctgggattacaggcgtgagccacgacacccagccttgtgttactctttgtgattttatggagaatactgtcacttaaaagcgccttggctttggacatggtcttctgtcaagatgcacatatgggggtactctgtagggagacttgcagacattaaacttcgtgagtgctttataactttattatgaatatatttcagattccttaggtttttattgctaagagaaacaagcttatgagtttccaagggttaggatgtgttttgtaggaagcggggtaggaattagacactgcagacttggaaaaggaaaaggtaaggaaaaatttgcttctcttttgtcaagaagcaaaaactacagaggaaacagtttcacaaattataatctaatgggcagaaaaaacctcaaactgaaagcactcgtttaaaaattcttacaatgtcatctc

SEQ ID NO: 916483 - DNA, 4001 bp, Homo sapiens
cagtgtggccatcatggtgaaaccctgtctctactaaaaatacaaaaaattagccaggcgtggtggcgggtacctgtaatctcactacttgagaattgcttgaacccgggaggcggaggttgcagtgtgccgagatcgcaccattgcattccagcctgggcaacaagagcaaaactccgtctcataaaaaaaaaaaagaaataaaatattacagtgtatattactgtatctgatgattcacatgtgcaagttcatttcagatgaaagctttggtgcatcaattgggaaaatccaatctttttaaatgatacttttcacaagagaatccttttagtaatttaacacaacaaatatacaagcatttgattttgaaagaatcctcaagaaaatgcctcttacaggaaatcagccatacagtcatccttcagtatcctcaagtgattggttccggtatcccctgcttccaggataccacaatcagaggatactcaagtcccttatataaaatggcatcatatttgtatataaactaggcatatgctgtggtatactttactttaaatcatctctggatgactcataatacttaatacaacgtaaatgctatataagtagttgttacactatttttgtgttatttttattgttgtaattttatattgctatattgttatattgtgggccaactgtacctttaaagttctttcataaatttaacaaagtaggcatgcttggtaactgtgaacaaaataacagaagtcttctgtcttcaggaagcttatattctagtggtgggataaagcagttaacagggcaaacacagtttttgcctttatgaagtctagccaagagttctgggggttaatgaatttataattgtctgtgggcagagatatattaatacaaattatattgactactctatttcattaaagattgttgtatcataaaacaatgcaatcaagattcaggttttttcctttaaaaatactgtatgcatttaattgtaataaaagaacatcaactcctaaatctctttctgtaaaagtatctgatggttcgattttaccaagcctaaactgaaaagatttgctccaacagaaaaacacctgtgcaattgatcactaagatttgtttaaaaatatatatatatagaaaaacacccggattagaataaatgagaatgaggaacaacttaaacacaacttatacacccagttgtttggggacctcggatctcttctgcataaatgttttaaatggtcttaaatccactaaagtatttaggggtcaaaaatccaaatccccacaaggggctggacatcataaatgagtgatgcaggctggctgtaaaataacagaggggctgtggcaagctggagactgttttcaaacagttcaaaaaggctaggcaggacatgctgccagatcctccgatttctcaaaatcatcaaaaaaatctagatattgacacattagcttccacctttttttttttttttttttttttttttgagacagagtctctgttgcccaggctggagtgcagtggcgtgatctcggctcactgcaacctccgactcccaggttcaagcgattctcctacctcagcctcccgagtcctgggattacaggggcgtgccaccacgcccggctaatttttgtatttttttttttttttttttttttagtagagacgaggtttcgccatgttggccagactggtctggaactcctgacctgaagcgatcctcctgcctcgacctcccaaagtgctgggattacaggcgcgagccaccacgcccggccagcttcggcttgtaaacatcagcaactcattcaaatatcaaaacacagggcaggtcaaaatgcatgtcaggtcatacatagcctgtgaactcagcgtagacttccagtgggtgttagttaccccacatcagtgtcctgggatcgtaggggtctctcagggcctggtatcccactagactaattgttaagcagtactaggctgtcacttgaatcacacaacgcagcctaagtttaaaggtaacgcagagcaaatagagattatttgggatttggaccccatgtcatttagatcggcgcttccctctcccgtcccagcaccgatgaggcatgggttatgaagtatgtgactgtggtgaccacttggtatttctcttaatgagaaggagagctgatgggatgaaaagagttacgttccacaacgggtagacggcggcgtcattttcctccagaggcggggtggagtcgatcttaaaggggcaggcaccgtcctccctgtctccttacctagctttgctgacaccgccctcggaagtaaagcatagggctcgcctgtcactcgccctggcgactgttcccgctcatgctttacatttccggggtcccgctaccaaaactgagccacgctctagcagagcgccgcggcccggcagggggcgggacggacggcggcccctcgcggccccgccctttttcccagcagcgctttctttctcctccactttcttaaagggacagaagcgcgaaaccaaagggcgccctgacctcacctggaaaataagggaacgttaaatctgtgtgcaatgtttgtagaattttgattcctaaaaagttcattctgaaactatgcaacacctactatgtgccagtcgcacttccaggcaccgggcatagagtggtgagcaaaatagacaccgtatatttaaaaaaaaaaaaaaaaaaagacacagtataagccctctgtgctgcctacattcaactgcgattaaatcataatgaatgtcctttcttttctaataattcataaattcactagcaatttatttgcagcctatatcactcgagtctggatctacatatatccacctttcaactggacccacatcccactggcccctcaactcaacactcaaagttaactcaccatctgacctgacaacaattaaaacctgctctggcgtgctagaggggggaaaacggtccaaaactaagaaacaggaaaatcgtgtttctgcattttagtttgcagtttgagaaatgcactggcacctgcctgttcaaaattagaatttgtcgcttgggttctgcgctcctgccatgggtgtgacagctttctgtctttccatgtaaactggaatctttaggaactactacaaggaaaggaaactttgtgcttccagtcaacagccccagatgcagccttatcatttctttcttagttgaatggtgtatttgctacattcttgttgataagctatacaccttgcatttcacagtattctgccttagatttcctgtgtaataactgatataatgtgtttatgaactgcattcatccacttatgagctgcttttttcttaattagttgctgatgtaaacgcttgttttctcaactataacttttcattaccacacactctccgattctcctgctagcagtgaaccttgatccatgttcaagatcaatttctataagaaatattgtttttaaccagcttcggtgttctatcccaattaatagtttgaacatcccagtcactgcccaagaaaccagaacgaacaggctaacctaacatttttacaaaagagggttggttcctggaaaaaagcttggtagtcatcactgaagatgcatttaataatgtttggataactcattcaaaacttgcaacttggctgaagggactgcaacatgcctttcctgtcccataatggatttaaaactggtccagttctttctatccctcctgccattgccttagtttggcattataatggcttgcctgggttcctataacttgtctatctctaattctgccttccttaaaactattcttttttttttttttttttttttgagatgaagtcttgctctgtcgcccaggctggagtgcagtggcatgatctcggctcattgtaacctctgcctcctgggttcaagccattctcctgcctcagcttccccagtagctgg

SEQ ID NO: 916484 - DNA, 4001 bp, Homo sapiens
gggcaacacggtgaaaccccgtctctactaaaatacaaaacattagcccggcatggtggtgggcgcctgtaatcccagctacttgggaggctgaggcagaggttggcatgagccaattgcacgccactgcactccagcctaggtgacaaagcgagactccgtctccaaaaaaaatacaactattggtcgggcgtggtggctcatgcctgtaatcccagcactttgggaggctgaggcaggcggatcacaaggtcaggagttcaggaccagcctgaccaacatggtgaaaccccgtcacagggctgggcgcggtggctcacgcctgtaatcccagcactttgggaggccaaggtgggcagatcacaaggtcaggagatcgagaccatcctggctaacatggtgaaaccctgtctctactaaaaatacaaaaacttagccaggcgtggtggtgggcccctgtagccccagctacctgggaggctgaggcaggagaatggctagaacccgggaggcagagcttgcagtgagccgagattgcgccactgaactccagcctgggagacagcgagactccgtctcaaaaaaaaaaaaaaaaaaaaaaaagaaacccatctctactaaaaatataaaaattagctgggcatggtggtccatgcctataatcccggctactcaggaggctgaggcaggagaatcgcttgaacctgggaggcggaggttgcagtcaactgagatggtgccattgcactccagcctgggcaaaagagcgagactccatctcaaaaaaaaaaaaaaaaaaactatttacatcatattcaacattataatctacagatgatttaaagtaattatgcaaatactacatcattttatataaggaactcaagcatccatggattttgatatcctcaggggtcctgaaacgaatcccctgtggatactgaaggacaattgtactacattccttttgtggctaaataatattccattatgtgaatattcagtactatattgtgtttctccattcatctgtgataaacattaaggtggtttccactttctggctattatgaataatgccactataaacattaatgtacacatttatgtggagacatatgctttcaattcacttgggtatatacctaggaatggaagtgctgggtgatatagtaactctatgctcaaattatttaggaattgccagactgtcttccaaagtgactgcacaattttacattctcaccagcaatttatgaaggttccaatttctccacattcttatcaacacttgttttttttttgtttgtttgttttctttggttttgttttgagatggagtctccctctgtcaccaaggctggagtgcagtggcgtgatcttggctcactgcaaccttcgcctcccgggttcacgtgattctcctgtcccagcttcccgagtagctgggattacaggcacctgccaccacacctggctaatttttgtatttttagtagagacggggttttgccatgttggccaggctgatctcgaactcctgacctcaggtgatccacccgcctcagtcccacaaagtgctgggattacacgcgcccagcccctaaattacctctttaagcttcaaaataagcataggatgtaggtatactattatgacctctgttttagaggtaaagaagtgaagtcacaggaaggttcagtaacttgcctgagggctcataaatagctggcagtagagttgggatgacacacatgtcgtctggttccagagctgcacttaaacacaggacgtagactcggtaatgagaaagaggaagctatttcaagcacgagccaaaggcagggatttacaagttcattgcagaaaataaacagcccagtctgactacgaagagcactcaccggagccaggttgcgggagatgaaatgaggatagggtgaggcaggctggtggagggcctggactgtgaggcttagaggcttggattccattaagaatattaattgggagtcatggttggttggtgtgtggtcaagggaacaataaaacaaaaacagcagctcagtggctgtcgacatgttaatggcctttgaaaataaagtatacaaacaatgagtggcaggaaggcgaaaagaaagctttctcatcaccaagctcaaactactctgcattataattacacaatataaaaagatggaggatcatgcctgtaatctcagcacaagatccttagggaggctaaggtgtgaggactgtttgaagccaggagtttgaaaccagcctgggcaacatagcgaggctttgtgacaaaaaatacgaaaattccagcctgggcaacataatgaaacctggtctctacaaaaattgtaagaactagctgagcatggtggtgcacacctgtcatcccagctactcaggaggctgaggcaggaggatcacctgagcccaggaggttgatgctgcagtagccatgttcaagccactgcactttagcttgaaggacagagcaagatgctgtctctaagaaacaaaacgaaacaaaaaaaggctgggcgaagtggctcacgcctgtaatcccagcactttgggaggacagggtgggcagaccacgtgacatcaggaggtcaagaccagcctggccaacatggtgaaaccccatctctactaaaaatacaaaaatgagctgggcgtggtgtcatgtgcctgtaatcccagctactttggaggcagagatttgaaaattatttgaacccgggaggtggaggctgcagtgagccaagatcatgccactgcactccagcctgggcgacattgcaagaccctctctaaaacacaacaaaacaaaacaaaacaaaacaaaagatggaaagattgtaagttatccttaccaaacttctctgtccccttcagacacatttagatgttcacatctataattagccattgtcaatggtaatgagattctaacaaccgcgtatcgcctgtgtgcaatgtgctgtgtacaaagtttttaatctccacagcaaccagttcagaagaggaagctgatgcttgggcgggtagggggaatgttatgtctctttccttttctctggaaaaaaacaacaactttcatgtcatccaggctctctctcatcaaacatgaatcttctctacagcatctgaaggcctctaggattcttcctattaagtcacatctgcctctgagcagggggacaaggcagcgttgcacaaagcctgtctccacctctcttagcccacagtgaccccaggagctaaaagaacatcagagaaaaacatcactaatatctcaaagatactgagtgctgcttagagttgcagtggcaaaaatttttatccatgtaaaaatgtagtccaggaaagattagtttgtcttcccctgctggactccagcctatttctacctaattattttttcatgtgccaaaagtacaggtagggaattcagggggaagtaaaatagtgtttattgagtgcaactctatggcaggctctttattcacatgatctcatttaattcccttaacaatcttgtaaggtaaaaattgttattcccggtgttaatgcaatatatggacactgaggccaaacagcttaagtaactggctgaatgcacaaaggcctggaagtggcagaacttggactcccatccaagttctaaagacttccttctatgtcccttgcactctctgatcgcccacattctctttcccagcagtctctagttaccaaaattgctctccttaaaaaaaaaaaaaaaaaaaaaaaaggccagccacagtggctcacgcctgtagtccagcacttcgggatcctaaggcaagaggatcacttgagcccaggagtttgagaccagcctgggccacatagggtgaccctatctctattaaaaagaaagaaaattagccaggtgtggtggcacacacttgtggtcccagctactcaagaggctgaggtgaaagaatcacctgattac

SEQ ID NO: 916485 - DNA, 4001 bp, Homo sapiens
tcaagtcccttatataaaatggcatcatatttgtatataaactaggcatatgctgtggtatactttactttaaatcatctctggatgactcataatacttaatacaacgtaaatgctatataagtagttgttacactatttttgtgttatttttattgttgtaattttatattgctatattgttatattgtgggccaactgtacctttaaagttctttcataaatttaacaaagtaggcatgcttggtaactgtgaacaaaataacagaagtcttctgtcttcaggaagcttatattctagtggtgggataaagcagttaacagggcaaacacagtttttgcctttatgaagtctagccaagagttctgggggttaatgaatttataattgtctgtgggcagagatatattaatacaaattatattgactactctatttcattaaagattgttgtatcataaaacaatgcaatcaagattcaggttttttcctttaaaaatactgtatgcatttaattgtaataaaagaacatcaactcctaaatctctttctgtaaaagtatctgatggttcgattttaccaagcctaaactgaaaagatttgctccaacagaaaaacacctgtgcaattgatcactaagatttgtttaaaaatatatatatatagaaaaacacccggattagaataaatgagaatgaggaacaacttaaacacaacttatacacccagttgtttggggacctcggatctcttctgcataaatgttttaaatggtcttaaatccactaaagtatttaggggtcaaaaatccaaatccccacaaggggctggacatcataaatgagtgatgcaggctggctgtaaaataacagaggggctgtggcaagctggagactgttttcaaacagttcaaaaaggctaggcaggacatgctgccagatcctccgatttctcaaaatcatcaaaaaaatctagatattgacacattagcttccacctttttttttttttttttttttttttttgagacagagtctctgttgcccaggctggagtgcagtggcgtgatctcggctcactgcaacctccgactcccaggttcaagcgattctcctacctcagcctcccgagtcctgggattacaggggcgtgccaccacgcccggctaatttttgtatttttttttttttttttttttttagtagagacgaggtttcgccatgttggccagactggtctggaactcctgacctgaagcgatcctcctgcctcgacctcccaaagtgctgggattacaggcgcgagccaccacgcccggccagcttcggcttgtaaacatcagcaactcattcaaatatcaaaacacagggcaggtcaaaatgcatgtcaggtcatacatagcctgtgaactcagcgtagacttccagtgggtgttagttaccccacatcagtgtcctgggatcgtaggggtctctcagggcctggtatcccactagactaattgttaagcagtactaggctgtcacttgaatcacacaacgcagcctaagtttaaaggtaacgcagagcaaatagagattatttgggatttggaccccatgtcatttagatcggcgcttccctctcccgtcccagcaccgatgaggcatgggttatgaagtatgtgactgtggtgaccacttggtatttctcttaatgagaaggagagctgatgggatgaaaagagttacgttccacaacgggtagacggcggcgtcattttcctccagaggcggggtggagtcgatcttaaaggggcaggcaccgtcctccctgtctccttacctagctttgctgacaccgccctcggaagtaaagcatagggctcgcctgtcactcgccctggcgactgttcccgctcatgctttacatttccggggtcccgctaccaaaactgagccacgctctagcagagcgccgcggcccggcagggggcgggacggacggcggcccctcgcggccccgccctttttcccagcagcgctttctttctcctccactttcttaaagggacagaagcgcgaaaccaaagggcgccctgacctcacctggaaaataagggaacgttaaatctgtgtgcaatgtttgtagaattttgattcctaaaaagttcattctgaaactatgcaacacctactatgtgccagtcgcacttccaggcaccgggcatagagtggtgagcaaaatagacaccgtatatttaaaaaaaaaaaaaaaaaaagacacagtataagccctctgtgctgcctacattcaactgcgattaaatcataatgaatgtcctttcttttctaataattcataaattcactagcaatttatttgcagcctatatcactcgagtctggatctacatatatccacctttcaactggacccacatcccactggcccctcaactcaacactcaaagttaactcaccatctgacctgacaacaattaaaacctgctctggcgtgctagaggggggaaaacggtccaaaactaagaaacaggaaaatcgtgtttctgcattttagtttgcagtttgagaaatgcactggcacctgcctgttcaaaattagaatttgtcgcttgggttctgcgctcctgccatgggtgtgacagctttctgtctttccatgtaaactggaatctttaggaactactacaaggaaaggaaactttgtgcttccagtcaacagccccagatgcagccttatcatttctttcttagttgaatggtgtatttgctacattcttgttgataagctatacaccttgcatttcacagtattctgccttagatttcctgtgtaataactgatataatgtgtttatgaactgcattcatccacttatgagctgcttttttcttaattagttgctgatgtaaacgcttgttttctcaactataacttttcattaccacacactctccgattctcctgctagcagtgaaccttgatccatgttcaagatcaatttctataagaaatattgtttttaaccagcttcggtgttctatcccaattaatagtttgaacatcccagtcactgcccaagaaaccagaacgaacaggctaacctaacatttttacaaaagagggttggttcctggaaaaaagcttggtagtcatcactgaagatgcatttaataatgtttggataactcattcaaaacttgcaacttggctgaagggactgcaacatgcctttcctgtcccataatggatttaaaactggtccagttctttctatccctcctgccattgccttagtttggcattataatggcttgcctgggttcctataacttgtctatctctaattctgccttccttaaaactattcttttttttttttttttttttttgagatgaagtcttgctctgtcgcccaggctggagtgcagtggcatgatctcggctcattgtaacctctgcctcctgggttcaagccattctcctgcctcagcttccccagtagctgggattataggcgcacaccaccacacccagctaatttttgtgtttttagtagagacggggtttcaccatgttggtcaggctggtgcccaacttttgacctcgtgatccgcccacctcggcctcccaaagtgttgggattacaggtgtgagccactgcgaccggccaagattattctttatattgcagcttaaatgatttttttctgaaacttagattccatagtctagaaaaggcctgcccttcctttagtcccagacaaagcatgaaaaacagggatatatggattttcttttctgttgtttggtgttgatgcattgtaatgtcttaatagaaaggaccgtctagattttaacaaaattgacccacatacatccaagcagacttgtgaactgataacaatttgagctgttgtctatccttgtgatttttttactttaaatacctgccctacatttttgtttacaaagccagttctctaataatcggtcc

SEQ ID NO: 916486 - DNA, 4001 bp, Homo sapiens
ttgttgaatccccaatacctagcatgattcttggtacataggggacttgaaatacattttggttgaatgaatagaagaatgaatgcctgcctctgggaagatttccctttttttatttttgagacagagtttcactcttgttgcccaggctggagtgcaatggtgcgatctcagttcactgcaaccttcacctcccgggttcaagcgattctcctgtctcagcctcccaagtagctgagattacaggcataagccatcatgctcggctaattttgtatttttagtagagatggggtttcaccatgttggtcaggctggtctcaaactcctgacctcaggtgatccacccaccttggcctcccaaagggctgggattacaggtgtgagccactgcgcccggctaggcttcccttaatatgacctagttctgtccctatgaacaaagacatgttaatttacattcctagggagatgacattgtaagaatttttaaacgagtgctttcagtttgaggttttttctgcccattagattataatttgtgaaactgtttcctctgtagtttttgcttcttgacaaaagagaagcaaatttttccttaccttttccttttccaagtctgcagtgtctaattcctaccccgcttcctacaaaacacatcctaacccttggaaactcataagcttgtttctcttagcaataaaaacctaaggaatctgaaatatattcataataaagttataaagcactcacgaagtttaatgtctgcaagtctccctacagagtacccccatatgtgcatcttgacagaagaccatgtccaaagccaaggcgcttttaagtgacagtattctccataaaatcacaaagagtaacacaaggctgggtgtcgtggctcacgcctgtaatcccaggcgcctcgcgaggcagatggatcacctgaggtcaggagttcgagaccagcctggccaacatggtgaaacgtcttctactaaaaatacaaaaagtagccgggtatggtagcgcaagcctgtaattccagctacttcggaggctgaggcatgagaattgcttgaacccgggaggcagcggttgcagttagtggggatagcagccactgcactccagcctgggcgacacagtgagactccgtctcaaaaaaacaaaaaaaattaaaaacaaaaaaaaagcaacacgatagaaacaactccttcttataggcctgcctgagttttatttcctgccctccccaatcacccaccctaggtgctttgacaggcaattcgcgctgtctggcacgcagaagcagacgccaaaataaaaacaaaaacaaattttaaaaaaaaatttgttaaaaagaaggggttagactgggcccaaagttctcccctctcccccaaagatccacgaagtgaccatttctccgcgcccctgggtccccactctctcccgtaaaaagccagctcacgcaccctgcagcgctgccaagatccccacgatgcctgtccccgcacccagttcgatcaccttcttgcctcggaaatccacattttgactctcgaaataattgcacaggctcagggcctacgggagaaaagacagagaaaaagacagtcgtgaggatggctccatatgggagaggcggagtccgggatctggacctcccacggaccctcacccggcgcagcccattcctcaccgcgtcccacacgcgcgccgccaccccgaggcgggacccaaagttctgcgtgatggtcagcacatgcccacagaaacagaactggctcttctccgagtaagagtctgcaaagagcccgacctcccgcgggaacaccgattccgactcagattcgggatctgggccggggtccgccatccggcccgccaagggagtgcctgggcaccgcggccggcgctcagatcccggatccggagcggggtagaggctgggggccgcgagccgtcgtggtgtccctgtggaacgagccccgcctccctgagtttgccctccttcctccagttcgatttcctggaggtggaatgaggagctgcccctcccgccccggccccgagcgcacactcgacgaaacccacacgggaccacaagagtcagaccgggcggactggtccgagaccaggagtaaggggacaggagcgaggactgatgccactgtagaaggcgaggtctctagacccctctcacctgtggggtgcacaggtgcctgcaaccaggatggtaacccagaccaggcagaagcaagctaagagaaaacgttgggtccctgggcctggcctcgccctcccagttggaggctaacggtgcggaggttccctccagcactcgctccttacagccctccccacctagcccagcccagcccagcccagcccagctgaatttgctcttgggtctttaaggggcgggaactgccaccaacgcgcatggctgcgtcattaacttgcgcctctggcctgcgcctccacgtggatttggtagagaaaccccggactgggatcatggcagccgagactcggaacgtggccggagcagaggccccaccgccccagaagcgctactaccggcaacgtgctcactccaaccccatggcggaccacacgctgcgctagtgaggagtgggcagagggagagagaggagggcgggattctcaaagcagccgggagagcagttgtgctgcaactgctgggaggatttggggtagacccgggaggatcagatgggtgacgtcagtttttgggggtgggaccgggagattcgaccgagagaggagttggcgggttgagagtgggcgtggcgttcgggcctaagtctgggtagcggtgctaagtttgggaagagaaataaattgttactgagactgaagtgatagaggcagaatgtcgtttccatcttttgcttttgtttgttggatttaataaaaaggcaaacatatacacaatcctgcccgcaccttaccttaccttccctccccgcagagcacaaacacaaagtaggatcccagtgcattaggcagccagtctcgggagaaggggaacttgtgccccagaaagggcagttacccggccagggtcacatcaaccgccagaagtggagttgggcaggtcagcgtttatgggcctcatgatggtcctatgattcacactgggagttaagggtggtttccattgtccctcttagaggccacagggcccagtgttacagaatttttgagaaaccctcctcccttttacctcccaccctcacccacccacacactctcacagtaccacttctgcaatggtgtgaccaaccttctcatgcttcttatgtcttctttccaatagccctgtgaagccagaggagatggactggtctgagctatacccagagttcttcgctccactcactcaaaatcagagccacgatgacccaaaggataagaaagaaaagagagctcaggcccaagtggagtttgcagacataggctgtggctatggtggcctgttaggtaacactcaggccctctttttggggtgagaagaggcctagtagcttctgctgcctcagcaacttttgtggggggtcataattggcctttcccctttcgtccagacactggtgacatcagcatggagaggctccacctaccctctactctgggtctgtgacctttgccctggagagtggagggggctgcctcaaatgcttcttaaaacctgggttgtcctttctggcgtcaatccctacatgagccatttcatctgccaggttccgggtcagtgagctggtcagcacaagcatcagagattagccgttgtggccagtgatcctgaactgtcttttctcagagattctaccatctcccctcccctttgcccctccctcgccagatctcattccttctgccccactctcctgttttttgggttcctcttgtattgtctgtattgtcccacccatgcatgccaagccactccctatttttagatcttcccaaacaga

SEQ ID NO: 916487 - DNA, 4001 bp, Homo sapiens
cctcccttatctagtatactttttttcttacagcactaaaaaagtttcaaatcagatgacccaggtttgagaatcttccattatcagctatatcccttgcaaattaactcctcaagttataattccacaaatcgacaataacagaacctatcttgcaaggctgatgtaaagattaaaagagaaaatacacatgaagacacttagcacactacagggtatatagtaaatatcaaataatccaattattattagaatatgtaagacaatctgactctaccattgtctggagaccaggctaaacacgtattaaagtcttacactctaaacttgagagtagtttcattttatttatttaaaactaacatgagtaactcattaattcctccattcaacaaatattcatccagtatctaatgtatgccaagtattttaccaagtgctgggaatacatcagttgacaagtcagacaaagactctgctcttttggagtttaagtaaaattgtcatatcataagtgccatatatttattatgagagcaaactgaagaagtgcctaacttttcaataacaattacttaaaaaaacaacaacagtatttaccaagtgctattataagaggtccctctagtgatgctttgcattcagagaatgctcaatgaataaagttcactagtaagggtaactttgggaagtctagaaggaaagtaaaaatcccagaagcctgttggtgtccatcattctacttccaaaatatgcttgcctgagaagaatctacatttcttgagggtaggaaaagcttgagcctacaaaaattcaagacacatattaggtactttaaaatagtttttaaatgaaatagtgactatccgaataccatcctagtccaagatacaatcatctgttgtactactgaggtagtctcctaactggcctctcagcttcagcttttgccctagtctattcttcaaataattcacagttatcttttcaaatgtgaattaggtcactatgttgcctaaataatcccaagggtttccgtcacacttaaaatccaaaatccttccaaggcctagaaaggcctgtgccatctggcctctgcttgcctcccgtcctgcacctgcagcccctcacctggctagagccaagcctagcctgcggttcccaccgcctgcaacccctccctgtggctctgcagctagtgccttctcatgttcctgacctcctaaattgaggcagcctccttacacaatccctaccacattacactgtttttattttctacttcattaccaccacttgaaattatctttattaactgttgagtaatcttccaccacatgctggcatttataaaacctgtgagagcactgctcccctagtttccctagcgtcaattattatggaattactagatgaaggaactcccctgccctgtttcctgctttctttaaattgtggacatacacaagcacccaaagaaagagtgatcctgattccaaagaacatccccaccccacccctcaactaatccgacccctcctcggtttcccagcgggccgccccgcctccgccgccacgcacctggttctgctggcttccaccagggggctcgcttcgtctgccgggaccttctcctccgcctcccttcccgccccgcctaccccaccacccacctgcttcccactctgcttccactagggggcgcgtctctgagggcagggcctccgtctccgacgctgacttcctcagcgcagccagcactgtctccggtggcaagtcgaccagctcctcccacacggattctgtgtagaaatccacggtatgtgcattggaaatggacagggcatccctcaggaactgcagcagtccctgcaacttggcacgcagcgtgggcaggtccggggtcaccgggagagggcaagaagccgccatgacgctcaccctccgaggctgtaggtggcgcaaacatggccgtgaggcgccagctcggcccaaattagcacaggcaggctcagtagagctccgagccggattccttctgagcgattgattgcttcggcttggtgacgtattttgtgggcgtccgtcgtggtcttctgatgacgcagttagtcggctgcaatggcgccggtgaggcggtccgcgaagtggcggcctggtggtattgaggcgcgtggtgaaggggtttccactgtcgggtacaggaataagaatgtgagacagaagacatggcggcctaaccacccgcaagccttcgtggggagcgttcgcgagggtatgtaagaaggcaaccatttgcaaatcctcaggcttgctaagttttaggatataagattcgctgaagcttggaagaaggatttaggaaccagacccggtcctacttggggcaagggaattcattcctgagcccgctaaagctgtgagcttcgcagagctctagataggaagacggagcagtgttgctattatttaaacgtcttttctgacgtaaccctgtatttcatcagaacttttttcctatatttttcctgagaaactgagcagagagagtctatgaccctgtgaactcttgcgcatgtggtaaggtaaaggatagagaggaggacagggccagaaacactgctccgaattcttccttattacaaatacccgaggccctccagccttcgctttaatttgtgtttgtcattttgtattgctgtctgtaaggtctcttagatcccacttggaatatataaatgttaaattcagtcttccgataattgctagcttttcagacaaccatacactgtctttttctttcgtgttgaaacattttcgaaaacatgtagtttgtccaagatactagatgtggcattttctttcctattttttaagcatttattgaaggctcagattaagtgttttagatgaactaaggaatttgttttgatttgtgaatacagctgtaaactcaagttgtgcaacagtctgaactggtcagtttttctttgagattcttacttggatttccgcatgactgttagcctggtctttttgcaaagggccaacttactatgcaatccatcagcttaaatttgttgcttgaaataattttttaaagcaaaatataatactagaatctgaatgtgatgacgtaaaaaaagttttcatttgtaattaacagctccattcttcgttcaacttcttttctctgaaagtaattttggatgatattcctcaatgtaggacaaggctttgcttttcgaagaaaactgaaaatacagcaaagttacaagaaattgctacggaaggaaaagaaggctcaaacgtcactggaatctcaattcacagatcgatacccagataatctgaaacatctctatttagctgaagaggaaagacataggaagcaagcaagaaaagtcgaccatcctttgtcagaacaagttcaccagccgttgcttgaagaacagtgtagcattgacgagcctttatttgaagatcagtgtagctttgaccagcctcagccagaagaacaatgtattaaaacagtaaagtatgtattttcttcatttgaaatcctttaagtgttgttttattatttaaaagtactataggataatttatataggaattgtattttttcttatttaacacattttagaagtcacggtttaattagggaaacattttcatggaggctctatttttagcttcaataactgaattaggctggtttagcctaattgacaaagtaacgtaatgggaattaagagctctggaatttgggtttcttcctctcaagtacaggtggtaacttgattggaccatatgttatgactatatttttgaaaaataacttctgagaggtgttataattttagtcattaacagtatgggttctagagccagactcaacatgttagtgccccagtgacctcttctttaaaatgggaaaaataacactatgtcctctttaaattgggaaagataatactgtaatgaatatatacttcaga

SEQ ID NO: 916488 - DNA, 4001 bp, Homo sapiens
atatatgtatctcctctccctgcctcacacaatgggcatgtggtgggcctacgctctacctaacattctgtggcttgattgctttttgttttcattaaacattatcccttggggatttttaagtatcagcacagataactcttcttgttctttctgacagctgcacagtgttcctttatacaatatgacaactcacttacatagcatcctattgatagacatttcagttatttccagtttgtgcaattacaaattctacttaatattcttgtgtatggacaagtttttgcatgtggataaaagagtatgtgtggtttaaattttgatattatcagataccacccaaagagggtacctcttctaatgtgtatggtggtgtccagtcccctaaacccaccccaaccctatactgaccttaaaagaagtccctaacagtataataggtaaaattagtatctcctttaattaactctttaagtttgagcacttttgtcctataattggtttacatttctgttcctgttatttgcccattttcccttttgtttttcttattgaaaaatattgatcttattgacatgtaatgtcttttaacatgagggaagttaaccctttgtctatcatccctggcaaatattttttccaagcttgttttgtagtttaactttgttttggggagtttttttttcttattcttttttttctttctttctttttttttttttttttttttttgagatggagtttcactctgttgcctaggctggagtgctgtggtgcaatcttggctcactttaacctctgccccaccaggttcaagcgattctcctgcctacaggcacctgccaccatgcctggctaatttttgtatttttaatagagatggggtttcaccatattggtcagtctggtctcgaactcctgacctcaagcgatctgcctgccttggcctcccaaaatgctgggattacagacgtgaaccactgtgcccggccaggaggttttttctttatagcagttttaagtttttatattcagatttatcaatctttctctttatagcttctctcccacgctaaaattttaaaaaattctacagtattttctagtagtttactttttatgttaaaatgtttcagccacctgaaattgacaggcctgccctctatgataatagctgctactaactagtcctcctcacaccctttcactcaccggtctcagcactctgcacacctcgcggagaatccgctcctggttcttcacagagcacagcaccagggtgcagaccaccacatccacagagccatcagccacctggtgcatgttctccccggcagctaccacaaagcgctcaaactgcaggtgtcggttctctgcaatgctcttgatcaaaaacttctcaaagttggggttggggtcaatacaggtcaccctgcacccaggtgggtagaacttgaagttggcccccgtgccacagcccacttccagcagggagagtttcccggaggggcccgcaaactcctgcaggttactgaagagctcccgcttcttgcttgccatctgttcgttgtatatcacagtgaacctcaccaagaagtaggggaaccattttttgcatatccagctccacaagcccagaaagttcagcaggtacaagggaaatgtcaggatgtaaatggccagtctcaggataaagatggtaagctccattgctcagaagggaaaaaaacagatcaacagttagagacccgactcctttaattgcaggagagaggcttctggccacactccagagccaatcagctgcagaggagaaaaagaactggctgtgctggaaagtcaaatcatgggcaagaggccaattttgcctaatagatgtttggcagcagtcgattcagcttagttttcataaggcaaaatgagaaggttcccagcttttcctcagaaggaaagtggattataatcctttattcctaatcgattcctgtttccccttctctgggtttggagacagctgctagcttcctgctagagttttataagcgcagtgtacttacaccccaccgggctctccagtgacctctaaaagaaaacagaattcgtgggtggagcctggtcaaaccacaccagaagagtgctgccaaggcccctttatcataacacatcccccttacttcccccgcccaaaccctgttttttttttttttttttttttttttaaaaaaaaaaaaaggaagtgaaaggacatgcatgcccggccacagtcagcaagaattctctcttttacattctgggcagaggctctcagtgttcacaactcaacgtttttgtaaaccaaaaataatgttctaaggcctctaaccatctgaatggactttctccttggccagggcgcttttaaaatttaacttgagagattgtttcaggccatgaggggaagtgggggtcagatatgcctcattatacctcaagccggcattcacatcaacgcagaccttaagtacatttacaatctattctctctgaagcctgctacttggaggcttcatctgcataataaaacttcagtctccacaactcttattgcaacccagacatttcctttctattgatcccaggtctttagataaactcaaccaattgtcaaccagaaaaatttaaaacgtacctataacctggaagctccctgcctcgcgtcgggttgtcctgcctttctggactgaaccaatgtatttcttaaatgtatttgattgaagcctcatgtctccctaaaatgtagaaaaccaagctgtaccctgaccaccttgggcacatgttctcaggatttcccgagggctgtgtcacaggacatggtcactcatatttggctcagaataaatctctttaaatattttacagaatttgactctttttgttgatattttaaaatcactgttttgggctgtacttccccttttaaaacaatttttggctcaaggaagtcagtttgtgggctgcccttcttttaaaggacaagcctcagtcttcaaaatgtgcctaactactcgattactcagctaatttggataaaaatatttcccagaatattcacatttgggagccaaagggattcagaaaatagtttcaagcatccatccgctttttacaagaaagcccgaatctgggcacagtggtgggtgcccatggtctcagctactgaggagctaagacagaagcataccttgagcccaggaattcaaatcctgtctgggcaacatagtgagactctatctctttaaaaaaaaaaaaaaaaaaaagaaagaagaaaaagaaaaaggcctgagctttagggtggctagggaacacagaaaaaaataattttttaaaaatagtaaacatttactttaaaaaactgggtgatggatacagggagtgttctgttgtttcatgatttgttataacctgcatgtattttataaatattgtatctattccatttttaacagatttttttaggtggaattgacatataataaactttacatatttaatgtgtacagtttgataagttttgacatatctatatacctgtgaacccatcacttcagccaagataaatgaacatatccatcacccctaaaagattactcttgctccattgtgatcctcccttctgcattcctaatcctgaggcaatcagtggcctgttttctgtctgtggcctgtttcctttccttttttttttttttaaatgagcagcagcaagatttattgtgaagagcgaaagaacaaagcttccacagtgtggaaggggacccgagcgggttgcccttctgtctgtttttgaaaacaggatccagggaagaaactgagcaactccacaggactggaagattctaaagccctcagcaaaggagaatgaaagtaattttgtagagaatttaattattctttttaaaatggagaggcctatggccacaaagtttgcttgtaagaaaagtaccaaagtaaccccagac

SEQ ID NO: 916489 - DNA, 4001 bp, Homo sapiens
gagaaacaggagtggagggctcattgtattattattattattattattttttgagacagagtctcagtctgttgctcaggctggagtgcaatggcgtgatctcggcgcactgcaacctccacctctcaggttcaagcgattctcctgcctcagcctcccaagtagctgggattacaggcatgagccaccacgcccggctactttttgtatttttcagtagagacagggtttcaccatgttggccagtctggtttcaaactcctggcctcaagagatccacctgccttgcctcccaaagtgctggattacaggcgtgagccacctcgcccagctgggcttattgtattctgagatacacgcacaacctctctcacaaaacccagatgcatgcacaagctgcttcctggacatcgctgtgaacatcccagggaaacctcaggcccaactcttgactgaagctggggttcctcaagctcctcgcctcactatactctccctaggtgatctcaaacctagtaagtccaaaacagctttcttccatctcagcaaatggcacttttcatcagctctcccctcagttgctcatgctagaaacctggaaactattctgaacgttctctccacagtctgatggattctactctacttcccctactatctttacctagaacactcttttattttccccaccccgtccacactctgcttaatccctcagatctctctctctctctctctttttatttatttatttattttttttgatacagggtctcactctgtggcccaggctggagtgcagtggtgcgatcatagttcactgtaactttgaactcgggctcaagtgatcctcccacctcagcttcctgagtagctaggactataggcatgtgccaccacgcctggctagcttttgtatttttttttttttttttttttgtagagacggcatctcactatgttgccttggctggtcttgaactcctgggctcaagtcatccttctgcttcagcctcccaagcacagatctcgatttaaacctcagttccttaggtgtcctccccactcccctccctgtcccatggtggtaggtgatcctcctgttgcttccacagcacccaattgtgccccgtcatggcactggtcatgtctcctattcaccagcaggtagaggtggatggggtgtctaatgtgctacttactacctcagacgccccattctgggggccgaaccctggggcggctgatgctgcgtttgcctgccccacacccatccccttcccaccctgcttaccggtctcagtactctccggacctcctgcaggaccttccttgggctctgcacagagcacagcaccagagtgcagaccaccacatccatggagccatcagccagctgtctcatgtcctctccaggagccaccacaaaccgctcatattggaggtgcctgttctcagccatgctctttgtcaggaacttctcaaagtggggatttgggtctaggcaggtgaccctgcagcccggtgggtagaactgaaagttggctccggttccgcagcccagctccagtagggccactttcccggaggctcctgtaagcccctttatctggctgaagagctcccgtttcttgctctccatcttgcggttgctcttgggagtcagcacggccatcaggtaggggaagtagcttttgcacaggggctgccagcagcccagcagagccatgaggtgcaggggcagggtaagaagcagcaccagcagctgcaggagtgggaccaggatgtccatggcagaccagctctgagctgtgcttccgctggggcactggctttttccctgctcagcctctgcaggcgctggcgtcccctcccgctgtgataggactttgctccttgtctcctacttgacaatttcctatttgccagagttgagtgggtgtatggaattcctccagagggcgcaggtcccacagccccacaagctcttcaatgacttttatgtgggcggagggacaggtggtacccatgttcctgagttctggggcactgtgcccagctgaaggggggcaggggctgctgagtcatctcagagggagtgggaaggggtaaggggatatgtttcagatgacagactcatggcgggggagtgtcgggggctggcagggcgttgggggtgggttggtagtggtgaatgctggggacagagttgactcatgggacatatcctggcctcatttcgtcctcaggtcaggcacttcagaggggccataggaagggaagggtgctcttggcagaggaaaaagtaggtgtacaggacagagacagcatgccctctcctggaaagggtgagaagtttagttctgtggggaatggggtaagttggacaaatagggggaagtgaggtcagagaatagccactttttagagatccttccctccctccctcccttcctcccttctttccttctttcctttttttgagacagggtctctgctgcccaggctggggtgcagtggcagcagtctgggctcactgcaacctcaatgtccctaggctcaagtgatcctcttacaccagcctcctgattttctgggactacaagtgcataccaccatgcccagcaatttttttttttctgtaatttgtagagacagggtttcaccctgttgcccaggttggtcttgaactcctgggctcaggtgatccacccacctcgacttcccaaagtgctgggattacagttgggagccactgcgcctggctgagaagaattctttttacaaaacattattaaacaactttttttggaagaggcagtacattcacttagtacaaaattaaaaagatactaaagagattacagggaaaattctctcttctactcctgtgacccaaccactcagatctcctctctggaggcactaaatgccatattgccaatttcttgtgaatccttccagagatgacctgtgaacgagcagggaacacacacaccacgtgtttagatccatgtacatatatacatatacatattcccttttcttttacaaatagtagtatattgtacacactcttgtataccttgcttcccccccttcttaacaatgtattggatttagtagataatagcaaatgggtttccaaagtgattgtacccatttacacgtccaccagcaatatttggttttatgtgtcttttatgtgttcatattattattgatgcatagattcctattttattcactgatttgtaacctaataccctatttatttatttacagtttctttgaggtataatatatataagaaggtttacatatttacagtatatagattatttttgacacagtatatacctgggaaaccattaccacagtcgagataatgaacatgtctatgtgttaggcttttgcattgctgttaagaaatacctaaggctggttgatttataaagaaaaaaagtttaattggttcatagttctgcagactgcacaggaagcatggcaccagtatctgcttggcctctggtgagggtctcagggagcttacaatcatggtggaagacgaaggggagcagtgtatcacatggcaagagagggagcaagagagaccttgcgtgaactgccagagcgagaactcactcatcaccaaggggttggcactgagccactgatgaggggttgggacctcaggagccaaacacatcccaccaggccccacctctgacattgaggattacatttcaacatgagatttggaggggacaaacatccaaactatatcagtttccttgtgtttctttgtaatccattcgcccctctttcatccccatcttcaggtaaccgctgatctgctctctgtcagtatagattaatttctcttctcttctcttctcaggcagagtctcactctgtggcccaggctggagtgcagttgtttgatcttggctcattgcaacctccacctcccaggttcaagtgattctcctgcctcagcc

SEQ ID NO: 916490 - DNA, 4001 bp, Homo sapiens
ggtatccagtctatagcaaaggaagagaaaagagatgtgagtgactgcagctctatacctcgtaacccttttatgagacaaatcagaaaatcatggagaaatggttatactttatctttgtgacttattcctatatagctcaatataaaattactgagaccattagtgctatgaacaaaaccaataggaatagaaagacttcagaaagacaagttccttcactgctgtgcatttgtttggtaaaaagaaaaaaaagacaagttcctgagaacaaagccctgctgccctcttaccctcattcctggccaggaatgaagtccagctccactgagaggcctggcagcccttctagccccacggcttccccgctagctatgctagtgaacaagacagaagaattatttttctcaatctgtatcggaagaaggagggaaaaaaatagagtaggacatctttacagcctaaagttcactttctgtggccagtcttctagccagattctgggaaatctgtgaagatcacttttctcttgtgtgtcagtatggcatatattttttgcatgcatgtgagtatacctgcatgcatgatggtaatagtgtatgtattcccactgttcttcttcaagatttacatttggtccagtttctttttttcttttttcctttttttttttaatggagatgaggttaactcatctcactatgttgcccaggttggtctcagtgatcctctccactcagtctcccaaagtgctaggagtataggtgtgagcccaccatgcccagcccaggtccagtttctttctaggtagtccctcctctatgtttgtgtatgcatttgtatatcagcttcttttttgctttgcaatttgtttactcatatgtgaccctctttgggtggttaatatgcatttgtgtgtatcttagttgcaccttagtttcataattcttgggaggcctttcccctagtctgaagtctagtcacattcctgaactttttttcttaacacaaaatctgttcttctaataggaattccagagctcaataccaagcatctctactgctattcctcttcgacctcattccatcccatctcctgccacacacgtgtatagctgaggagctgagggtttagggagcaaagaataaaggactcaccagaggtgatgatgaatgcagcaagaaacagcagcaccttgggtcccaagagcgacatatctataggggtggtgggcatagcagagaatgtgatgctcagaggcacatcagcatttcagtgccagggaaagatgcctctgaggtccctgtctctttgtcttcccagaactttcttcattttcccttatgactcaaaccctttctctcttttcttacctttcacccaacattcatttctccctcaaatctattccttggtcacttaccattattcttgcttttattattctctgctaccaagtcagaggaaattttacattctacatggtccgtacttggccctaccctttggcctctttcacccctgatgtggaatcttcctttctcatatgcgtgactttttcatatcatctgctcatcttggcgtctccttcatcagaattccacggttatttgggaggtctgctcaagactaagttcagtgacattccccattgccccctccagccctttcacacacacacagacatacacacattccctctgtctctttagggtttcaggtaatcaaataactcactgtctatggtgttctgctctttccaccgagtcctttggctgctgaatgtgtctctctcctcttacgctgttcctactttggctggcgaataagatgaacagagccactccctggaaaggacttcagatttggcctccgctgaaacaatgagatgagggagagcaagaaagccaggctaggcgtagaatgtgtgttacaatgaggctggaatgagaagggagatgggaatttgcagttgctcacaccctcattccaaatgttatgactacactggtgagagctcttgctgctccctggaagtgttggccccagctcatgtattgcctttcttccattagcctattttccctcctctcacgatctggtcccagctcccctttgttccttgggttctttcttaccgaaaagttccgtctcctccttggtgtgttttaatgcacattatagatgctgtttctctctctctggctatcttcttcttctttgttttttgttttttttttttaagacagagttttgctcctgtcacccaggctggagtgcaatgatgtgatcttggctcactgcaacctccgcctcctgagttcaagcaattatcctgcctcagcctccttatattccatatttgaatcattccttcatccttctttctcactttctttttcaatattcgtctcttcagcactaacaaatttctttttattcctgtatttctttttcatctctgcctctttcttgacctacacatttagactcttcttgttttttttccccttggaatatcctatgtattctcacaaccaagcgaacacagataccttatgagttttgtccaagaggaaggctggctaccttagggttataaaaagttgaggaacttttcagaactctccaaatcattttcaaatgtagagaagctctgtgaaaggggtgccagccttactttgtcttttggctttgtttgagcttaactaagaatctgggtttctgggctcttaaggataaaatgcaatcagatgcccaaagaaaattgaaaggcaaggttattatgcttgcctcattttctaccaatatttttccttagatcatataatgtgtagataacactttctctgatccaggattttttcttttttttaagatagggtcttgctctgtcacccaggctggagtacagtggcatgatcacagttcactgcaggcttgacctgggctcaagtgatcctcctgcctcagcctcctaagtcgctgggactacaggtgcatgccactatgccaggcgaatttagatgtatttttttgtagagacaggattttgctatgttgctcagccttgattcaggaattttaaaggctttgtatttcttcttattcacagagactctagtggttcaaccactaaaacattcccgctttggattcaagagcaaacttgaattacagaaactcaagtctgaggaatggtggaccttgtatgccatagaaatatgtaagtttcaggtttcctgttggctcccctttagtctacattatatatctccctgatgaaataaattagagaagagtacaggtagacagagagcagatagtattaataaattacatactagaagaaaataaaagggggtatgatggaaggaaggaaagaaggaaagaaggaaggaaggagtctagttgagaggaaaaaagagcagtggacacagaaataagcaaatcgcactttgtaagcacctctgggacctccgagggagctgtaagtgctacatctctaagatacatggaatctggtcagtccgcagaacaagctgagtgctacgcccagctcttcctgatcttcctgccccagaacttgctcttcttccatctgctccccagtgaaggggctgagactagaaaacagatgtgattctagtctgaggagagtcaggggaagaaaagggtgttgggagaagaaacaaaaaagcagatgcaaagcaggacatagctaaggcaggacatagaatagagagcctagagcaacaatcaagttttccatgaagctcagacagatggagacactgaactcaggccagtcatttggcagggagagcaatgacctcaatgtgctggcctggctagaggctatagtttaggagagcctccccaggcagtgggagggggcgttctcctggggttgtaggaggtagtctggagttggggcagtgaaaataggaacagaatgttcagagcagggctgaagaagagaacaggcagggagtagcat

SEQ ID NO: 916491 - DNA, 4001 bp, Homo sapiens
gcagcacgcggcggtccgacaggaggcagcgcaggcctccagcacaggtccttgagaaggcacgctgccggtcatagttctccccccagtttcgaagggccaaggcccctgccagagccaggagagggatggcagccacaaagggcgctacaggccccagccctatccagctggctacagcctcagctgccacacctgccactacagccagcacatggttccagaaggcagctcgagcaaaggtagctgggatccactcagcagggaagtcatgccgttccacgtgctcatggatataccaggcctcgaaggctgagaagagcagggctgtggacagcccaccaagtgctcgccccactagcagcacaaagtagtcttgagagagtttggttaagcagcatagtgagtaagtcagggagaagaggacacaagaattcttgcgacccagccaatccacaagggaggaggccactaggccaaagaggactgtagaggcaaggccacagacatagaggatggcaatttgaccttccaggaagtagtaatgctggtagagtttatagaggtagggggcctgaagccaatcagctgccagggccaggaagtagacctgatagaagtccagttgaaaccgaaggaaggagggattgctgcaggcccttccagggggtttagcccggcatcttgacagttccagccccaggcaggaggccaggaggcctacaaaagcaaggtaggcagtcaccagcatggtgggcccccggacgacctgggaagagaggtgggagtcagagccatatccatccttcgggcagcacggtcaaggggctgtcttaagcagatggcagctccacccaaccccgctgccaactccactccccaagatctcagaccggagggaccagttgggtgggtgggaggagtggccacgccaaagctgtctcctaggacactgtggggcagggaggggtaagaagacaggggagaggactgggcactcaacccatccttgcctgtgaagagggagtccctttcaataatcccgctcccgcaaattctactgccctttcccacagcagctcccgtacacttccttctattacctcccgtcctcgctgcggagcctctttttgccctcagtgtctcatcctctgtcccgggcatccctcccacccgcgcaggcctctcgagttgcttcagggtcatgcgtgtgcatctcagaggcccactcctccaggtcactggcaccccactgcgccccctagcccctgcccagccctgccacatccacttgcacctcgcccagactccgcctcacctgctgccccggtctgcggggacgccccggacacgtccggctccaggccgccaggccaccctccccgctgtggctccggctccggctcgggttccagcagcgctcccgcccctcacagcctgcttccgggagccgggcaggcctctggccgccgccatgatggcttcatcacgtgacgggggcgcggcgccaaaaccccgccccgccccgcccgcccgccctccttcccttacccgggcgcggaactcctgacgcctggggtgggtcgggaaggggcgaccataggaggctgcggttgcttctcctggcctggcctcgctcgctgccatcccgtgacacctgctcctctggctcttggatgcctgaggggccaccctgaaataagtgccaattttcttttcttccgtgcagtgctcgggaaagatgcccgcagtccggtagagccaagggttggagcttcctaaggaacagcaccgctgcccgaagccgagaaggtctccttggtttgcctcctctcccactgcagtgacctccatgcaagagaagccagtatggtccagacacctgagggaggcggtgtggtgtaaagaacttggagtcgggctgcagacagactaaggcgcagtcctgcccctgtcacttaccagctgtgtggccttgggcaagccgcataacttcccagtgtcccagtttctttgaagtcacaggatagcaatgcccaaataaagaaggctaaagttcagtggcagcatggggttaagaacttcagccttggagcttaattccctaccttctgccacttacaagctgttttaccttggaaaaactatttaacctctctacagcttccgtatcatctcctcaagagcctccaatgacttcccatctcactaagggtaaaagccgaagtatttataatggcctacaagaccctctgtcctctgaccctctgccactcctctgacttcatcccctgctcctctccctcccatctatgttggctaccaccagggcttttgcacactgttccctgtacagttcttctccaagatatccacgtggttcccccccccacctcctccagttctctgttcaaatgtcacctgatcttggctgggcctggtggctcattcctgtaatcccagcagtttaggaggctgaggcaggccgatcagttgaggtcaggagttcaagatcagcctggccaacatggtgaaaccccgtcgctagtaaaaaaatataaaaattagccaggcatggtggtgggcacctgtaatcccacctactcgggaggctgaggcaggagaatcgcttgaaccagggaggcagaggttgcagtgagccaagatcacgccactgcactccagtctgggtgacagagcgagactctgtctcacaaaaaaataaaaaataaaataaaattttaaaaaatgtcacctgatcagaggggccttccatggccctcctgtttaaaatagcaacaccaccacctccagcacagtaatctacctactttccttccaattttctattctctctgctgcttttactctgcagtacactatgtattttccttgtttatttatttactatcttggccaggtgtggtggctcacacctgtaatctcaacactttgagaggccaaggtgggtgaatcacttgaggccaggaatttaagaccagtctggccaacatgtcgaaaccccatgcctactaataatacaaaaaattgctgggcgcggtggctcacacctgtaatcccagcactttgggaggccgaggcgggcgtatcatgaggtcaggagttcaagactagcctggccaatatggcgaaaccccgtctctactaaaattacaaaaaaatttgctgggcatggtggtgtgcacctgtaatcccagctactttggaggctgaggcaggagaattgcttcaacctgggaggcagaggttgcggtaagccgagattgcaccactgcactccagcctgggcaacagagcaagactccgtctcaaaacaaataaacaaaaaaattagctgggcctggtggtgcgcgcttgtaatcccacctactcaggaggctgaggtacgagaattgcttgaacctgggaagcggaggctgcagtgagccaagattacaccactgcactccagcctaggggacagagcaagacttcgtctctaagtaaataagtaaatatttactatctctttccctacagatttttatctgttttgttcacctgtattccctatacttaaagcagtcattgataagtattaatcataaatattccataaatagtctatgaataaatgaataagttatgtaaattactatcaaaagtactggcccatattaacataataacacttatcagttattatgtacctaaggagttttaagaaggtttagtccaactgctgtaggtgaattatctcatctgactgacaacaatccatacagtaggtactaaccagagttggaaaggttaggtaacatgtttagagttacatagtaaaaggcagttagaagcaggacccaatctttccagttccaagctcacatagtttctgcaattatactagttcacctacttgcgcagcagatcagtctttttttttttttatttgagacggagtttcactcttgttgcccaggctggagtgcaatggcgtgatc

SEQ ID NO: 916492 - DNA, 4001 bp, Homo sapiens
agccatcaccatgacagcagagcaaatgctgaacatattccgagtgcctgtttttcgatcactgtcatggaggacaaggagccctaggcaagccagtgagtgcagaggtacccggaaccagttgagtacaccagcctgctctgtctcagggatcacctttctccgtaggaagctcatgctgggaaagtataatccacaagccaactcaataagtagaaaggctatgaaggactccaccggactctcctggcctgggctggtagagaaagtcaacatgaagagagagaagacgacgatgagcacagcaagggacagcaggtgcatgggctgaaggtggtacctcttggaggtggcgatacggtacagggaagagccaagcaggctggctgccatgaagctggagaagataatgcccagaggggccccgtgtgggtccagcacaggtgtccagaggaagacaaagatgaagatgacactctcaaatagagcttgtatggtgcccaacagcagcacgcggcggtccgacaggaggcagcgcaggcctccagcacaggtccttgagaaggcacgctgccggtcatagttctccccccagtttcgaagggccaaggcccctgccagagccaggagagggatggcagccacaaagggcgctacaggccccagccctatccagctggctacagcctcagctgccacacctgccactacagccagcacatggttccagaaggcagctcgagcaaaggtagctgggatccactcagcagggaagtcatgccgttccacgtgctcatggatataccaggcctcgaaggctgagaagagcagggctgtggacagcccaccaagtgctcgccccactagcagcacaaagtagtcttgagagagtttggttaagcagcatagtgagtaagtcagggagaagaggacacaagaattcttgcgacccagccaatccacaagggaggaggccactaggccaaagaggactgtagaggcaaggccacagacatagaggatggcaatttgaccttccaggaagtagtaatgctggtagagtttatagaggtagggggcctgaagccaatcagctgccagggccaggaagtagacctgatagaagtccagttgaaaccgaaggaaggagggattgctgcaggcccttccagggggtttagcccggcatcttgacagttccagccccaggcaggaggccaggaggcctacaaaagcaaggtaggcagtcaccagcatggtgggcccccggacgacctgggaagagaggtgggagtcagagccatatccatccttcgggcagcacggtcaaggggctgtcttaagcagatggcagctccacccaaccccgctgccaactccactccccaagatctcagaccggagggaccagttgggtgggtgggaggagtggccacgccaaagctgtctcctaggacactgtggggcagggaggggtaagaagacaggggagaggactgggcactcaacccatccttgcctgtgaagagggagtccctttcaataatcccgctcccgcaaattctactgccctttcccacagcagctcccgtacacttccttctattacctcccgtcctcgctgcggagcctctttttgccctcagtgtctcatcctctgtcccgggcatccctcccacccgcgcaggcctctcgagttgcttcagggtcatgcgtgtgcatctcagaggcccactcctccaggtcactggcaccccactgcgccccctagcccctgcccagccctgccacatccacttgcacctcgcccagactccgcctcacctgctgccccggtctgcggggacgccccggacacgtccggctccaggccgccaggccaccctccccgctgtggctccggctccggctcgggttccagcagcgctcccgcccctcacagcctgcttccgggagccgggcaggcctctggccgccgccatgatggcttcatcacgtgacgggggcgcggcgccaaaaccccgccccgccccgcccgcccgccctccttcccttacccgggcgcggaactcctgacgcctggggtgggtcgggaaggggcgaccataggaggctgcggttgcttctcctggcctggcctcgctcgctgccatcccgtgacacctgctcctctggctcttggatgcctgaggggccaccctgaaataagtgccaattttcttttcttccgtgcagtgctcgggaaagatgcccgcagtccggtagagccaagggttggagcttcctaaggaacagcaccgctgcccgaagccgagaaggtctccttggtttgcctcctctcccactgcagtgacctccatgcaagagaagccagtatggtccagacacctgagggaggcggtgtggtgtaaagaacttggagtcgggctgcagacagactaaggcgcagtcctgcccctgtcacttaccagctgtgtggccttgggcaagccgcataacttcccagtgtcccagtttctttgaagtcacaggatagcaatgcccaaataaagaaggctaaagttcagtggcagcatggggttaagaacttcagccttggagcttaattccctaccttctgccacttacaagctgttttaccttggaaaaactatttaacctctctacagcttccgtatcatctcctcaagagcctccaatgacttcccatctcactaagggtaaaagccgaagtatttataatggcctacaagaccctctgtcctctgaccctctgccactcctctgacttcatcccctgctcctctccctcccatctatgttggctaccaccagggcttttgcacactgttccctgtacagttcttctccaagatatccacgtggttcccccccccacctcctccagttctctgttcaaatgtcacctgatcttggctgggcctggtggctcattcctgtaatcccagcagtttaggaggctgaggcaggccgatcagttgaggtcaggagttcaagatcagcctggccaacatggtgaaaccccgtcgctagtaaaaaaatataaaaattagccaggcatggtggtgggcacctgtaatcccacctactcgggaggctgaggcaggagaatcgcttgaaccagggaggcagaggttgcagtgagccaagatcacgccactgcactccagtctgggtgacagagcgagactctgtctcacaaaaaaataaaaaataaaataaaattttaaaaaatgtcacctgatcagaggggccttccatggccctcctgtttaaaatagcaacaccaccacctccagcacagtaatctacctactttccttccaattttctattctctctgctgcttttactctgcagtacactatgtattttccttgtttatttatttactatcttggccaggtgtggtggctcacacctgtaatctcaacactttgagaggccaaggtgggtgaatcacttgaggccaggaatttaagaccagtctggccaacatgtcgaaaccccatgcctactaataatacaaaaaattgctgggcgcggtggctcacacctgtaatcccagcactttgggaggccgaggcgggcgtatcatgaggtcaggagttcaagactagcctggccaatatggcgaaaccccgtctctactaaaattacaaaaaaatttgctgggcatggtggtgtgcacctgtaatcccagctactttggaggctgaggcaggagaattgcttcaacctgggaggcagaggttgcggtaagccgagattgcaccactgcactccagcctgggcaacagagcaagactccgtctcaaaacaaataaacaaaaaaattagctgggcctggtggtgcgcgcttgtaatcccacctactcaggaggctgaggtacgagaattgcttgaacctgggaagcggaggctgcagtgagccaagattacaccactgcactccagcctaggggacagagcaagacttc

SEQ ID NO: 916493 - DNA, 4001 bp, Homo sapiens
ctcctttagcacattgtttgagattttcggaagagtcagttgtaatttttaaaaatagaaaagagagagagaggatgttaaatcactgtatcctctgaaagtcataagccatcgaattgtaaaactctaagacattcaggagtgtatgtagtttcagagagtgcacttctgtaggtttaaattagagctgtgagttattgggggagaaaccagactgggagcaatctcacttttttaatgctttaaagtgagtggagggaaaaggttccacaaaggagagaaagcttgccaaatggaggaatccgtagggaaattttaatttaaggccctgttcctcaattcctgtaaagttcatgaaaaaagaagtacttaaaagtctctttgaggactttatactcttttctcttttccatttttttgccttttacaatccctgtgaggaaaagagaaaatgcacttaaagttacgatttgggtgactcaatccttccctctttcctttgttctaatagtctttcaaatgctccaaagaaattagaatacacttaacaagtgctcttgtgaagcttagccaccacttcctctcttgagcctgtattaacccactgaagggaacacaaactctgtgttccagtccatacagcagcaggtacaccatgctccaggtcaaatatacaccatgctccaggtcaaatatacctgctattctaaccatttttatagtcatttttaacacagaaaaacagcaacaatatgatagatttcattgagcctattcacacaataataaaacattaaaaaaagctcaagagccctaatactacatgtttataagatcactgtgattactatatgcttcttttctattctacactcccattctctctctgatacagaacatacacacacacacctttaacttttcagaaacagacacggaagtcacctttgctgttctaagatatcataagtataatgggataaatttcagtttcgaataaggctttctcccattttatcggttctgttgatattcagaagtttttcagtttttagcattttgctttgctaaacatttcttgtacttctatgaaaggcattgaggttttcactaacagaacaaagttaaataataattttgtagcataattaactgaaactgtagcaatcaattttagtaaaatcctttcaaactcaaaaatagatatctgtaaggcaaacaattatatctacataatattatcaaaaagacttatactgaagtttctttaaattaaatactttcatcattcaaatatttatgtatcatacgcatccatgataccaaaataaatacaagcatttgagacaaagtttgtattttggaaaatataaataaaatactatgattgttttaaaagattcaaaaatacatatgggtaagtgagtttccaaagtacatatttttcttcattatatattgcagctacaaaaggaaaatcctcaagagaattaatatgaacttatgataatgcagcctgcagcacggttttgttgtgattttttctgtttttgctgacaatgcaattcaaactatattctactaatcttcagtaaagggagcagattatttcacctataaacatgcagcaataaagtgtcattcttcagtccatacagactacttaacatctttctctttttacaggtttggatccctagctcattagactattacctgataaagaagagagggtaatgaattgagaaaataactacgtaccttcagagaaaacctgcccgataacaataatccattagaaaactggcaatatcctctgatctattgcccgcaaagccatgacttgatggagagtttcattccctgggctcagttctccagaagaaaatcagcacaatttaaatatttcttggaatgtgacagctctctagatcccgggttgcattctgttccccagggatggcaatctggtgttcctgtgtgcatagagcagtgaagatgaattgaaaacgcttgagataaattaggaatggctaagttaaaattgtctctgctccagactctctcatctgcagtctgcaagcctgtttttctgtgaaaaagctagatggcaggctgcctcagtaagttcttcttaagcgacagagagcattttcaatgaagaaaaattctcccattatctaagctaatgtgactgctactaaatctagtttttaaagtgtctgctggcatgaaattcattttcactattgctttctttcaaactagtctagaatccacactatcaggctatatacagttctatctgacagaaatatttgaagttttctctttacaaattaaatcatatctcttttttttcagtttattaatcatctatgtataggaaattttctctttgggtccaaaagacagtttattgtattttatattatgcagaagattttaagttgcagtacctcaatatgaattcttgcatttttattaccaatcacttattttaatgcagattcacagagaagagttatcatttttagatgtcagtcaaaatgcagaagttatatagaaatagaaaagaggaatttctaatcataatatgtgaccacagaagtgaatattaactctttgaatatcctcttcaagaaaatatgatgttccaaataaaactaaggttcataaatcatttctcttctaaataaaaatgagccattttgagttctgttgatttcatttcagtgacatgttgtgatatgacagttttttcttttcttttttttttttttttttttttttgagacggagtctcgctctgtcgcccaggctggagtgcagtggcgcgatctcggctcactgcaagctccgcctcccgggtacacgccattctcctgcctcagcctcccgagtagctgggactacaggcgcccgctaccacgcccggctaattttttgtattttagtagagacggggtttcaccgtgttagccaggatggtctcgatctcctgacctcgtgatccgcccgcctcagcctcccaaagtgctgggattacaggcgtgagccaccgcgcccggccgatatgacagttttttctctaagttagaaaattcttttagcattttcataatattctggatttgagatataacacaaatacactgtaatagatgtattggcaatacacaaacactgaaagtttatcaaaatgttttattctacttcttcacttgtatttgttacacaaaacgattttcacataatcaaaaagcacacttaaaagcatcatagtccatgagaatatgtacattaaaaaatccctgctggctataaaaacaatctcatgcttgccatagctttcaacatgatgatctgtaatgctctatgtctatttgacatttaagcaaattgttgcttccatgacaaaaatggggtttccacactgtgagagaaacaaaaacaatataatcacctgacagtcaacaaaaaagtaaacaagaatttcccttttttctctacccaccctataactgtagctgaccacttcactcaaggaggtacagaggaaaagaaaatggagaaacaaaacgaaacgccacagcaagatgcctccaatccttctacctcttgagaagtagcatcactgtagctatttctgaataaacacaaggagattggaaagaagcagcttcagtatttcagttggaaactaaaattatccagcatattttaaaagaccattaaagaaagaaaggaagcaagcaagcaaaactatttattggcctcaaatgctatttctaaaatgtccatggtgttcagcgcctatgatattaaaaacaaaaatgtaaaaagataaaagtctatttaataattgacagttgactgaatatctaactgcattgcactaatgtgcattgagtacctcaattaacataataagtaactacagcagtaatgagtttttttttttttttttgatgtctcagatgtctatctccacctagaat

SEQ ID NO: 916494 - DNA, 4001 bp, Homo sapiens
ctcgttttccatctgtgcagttgacgtggtgccaatttaaaatttccaaatgagattttatggcttctaaatatgtcgcctgtagcttaaatcccatattgcactacttcaaacttaaaaaattgctcctttggcaatttttatagtcattagatttaaaaatttactttagttttccaaaagaggcccccttttccctccctgttatatatctttccatcttgtttatttaaaaataagaagaggttctttaatgcaagggatttgaataaagaagttaaatattcacttactaagttcataagattccatgctttcatgtgattctgaaattaaaaaaaaaagattcattatatcaatatttatccatgattcattatgttattatttatcaatttagacactgtgatagtttaaatacagggatggaagaagaggaaagagtctaaaaacatgaagaatatatttagcagtgtggttattagaaatttcaggaatttaggatttatgaggtttttctctagctctggccttgctgtggatatctctatattttagtttctctgatgttgaaggagggagtggccattttcagctaaaatttcccaagggctatgacgtcttcagacaagcaaaataagacactttaagtgctgtacagaagtctccagagaaccttcttctctgatttattcagagcctgtttgagaacagggtcaaagaggattaagaaggatccagaagacagccaggtttctccaggcaagagaactacagggcagttgctctgctgggcttactagggcaggtttctaagagggttccgaaagcctcttaagaacctgtgttaaattggcagccacagaaaccactagctccagctgacagctcaccctgggcacgatgccagttcagagagagaactgaaacgatatcaaagccgaagttttcttctttctgccactctcctgagcacagcagataaattttggaataagaagcttctattaatatttgccagcaagtgaattttcttcaaaacttaaaaaggaggtgaagaaatcaaatcctctaatacagaaaatttgtgaatacaagagtgagaagcataatctttatggttgttaatgtaatttaaattttaaaacaatgaaaatatctaggtaattgaaacaaaagactgaaataagtaaataactttgcttcagatttccttttataagctttgaacaaatgcaggtatatttaatgacatatagaaaacaggcaaaatttattttctgacaacaggagttatgaaaatgattcttttctaaaattcttttgatgtaaaactttattttaaaattaattaactgaacaaacatagtaagttcatgagattgtccagtccctagaaagggctatacttaatacttcacataaaaatggattttctcaaaggcaagtggtttaaacaatacccttaacccattgataccaaagtctaaataaatatccttaaaaatgaggatgcagggggctgggaatttggtatcttctttctgaaatatgagtttctagatatacagagacttaccactgaacgggtttgcctgttaagttgcataagactctggatatttaggatataaaaaagacttaatagaacagatcagtttctgcggagactgggaaatgtgaaagtaatggtactttaagattataacagagaaagggggaagaagaggaggagggagaggaaaaatagaagtaagccaaagtcagaggcagaaaagtaaacacagagaaatgggagaaaagtttctcaccataacacaaagttactaccgctaaggcggccaggatggcaagaaggatcaggctcttcatggtttcgtcctgcaggtcagtctcagggtcttgtgtagcagcagtagggagagaggctcctacgggatgttagtggaaggctgtgaggtttttataagaaccagagcagttgagaggggaggaaccagtgggagagagctggagaaggtggggaagggttggcactgaactagcattggaacttttcccaaacagtcattccttccagatattatctactctgagtgggcagttttccctaactgctggacctgactgtgttacacaggatgctgctctggtgcagaagttttggccatcgtatgcttggggacagacctgggcaaaagcccacagaggaagttgccacaaacacatgatctaccctcctggccctgaccgcagggcttttgggtttggtccacagacagagccctagtgttctgtttgttaccctgattgattgatgagaggttttgggggagaaaggacttcactttcttttcttttcttctttttaacctttgcctcttcttctaggagaacttcgctttctacactgattataatttagacatcttcccagtagggctgaatcctagaccaatctatcaatcccagactaatcaggcatttgcctggggatatgcatctttggcatttttccaagggttcatcaggatggagatatccggtgcaccatgagttctgtttccttaatcaacaccgttgtaacttgcccatccagttttgtgacattaattcaaacctgtgccctagtcctcttttaggcagcgtatcagtgctggaaagtgcagcaaggataagagggtactgttctctcatttctgagggcgttgtctcgataattaactaacttgatagactttttagtgagtggcaggtgagatgcaaggtactgtgctaggtgctgtgggggatgtacagacaaacaacacacctccctaaggaggtaagtaatagctacttactattcactttgctctttcactgtaatgtatcctcaagcacaggttttcactacaccatcaggcccagaagtactagcttattttccacaggaggatttcagtttgatgcctctggttatcttgtatagagaggtcttttctttctttctttttttcccccttcttttgcaatcacaaaatctgtcctaccagatgtgcctctcttgcttgggaacccaatagttttctttgcagacaacagacttgaagtcacagagcagcagattgtagaagagctacagcttcgggacctctgactcttgagctggaacagcaatagggctgggttgggggtggggtggatgtgtctttcaatactgatgtatttcaaggagcagtgatgaactaggtggagcctcatgcttcattctttttgtcttgttgggatggagtttccctcccaccctccatcctgtgaagagcttttataaatattaacagagtccccattaaaagaaatagctcctttgaaatctgaaagattgagttctgagggatcaataaaattcaagttttctctccaaaacctaagaaatagattatctgtgcgaaaatcttaaagaaaatctcagaaagaagaccgtgtatgttcatccttgataaattcaaccatcacaatttccactaatgagactggcggttgttccactctttaaaccacaacctactatgagtgttagtttcagtgtccatcttggaagatgaatcatctgaatcattacatgatcaatgaataatttaaagtgcgaaagccagttcactatattgcatgactttggggggacaagctagccatagataaaagttttatacgtacttagcttagtaattaaccaccaattaatataacatcaaacaagttgaattccaatgtttcacccttaaaatgagtagtctactctccccatccccactccatctccagaattaaagagaaatcttcccattttcctgctataaatatgtgctttgcaatgtacattagctctgtcttttccagccaagtcatagatgtctcctttatccccaagttcaaatgacaactataatctttcaacctctgacatcacaattgtttttttatttttacactcccagaaactaaacttgaaaatccta

SEQ ID NO: 916495 - DNA, 4001 bp, Homo sapiens
ttttgcatattttatctcgcttgacccgaaaaatcctgaggtagagcaaataatatttttttctacctttagtatgtaaggaaattaaggcccagaaaagtagtgagtaatatgacccaaattcacagtggagagaccaagactgcaacttagttttctcaagtgtttacctctgggctacccaccatcaaggctaagaattctcaacagctctggtcttctggaggcctttccttgtcaaatctcattcctgttttctacccctccccccaaacccccgtactatctagcagagaagaatcttcacttctcagttgaggaacgccctttccctttacaggcttttggccaaaatgagcaaagttctcttctcaggatgaggtggccagcctttctgcatcaatattgtgaaacacatgaataatctgggcacgcatccccagggccatgactctgcaattttgtaccttctaaaactaacaaacactacacatgagataaagaaaaaagataattcggtggccatgttgcggatacgttaatctggaactctagatgaattctagcatttcctgaaggcatcgtggtggctgcagactcagcccactatgtggtctcatgcaaagtggggttcagagcccagaggctgcaggtgaaatgctggtgcctctcgggagagtggtggggtaaggcctttctctgtgctgacctgacctccttttccaatctcagggattcatagacaccactctaaaacaaagcggtagaaaaattttactcgtctgccagagagggtaatatccaaatttggactgatttgccttttttttttttttttttttaattaccaaagataatcgcacacatagccctcttattttggaaacagcagaggacaacaaagtccagtactatcctaaggccaagaaaagcatatgcaaaaggtaggtgtaggctgggactcacagcaggctgggaccccaggaaaactgggctttaaggattgctcactggaggcctgggtgctatacagcaatgcttgcgggcacccactcagcactcactgggtaagaaattagggagaagaaataggggaatataaacgtggagctcagactgccacatttcaagagaagcagagagactagaagatttacatgcactcctctctcctctgtcccaagccagctagagcaatatatgacaccttaattcccgaaaaagagagttcccttctccttttctccttccacatggcttcctcctccagactggggaagtggggcacaggtgagaaccgtcccaaggggctcacccttagctctcttgtcactggctataatatcacacaaaaatattatcatctaacccacatcctcttgtttcgatagctagcattattagcagtagtattatttagtattattttaaaacttgctgatgtttctcctatcaaagtgaactcagaagagcaaatcctgccttacaataggcataaaggccactatgcccatgaaacctgagacatcgcaggcttttgcactcttggggagaacagcagtcgttcaaactacaggcatttcctccattactacacgtgccttttcctccttccccagagttcaagggaccctttcaaacaggaggttactttgacttgaaaaggctaagtttggaaatcatcactcaagcatgaaaagactctctcgtttcattcctggagtttgagaaatgggaaaacttacccgcacggggacagaaatacaattccctttcaaaagcgatcgattgaaaagctaagtttagctgctaagtggagccaagcacttccagctggcagagacccccccaagtcttccatctgccacccaccctggccctccctgcctgccaccctttgcatgcggtccccttctcccctcccagtacgcacggtgaggccgaggaggaggaagcagcaagcctgtcccgccgccgggtcgcgcgcaatgcagggactgtggccgcgcgggccggacgcaggcaccgcccctctccagttaatctcctgttaattagccctcccacgtttaaagcccgaccccaacctcgccaaacccctcctctaaatcacctgatttacccgcccacagtaaccatcgcctgctgattccctttgagcccttctatttggcgcccttagaaactctggttcctgaaatgccaactcccctaatcagtgggaagggggacagtagccattgtctaggaactctgaattctcgaacatttcaggatcagcagagttttggaagttgtttttaaaaacttcgcagaaagttaaaatctccagggtagaactaattagcaggcattgacaatattaccttcccttagacttcacctcccctgcgctggtggcaaggcctccttaaaaggctgacaatgacagaatgtaaccctcagtaaagatcacttacggtgttccaaattcatgataccagacaatttgctttgtcacgatgtcccctcctgttcagggtccagaatgaaattggaggcaattgtactggatcagctcattacacaatcagcttagtgtgttttttacagggaggtttagaggaacgtttacggaagccgtagatatttagcctaccatcactatctagattagggatacttccaagcttcctagtccccatagtccccacaatatttatggatctatctttcatgggtttatatgagaaatgtttaaggatttctgttttcaatctatattatttctctcctagtgctatatctcagacactcaccacctgttgcaaggtctacttcctttttttgctcttaatttactcctttaggctttaaaggatatccctaggactaactttctaggatgtgatggacaagttcatgttctattaaagaaagaaataactaccagtttgctctaggaacagaaattaatccaaggaaggtctgagaatgatttctatataagcataacagtaggagttttggaaaatctagcatcagaaggcatctgttcttcacttttatgtctgtatcttttcaaaactctacttattcacctatctttgtaaagtatactagaatctgtctgtaacattaactggaataggatagaatttgagatgacataaatctattctgaattctctccaaaggagtttggtattataagaatttaagactctcttcatttattataaggtgatacaggccaaatcttatggataacatggcagaaaaaggaagaggagagctactgtttagataatttggtctacagaatgctagttgaatggttctaacatttttttttttttttttttgagacggagtctgcctgtgtagcccaggctggagtgcagtggcgcgatctcagctcactgcaagctccgcctcccgagttcacaccgttatcctgcctcagcatcccaagtagctgggatcacaggcacctgccatcacgcctggctaattttttgtatttttagtagagacggggtttctctgtgttagccaggatggtcttgatctcctgacctcgtgatccacctgcctcagcctcccaaagtgttgggattacaggcgtgagccactgcgtccagctggttctaacatttttttaaaaaagaaagtagcacttgactcatctaatgctctaaatatagaatgtgttcaaactattaattgatcaatgaataaatactgagttcctactatcactaaatcacgaacaattattgcctgttacatacatatatatatgtgtgtgtgtgtttgtgtgtatcaggcaatattatatatatacatacggatatatatatgacactgtattgggtagaatattagcagttggtttaattgaataaacatttattaaatgaatgcaatgtacttggtttgatgctaaaatctaaaactaagataaataacgtcaaagagctgtcctccaggattttacaatctagtaaacacaaaggcca

SEQ ID NO: 916496 - DNA, 4001 bp, Homo sapiens
ggccaacatggcaaaaccccatctctactaaaaacacaaaaatcaactgggcctggtggtgcgtgcctataatctcagctacttgggacgctgaggcatgagaagcacttgaacccaggaggcagaggttgcagtgagccgagatcctgccactgcactccagcctgggcaacagagtgagactccatctcacaaaaaaaaaaaaaaaaaaaagtaacaaggaaacaccttagggaagactgtgacctatagataaaatcaaggctctagaggacaaaactcaggacaggtcctaagagagaaacagatggtctccaggaagaagttgctgaatgagcacagggactacccccgtgaaaatattttaattttgtaaagggaacctcgctctacgcgcttcaagcacgtataaaccctgcttgaatacataatatgtgcttcagaatctgtctaccaccctccccacatctgcacttaaaaaaaaaaaagtcattcttataatgctgggtagaaatagtatccacttaaaaagtcagaagtacacaaaattcaaaaggctcatatatgaggctcactttgaaagtaagactttaattctcagcctttttcttctttttctttcttctttttttttctatttttttttaaccaaaatcatacccttgacctgcactagagctgaaaataccagttaactgtctagaaaatgattgttttctaaaccctcattggcaaaattaattccaaaatgaaagaaagtttccgtgaaaactttgatattccagaatatctcatctgcttagcagaatgataaaaaggtaaaagccataatgaaaaaaccatttactagtttctaggagaaagcaactgttccataaatacatcagatccatctgtgccaaacgatggcatacttcacttacagcataaaacagtgtgctattgggctttaccaaaaataaaaaaagaaaattaagaaaactgctctccagaattccaactcttaaaagtaagaaaatattacctccaaatttcttacctttcttgtcaatctatagaatgcagttgcagtactcataagcatcatttttgaaagaataattgttgcataggatgcaaaagccatgaatacttcatcatccattacctgggtgaggtcaaccattttttcaattttggtctggaatcttaaaaagatttaaataaaatgggaaaaagcagacataaatacccaaaataactggaagatcatttgatgttcttatattgcagcattaattatactgttcttaaaaatatcttggactatttgcagaagaaatgattgtttagtttttaaaatgtcaaagtaaataggggctgaacgcagtggcttatacctgttaatcccagcactttgggaggccgaggctggtggatcacttgagatcgggagtttgagaccagccagcccaacatggtgaaaccccatctctactaaaaatacaaaaattagccagacgcagtggcgtgtgcctgcaatcccagctactcgtgagactgaggcaggagaattgcttaaatccgggaggcggaggttgcaatgagccaagattgcgccactgcactgtagcctgggcgacagagagagactctatctcaaaaaaaaaaaaaaaaaaaagtatgcaatattatattttatctagttctatattatttagcttgaagacatcaagcaagtactacttgaaaaaaaagggtgcagtataagcaaaaataaatagcaaaaatgccctaaacatagactaacatcacatactagcactgagattaactataagtaggttgaaagcaaaagaccagaggtcatagactgatctctttggaaacatcaagctatgtacctagcagcagcactgaacttaggaaggcctcagttcttatgtatcctgctttggagacccaacttacaacttgtcatttcagtagtattcaaaactgtaggctttaggacttgaattccagtcccacgatttagctgttaaccttgcttgagggattcagtctctgagactaaatttcttcattcttaaaatcgaaacagtaggcctggtgtggtggctcacgcctgtagtcccagcactttgggaggccgaggcgggtggatcacgaggtcgagagatcaagtccatcctggctgacacagtgaaaccccgtctctactaaaaatacaaaaaattagccgggtgtggtggcaggcgcctgtagtcccggctgcttgggaggctgaagcaggagaatagcatgaacccaggaggcagagcttgcagtgagccaagatggcaccactgcactctagcctgggtgacagagtgagactctgtctccccctccaaaaaaaaaaattgaaatagtaatagcttctaacttaatgggttattgtctaatgtaatggagataaaatatggactggcccaagaaaaaccctcaataaatttataatatccttatcacaattgtcatcatgatcaccatcatcatcaattcgaagacaggtaaagaaggagaagcaggataatggaaacatcaaaaaacaggcttgcaaatgcaaggtaaggaattaccatatatggtactttcatgggtgtaatagggaaggagaattagctttacatgatccttgagtcatttcacattccaaagttacattcaactaaaagccgttgagtagaggaatgtagttatctgtgtctggaattggaagtataattgggaatgtgctgaagaggaaggccaagacacactggtgatactgaagtcaaaacaggtaggaacttagggtaaagcttaaaatgtacatttccagtcctctgccattattctttgtaacctcctcttgttcttttatcagccctgctatctacttctctctcttccacagaacacacacaacttttctcagacccaagcttagaggctatttatcctgcttggcatgtagtactgtctcttctagatgatgttcattcctgcctttaaagctcaacccctgcattgtgtccttattagcctgacacctatcagctgcaatctttctatccatcttaccagtaatctatacatttatatgtatctttattggtcatatagccatctttgtgttgctggtgaatgtgattaaaaaccacatacatatatacttagctttattagagcttgctatgtgttcaactatactatgtacattatgtacactactttcatcacctttgttaatctattacaattgtcataactatacccatttcacaaaagaagaaaaagggaattagagttgttaagctgccaagctgggacacgaacaccccatacggttactacactatactctctctttcaagaggcttgattaattctgctctcaactctttaattctgcttaattctaattcaattgacattaagtgaatgcctactctgtggctggcacaagtaggcaccccttatatctgtcatcttctttctttttccagttatgtggtgaggtattaaaattcccattttgcagataaagaaatcaaagctacctaagtaacccctatttttgtttccttttcttttctttttttgagatggagtctcactctgtcgcccaggctgcagtgcagtggtgcaatcttggctcactgcaacctctgcctcctgggttcaagccattctcctgcctcagcctcccgagtagctgggattacaggtgcccgccaccacacctggctaatttttgtatttttagtaaagacggggtttcaccatatttgtcaggctggtcttaaactcctgacctcaggtgatccacccgcctcagcctcccaaactgctaggattacaggcatgagccaccatgcctggcccccctatttttgttttcttaggctaaaaatatacagcttggatttaggcaaacagaaactacatgcgcaaggtttttaaaaaatcccctagatagcaaattaatcaacctc

SEQ ID NO: 916497 - DNA, 4001 bp, Homo sapiens
tgcgagaccccgtctcaaaaaaaaaaaaaaaaaaagaagctctgggacctgttaaatgctgtgtgtttggtaaataaaaaacttccgactttggcgctgttctaggcactgaggattttagaattttcaaaaagcttttgcatattttatctcgcttgacccgaaaaatcctgaggtagagcaaataatatttttttctacctttagtatgtaaggaaattaaggcccagaaaagtagtgagtaatatgacccaaattcacagtggagagaccaagactgcaacttagttttctcaagtgtttacctctgggctacccaccatcaaggctaagaattctcaacagctctggtcttctggaggcctttccttgtcaaatctcattcctgttttctacccctccccccaaacccccgtactatctagcagagaagaatcttcacttctcagttgaggaacgccctttccctttacaggcttttggccaaaatgagcaaagttctcttctcaggatgaggtggccagcctttctgcatcaatattgtgaaacacatgaataatctgggcacgcatccccagggccatgactctgcaattttgtaccttctaaaactaacaaacactacacatgagataaagaaaaaagataattcggtggccatgttgcggatacgttaatctggaactctagatgaattctagcatttcctgaaggcatcgtggtggctgcagactcagcccactatgtggtctcatgcaaagtggggttcagagcccagaggctgcaggtgaaatgctggtgcctctcgggagagtggtggggtaaggcctttctctgtgctgacctgacctccttttccaatctcagggattcatagacaccactctaaaacaaagcggtagaaaaattttactcgtctgccagagagggtaatatccaaatttggactgatttgccttttttttttttttttttttaattaccaaagataatcgcacacatagccctcttattttggaaacagcagaggacaacaaagtccagtactatcctaaggccaagaaaagcatatgcaaaaggtaggtgtaggctgggactcacagcaggctgggaccccaggaaaactgggctttaaggattgctcactggaggcctgggtgctatacagcaatgcttgcgggcacccactcagcactcactgggtaagaaattagggagaagaaataggggaatataaacgtggagctcagactgccacatttcaagagaagcagagagactagaagatttacatgcactcctctctcctctgtcccaagccagctagagcaatatatgacaccttaattcccgaaaaagagagttcccttctccttttctccttccacatggcttcctcctccagactggggaagtggggcacaggtgagaaccgtcccaaggggctcacccttagctctcttgtcactggctataatatcacacaaaaatattatcatctaacccacatcctcttgtttcgatagctagcattattagcagtagtattatttagtattattttaaaacttgctgatgtttctcctatcaaagtgaactcagaagagcaaatcctgccttacaataggcataaaggccactatgcccatgaaacctgagacatcgcaggcttttgcactcttggggagaacagcagtcgttcaaactacaggcatttcctccattactacacgtgccttttcctccttccccagagttcaagggaccctttcaaacaggaggttactttgacttgaaaaggctaagtttggaaatcatcactcaagcatgaaaagactctctcgtttcattcctggagtttgagaaatgggaaaacttacccgcacggggacagaaatacaattccctttcaaaagcgatcgattgaaaagctaagtttagctgctaagtggagccaagcacttccagctggcagagacccccccaagtcttccatctgccacccaccctggccctccctgcctgccaccctttgcatgcggtccccttctcccctcccagtacgcacggtgaggccgaggaggaggaagcagcaagcctgtcccgccgccgggtcgcgcgcaatgcagggactgtggccgcgcgggccggacgcaggcaccgcccctctccagttaatctcctgttaattagccctcccacgtttaaagcccgaccccaacctcgccaaacccctcctctaaatcacctgatttacccgcccacagtaaccatcgcctgctgattccctttgagcccttctatttggcgcccttagaaactctggttcctgaaatgccaactcccctaatcagtgggaagggggacagtagccattgtctaggaactctgaattctcgaacatttcaggatcagcagagttttggaagttgtttttaaaaacttcgcagaaagttaaaatctccagggtagaactaattagcaggcattgacaatattaccttcccttagacttcacctcccctgcgctggtggcaaggcctccttaaaaggctgacaatgacagaatgtaaccctcagtaaagatcacttacggtgttccaaattcatgataccagacaatttgctttgtcacgatgtcccctcctgttcagggtccagaatgaaattggaggcaattgtactggatcagctcattacacaatcagcttagtgtgttttttacagggaggtttagaggaacgtttacggaagccgtagatatttagcctaccatcactatctagattagggatacttccaagcttcctagtccccatagtccccacaatatttatggatctatctttcatgggtttatatgagaaatgtttaaggatttctgttttcaatctatattatttctctcctagtgctatatctcagacactcaccacctgttgcaaggtctacttcctttttttgctcttaatttactcctttaggctttaaaggatatccctaggactaactttctaggatgtgatggacaagttcatgttctattaaagaaagaaataactaccagtttgctctaggaacagaaattaatccaaggaaggtctgagaatgatttctatataagcataacagtaggagttttggaaaatctagcatcagaaggcatctgttcttcacttttatgtctgtatcttttcaaaactctacttattcacctatctttgtaaagtatactagaatctgtctgtaacattaactggaataggatagaatttgagatgacataaatctattctgaattctctccaaaggagtttggtattataagaatttaagactctcttcatttattataaggtgatacaggccaaatcttatggataacatggcagaaaaaggaagaggagagctactgtttagataatttggtctacagaatgctagttgaatggttctaacatttttttttttttttttttgagacggagtctgcctgtgtagcccaggctggagtgcagtggcgcgatctcagctcactgcaagctccgcctcccgagttcacaccgttatcctgcctcagcatcccaagtagctgggatcacaggcacctgccatcacgcctggctaattttttgtatttttagtagagacggggtttctctgtgttagccaggatggtcttgatctcctgacctcgtgatccacctgcctcagcctcccaaagtgttgggattacaggcgtgagccactgcgtccagctggttctaacatttttttaaaaaagaaagtagcacttgactcatctaatgctctaaatatagaatgtgttcaaactattaattgatcaatgaataaatactgagttcctactatcactaaatcacgaacaattattgcctgttacatacatatatatatgtgtgtgtgtgtttgtgtgtatcaggcaatattatatatatacatacggatatatatatgacactgtattgggtagaatatta

SEQ ID NO: 916498 - DNA, 4001 bp, Homo sapiens
agaaaaaagataattcggtggccatgttgcggatacgttaatctggaactctagatgaattctagcatttcctgaaggcatcgtggtggctgcagactcagcccactatgtggtctcatgcaaagtggggttcagagcccagaggctgcaggtgaaatgctggtgcctctcgggagagtggtggggtaaggcctttctctgtgctgacctgacctccttttccaatctcagggattcatagacaccactctaaaacaaagcggtagaaaaattttactcgtctgccagagagggtaatatccaaatttggactgatttgccttttttttttttttttttttaattaccaaagataatcgcacacatagccctcttattttggaaacagcagaggacaacaaagtccagtactatcctaaggccaagaaaagcatatgcaaaaggtaggtgtaggctgggactcacagcaggctgggaccccaggaaaactgggctttaaggattgctcactggaggcctgggtgctatacagcaatgcttgcgggcacccactcagcactcactgggtaagaaattagggagaagaaataggggaatataaacgtggagctcagactgccacatttcaagagaagcagagagactagaagatttacatgcactcctctctcctctgtcccaagccagctagagcaatatatgacaccttaattcccgaaaaagagagttcccttctccttttctccttccacatggcttcctcctccagactggggaagtggggcacaggtgagaaccgtcccaaggggctcacccttagctctcttgtcactggctataatatcacacaaaaatattatcatctaacccacatcctcttgtttcgatagctagcattattagcagtagtattatttagtattattttaaaacttgctgatgtttctcctatcaaagtgaactcagaagagcaaatcctgccttacaataggcataaaggccactatgcccatgaaacctgagacatcgcaggcttttgcactcttggggagaacagcagtcgttcaaactacaggcatttcctccattactacacgtgccttttcctccttccccagagttcaagggaccctttcaaacaggaggttactttgacttgaaaaggctaagtttggaaatcatcactcaagcatgaaaagactctctcgtttcattcctggagtttgagaaatgggaaaacttacccgcacggggacagaaatacaattccctttcaaaagcgatcgattgaaaagctaagtttagctgctaagtggagccaagcacttccagctggcagagacccccccaagtcttccatctgccacccaccctggccctccctgcctgccaccctttgcatgcggtccccttctcccctcccagtacgcacggtgaggccgaggaggaggaagcagcaagcctgtcccgccgccgggtcgcgcgcaatgcagggactgtggccgcgcgggccggacgcaggcaccgcccctctccagttaatctcctgttaattagccctcccacgtttaaagcccgaccccaacctcgccaaacccctcctctaaatcacctgatttacccgcccacagtaaccatcgcctgctgattccctttgagcccttctatttggcgcccttagaaactctggttcctgaaatgccaactcccctaatcagtgggaagggggacagtagccattgtctaggaactctgaattctcgaacatttcaggatcagcagagttttggaagttgtttttaaaaacttcgcagaaagttaaaatctccagggtagaactaattagcaggcattgacaatattaccttcccttagacttcacctcccctgcgctggtggcaaggcctccttaaaaggctgacaatgacagaatgtaaccctcagtaaagatcacttacggtgttccaaattcatgataccagacaatttgctttgtcacgatgtcccctcctgttcagggtccagaatgaaattggaggcaattgtactggatcagctcattacacaatcagcttagtgtgttttttacagggaggtttagaggaacgtttacggaagccgtagatatttagcctaccatcactatctagattagggatacttccaagcttcctagtccccatagtccccacaatatttatggatctatctttcatgggtttatatgagaaatgtttaaggatttctgttttcaatctatattatttctctcctagtgctatatctcagacactcaccacctgttgcaaggtctacttcctttttttgctcttaatttactcctttaggctttaaaggatatccctaggactaactttctaggatgtgatggacaagttcatgttctattaaagaaagaaataactaccagtttgctctaggaacagaaattaatccaaggaaggtctgagaatgatttctatataagcataacagtaggagttttggaaaatctagcatcagaaggcatctgttcttcacttttatgtctgtatcttttcaaaactctacttattcacctatctttgtaaagtatactagaatctgtctgtaacattaactggaataggatagaatttgagatgacataaatctattctgaattctctccaaaggagtttggtattataagaatttaagactctcttcatttattataaggtgatacaggccaaatcttatggataacatggcagaaaaaggaagaggagagctactgtttagataatttggtctacagaatgctagttgaatggttctaacatttttttttttttttttttgagacggagtctgcctgtgtagcccaggctggagtgcagtggcgcgatctcagctcactgcaagctccgcctcccgagttcacaccgttatcctgcctcagcatcccaagtagctgggatcacaggcacctgccatcacgcctggctaattttttgtatttttagtagagacggggtttctctgtgttagccaggatggtcttgatctcctgacctcgtgatccacctgcctcagcctcccaaagtgttgggattacaggcgtgagccactgcgtccagctggttctaacatttttttaaaaaagaaagtagcacttgactcatctaatgctctaaatatagaatgtgttcaaactattaattgatcaatgaataaatactgagttcctactatcactaaatcacgaacaattattgcctgttacatacatatatatatgtgtgtgtgtgtttgtgtgtatcaggcaatattatatatatacatacggatatatatatgacactgtattgggtagaatattagcagttggtttaattgaataaacatttattaaatgaatgcaatgtacttggtttgatgctaaaatctaaaactaagataaataacgtcaaagagctgtcctccaggattttacaatctagtaaacacaaaggccaaaaaggtaaaaagttgccattaagcttgtggaaggaaagtttccatttagaaataagaatgacagttggggtgtgaactagggcggtaacaggtaaaagttgtaaaataattgacactttatattcatctttgttataagctcttaaatgattgagaaagagagagagttgttattcagcttagtttcgtctgggtaaaagaatggattcagcttttcaacccttcctctcaccaccatttaaattctagaataccatcttttagagaaactcaatccaagcctcagaacaagtaattccctagtaaatattaaaacagtttaaaaggtcattgatttggggtgaggagagcaaaggtcattcatctgaaaaaggaattaccacaataaagaaaaaaaaagcagactgttcaggggatcaaattagaaatatctggaagagcaaagcattggaagtccagtaatacctttgtctgtttttaaaacagacaaagtaaaaatg

SEQ ID NO: 916499 - DNA, 4001 bp, Homo sapiens
acaaactgaagcacagagtgattatttgcccatggtcacacacaaagccgataacgtattagaactggaatggggctgaggcccatctgtgctcacaacacatcttgatctctgagagcagaatttattctgctcatatttagttgtctctcttcatacccgctagttcagcaaccagtgaatactcagtgcatactccctgactaaccagagaaggaaaaatatgagcaagagcctctccttctagcaaaatcatgaatcctgctcacacaggcatgccaaactctctgacagcccccttagctgagtgctggtacagcagccaacacacgcagaaggaaagcaggaatccagcctggaacctgcagtccacaaccatccagaagggcttcaggatcttgcccctctcccttcactcacccagtggttagtgaagttcccagtgagaatggcaggagcaaaggagcgggcaggattcatgcctgcaccagtataatacatctgcaaaagagacagttgtaactgagacacccccctactgcaccccagcttctctccccacaacccacattgcccctgagagctgccatcttttctccagccagcagcaagtggagagggacagcctgcatgactctccaggggttcctgcaatggggtgagggcaactgatgccctgtctgggaacagactatggatccataggcaaagcccatgtctagccatgatacgttcatttctaccttggggtcaagaaggactagatatagcagtcacaagagagggatagggcagagttgattcctttgtgccagtagagagtgcaatggacaatgttcatgtttgacagtgaagtaggcaggaagaacccttaaaagttgggaaaggtttaggggccccggaatccttgaatgagaagttgctctccttcctgcttaccccaaagaggtgccccagggcaagggagaagccaacggccagggccacggagcccagttggccattccgcctctcgtcgtatgtggcaaagatgcagagcacgaactggagcgtcaggaagatctccactgtggttgcctggcccacgctcaccgcagggtgcaactgtgcaaaggaagaagaagagagacagctcaggagggctgccacagtgttacctcctcaagacttccccggcaaggatctcgttacggcatcaggtccgtggagaggaaggataatacaacccccttcataatcattgtatttgcatcttaccatctcctaacagtgctccttcatgatggaaatgattgcagccacttacatgtatgaggaaactgaggccttgaaaggtaaaataagtttccttaagaacctgcaaggagttggaaggaaagctgaaactcaaactcaggtttcttaattctcagtccagggccctatgccttccttaaagctctaaaccacctgtcaatcctcaccacttcaacacacacatgctcacacatgcacatattgtcccagaccccaggggagctgattcacctgcaccagtcagggagtcagggcaatagagagacaggacaccaggttccccatcccctctcagccaaccattaccgtgttgagtgctaggtttcctcggacagcaggtggggtaacgctatacagcacagcggccccagccacagctcccaggagctgggctgccatatagcagaaggcacggagcagggacatctgggagcccacaaggaaagcaaaagtgactgcaggattgacgtgggctccactgatgtggcccacagactgcaccagtgtagccagggccaagccaaatgccatagccacctgcagaacatgcaggggtccaggagcccagcgcagtgaggaccccagcccaaagaagacatagaagagggtggcaaagaactcagcgaatatggccctccaaaaggaggctgatcgcagttcccacatggcaggggggatggtcacagtgcctgggtccctgctacccccatggccttgtctgggtggacagtcccctttatagaggactcttaatccctgggaggggcaggctgaggtagcaggcccagcctcttaaccccttcacagctgtggagggctaagtcccctcccctacatggtaaaaatgctggattttcccgcctttctcaactgggagatgagccgagagagccatggcagtgagggtgggattggggtcacagcaagagagactacgagaagtgggggtgaagaacagcaggactggaagagtctgcccttctgtgtgtgtcaaaattggggttcattgtcctgattgacatcaacattagaatactcttcagctctctttggaaggtccatcaagctgagctcacttcatggcatttggggctgagctcctgggggcctcagcctcctctgagtctgccaggggtaagggttggggggagtggtaaggagtggggttcagcagggaagttggataactaaagagaattctttagttcccagggattagaagcctttctcccattggctagtttgggctggaatctgtggaccctgcagctctgggacaaaatagttctgctgcgtctggctttctctgagcccgggttccctacccccagtccatgacagcacctcccttttcaaaccctaggcctggctttttaaactacagggaccgacagagagaagacactatcatccctgcatgggctgggagtggggttggagggataggaataagaaagggactcgtagttaaaccttagaatcagcttgtatttcatctttcctaactcacatggtcatagcaagaagtactgaaaggaaggaaacagtcatggctatgaagcaatgggaaggtctaatgtcctttaatacagccatgatcagcacaccctaagccttgatccccagggaaaggtatgggtgtgctgggatcagatctggggaaacagccgatcaaagagagggaaaaggataatatggggaaggaaagtttggggaaagaggttcagttgtgctcgggcttggtgagggacttgggacctaggcgtggggttgtgtggtgatggagaaggtagaatgggacatactgataggttctaccatctccacatagtggcaagtcataccggccacaaacttttctcatgaagcaccagagagcagaaattcgaggtgaggcctgcaagaatggtgcccagcatgggtcctacccagtacacctgtggggagagagaaggaacacagatcaggggctgtgctttctcctcataatacccagcttggggatggacagaaagagagttatagtgaaggtagagggtccatctaacctatccactggcaggaagagttgctgagaacaggtcagagagcacccaaagggtttggagctctcaattacatagaagagaaacagtccactagaagtcattggaatctcctatattctagaagcctcatcagtctcctgacttaaggccctgtaaccctcagtgcatctcacccagtaatgctcccagatcccagtcaccactgctggcctcaggaagcatgcagggttcacactgcctccagaaaagttcccctggacaggataaagagagagggtagcacatcatggtgttaagagcagagattttggccacagatactctggtccaattaggtgaggataaaaagtgacagaaccagctgggtgcggtggctcacgcctgtaatctcagcactttgggaggccaacgcgggtggatcacctgaggtcaggagttcgagaccagcctgaccaacataatgaaaccccgtctctactaaaaatacgaaaaattagctggccatggtggtgggtacctgtaatcccagctactcgggaggttgaggcaggagaatcgttggaacccgggaggcagaggttgtggtgagccgagatcacgccattgtactctagcctgggcaacaagagcgaaactccgtctcaaaaaaaaaaaaaa

SEQ ID NO: 916500 - DNA, 4001 bp, Homo sapiens
aacctgtgtggtcttactcggctttattctctgcacaacagactgaataggacgatgtaaccaatgtaaggcctggtatctgctaagtgaaagaaaccatccgctcagcaccctcaccaccgctatctcaagaggcaaagtccacaaactgtctagtttcctcaagggctctttcctccctgcccacactcgtgaagaaagaggaagggtccaggatagagatagtaatgacctcctgctataaagtctggctttggctgctgttaccgctgctaaagactggagccctgagtcagctgaacccaggctactgtgatctacatgccagggctcaacaaactccaagacaaacatagaacttcacaaaacagccctgtgtcccaagaccctcacatgtgtgaaaggcaataaactccttaatataacaaactccaggacactgcaatcgacttgggaagaactaactattttagtaaaagcaagagccaaatctgggcatcgcagaaaaagaatgagagaaagtgaagagtgagtctgtctcctggttgtctggaggtggcatactgccaatttggtagcctctgaacccagcatacagtatcaatctcctagcaaagaacttccttctgaaacctgttttccaatccctccaacagaagaaacaaagattataaagctgatcttccaaaacggtggtctcggggcaacctacatcacaagcccctggtgcagaaacctggatcccagcaaaaaagctcaatctactataatcaatttcgagtggggactaggaatctgcatttttaaccagctgccctggcaattctgacacacactaactttgggaagggagcagctccgttaaaaaccactgttgcccagcaagttaagtcacaatcattttccccctaagctggaattagaactctcaggatcacctaggggaggttgtaagcattctctgatagaccattcggattcttacactggttgacccagttcacacacagccaccagcctcacgtgcaggatggcttcgatagaaccaccctctgggggcggcctgccgattctacttttaagcacacatattcttcgctcgaaaagagggcgggggaggaggctacaatcaaactttcctggcccattctcttcgaagattccttcctattctggctaagaatcaagccccgctcctgcagaaggggcaaggaaagcggccgattcctgggtcgacgagaatctcccaagaactgtctcgacaggagaagcaggggcacccatgacctacaacccgcgaggcctggaggtagcaaaaggccgccttcgtcatttctctcccagcttggatgggagtgaggggttgagaaaatgcaggatgagaaatccaaatataactaacttctggccaactctctgcctgtatgactctaggtaccttggagccagtgccaggccctgagctcagagcgggcccccgaagaagctgcagagagaaacttcgctccagagacgcggccccagggtcgaaaggggctcggggcccgcagcccccggccggctgcgcccagcacagcaggccctggatcccgcggctcggcagggggactctcacctcggcccacccggccttccaaagggtccttgcggaagtggatcccgtgcacgtccacatgcgcctctccacccgcgttgaccgcccaaatgacgctctcgggcagcccggcccccgccgcgccggccacgccggccacgccgagcccgggtccccggatcgccggcggcagcagcagcagcagcagtcgcaggagcgccacagcggttccctcaaccgcccaggctcccagcatggcggccaccaccacgggggcagcccccgccgaccctcgtcctcggccggctgccaggccaccccggactcagaaaaacagcgccacgggccgctccgcctgagccgccggggacatgtcgctctcaggcctccttcttctcagccacgggtaccgcctcccacctcaggaacaacctaccccgccgccctgcccccggccacgacgctgcagccaatcagcgcccggccctcattaattacccaccaccccgccgggaggcgcccgctcattggctgtcaggcgcgggaaagggcgtggcttctcccaggcgccggcccagcagtcgggcaccagatggagcgcgcgcagagggagtgagttcggttgaagcggcggttcgatgcggaagtggcgggtgcagcgcccaggcggccccggaatcccacagctgaatgggaaaggtggcctggggggggaaggtttagggtagggcgcactgacatgtcgccagcacttccggtgctctagctcctgagaccaaataggctctggagggggcgtggccgactttcccgccccctcttcttttctcagggagcagcatgagcataaattctagtaggagaagcaatggacactctccagacctaagagacgcagtccttttccccgcgtgagggagaggacccatgctttcccagagaggccgcggacacaggtctccagggaacgaatcccatgagaataaggccccgccccctccccttagcgggctcggggcgggtggtagcgtccagacggccgtccaatgagaaggctccaacgcagcggaaacgcgtggctttgagagcgagtgggtgccaggctgctcgcgtctccatggcgacggcctctggccggcctccgctgcgtaggggcgggaccgaggcaccctaggcgctggcgggagtcgccgccggcggtgcccagagtggataccggggttgtcccgcacgggcacggcccgaactccctccctgctccttcacagttcacctggcgctctcccacactggcgatccctgcgcttcggtcgctgttcaaactcccatttttccgatggggaaactgaggcatagaaagggactgaattttgccaaagggtcgcaccgcaagtgtagggcagagtcaaggcaaaaacaaaaaaaacaaaaaaacgcttatgcattttccataaatactggtcgatttagaaattctccctaaaaggaaaaaaatgtatcaagtccctgctaccagggttgtcagatttggcagataaaataggagaagcccagttatatttgaatttcagataagcaaatgggacccacttatactaaaaaaaaaaatgcattgtttattaaaatttaaacaactggacttcttgtattttatctaccaatcctacctactacttaggcaatgagctttgtgctacatgaacaaaaaacacacctggggtcccgcatgagaatcatagactttgcacaacccataatgaaattaattgtttagttagaacagtggtaagtgctatacgggaacaaaacagggtgccaaaatagagactatcagtggtggatctaaatgcacccaaattccttcccaggccccaaattcagaccccatgggggtaacttttggaagtgttccctcccggtctcactttcccccctattttgcaagcatctggccttacttcctcccatagacatgtttcctgtccaaggtgtttctttttttttttttttctgtcttttttggagacagagtcttgctctgtcgccaggctggagtgcagtggtgcaatctcggctcatggcaacctccacctcccgggtttaggcgattctgctgcctcagcctcctgagtagctgggactacaggcgcgcgccaccacacccaactagttttttttatttttattagagaccgagtttcaccatgttggccaggatgatctcgatctcctgacctcggggtccgcggcctcccaaagtgctgggattacaggtgtgagccaccacacctggcctcttggggtttctaattctactattctctctctcaaactgtcatcttttaaggatcttgacaactcagaggcttcagttaccctcaaaggaggggtgtggtgcaaatgggga

SEQ ID NO: 916501 - DNA, 4001 bp, Homo sapiens
aaccagaatactcatatttctcctcctgtgaactgctgaccccttcctcagtctctgtgactgctgtgatccaattttccttctcctgcttgctatattccccccatctttaggaagcaagccaaagtaatggattctaaactctaaagaggtaaggcatgaaattgttaaaacctaccaaaaaatcatctctagttggccctttaactgcacttccctcctcaaaagaacaaattttgctagacaattacatcttcctaatgcgtatgaacttctaggagtacaacagttaataacatcttttcttttttttttttttgagatggagtctggctctgttgcccaggctggagggcagtggcgcagtctcggctcactgcaatctccacctcccggattcaagagtagctgggactacaggtgtgtgccaccatgcctggcttttttggtatttttagtagagacggggtttcaccatgttggccagtctggtctcgaacttctgactgcaagtgatcacccatctcggcctcccaacaagagtttaacacctttaacccacagggctcctagtacccaacaggctcagagctttgtgaatgccataaaaagagaagattctggggttactcatgaaactattcctaagaggcacatttgggaataatatctaagggtagagagtgtgtctgagatggaaggacacagggagataaagactcaccattcccagcatcccaaagggggagacagctccagcctacaggaacacatgaggaacagaaattagagaccacatcctatctctttacaatcccaaaccaggcccatggcctcaatttttttccatcctctcaaaagggagtcacaaagccctttttcctgaccctttccccaactcctagagcatttcacttgctcagttggctgtagtgcaagaaaattaagtgctttcctaactaacctccaacctttctttgggtctcaggtgtgtctcagcatcattacctgctgcatccggcggctggcaggcctggtccctggcatgttgccatctgtgatgctgaggaaggggctatatccaaagccacctgacaacatacggctcatatgctgacggtgaatagcaaagggatccctgtggagtgagcacatagtatggatggcagaagcgccaaactgtcaatccctccaccaccctgcaaaaaaatacgcacagagcaacagtggcaccgatgcctacttcctgctaggtaggagctaggtatccagccagttccaaccattcctagcaatgggaaccccgatgtctgcctgaactgctcagagacctggagtgggagagcttgagggggagggaatactcacatcaggaacatgggatcctcaggctccacgtccctcatgaagcggaacatcctgatctcagctccagggggctccacactggaaagatatggaagctcagatacttggaggtggccagggttttgcacacccactcagtgtggggactctcagagcactgtcctttccaaatcctgtaactgaccccctaaactccagggagaccctactccaggtgttccacacaaccctctagggagggaagggctcttcaaacctctttctcaattagggccatggaaaatttttccaaccctctcggtttttccctcccccactcagagccatcctcttcccaaagctctggccggtagcatactctcccctcctcccgccgacgacaccgttctagatgagaatgccaagtgcaggtcctccgccccattaatgaccccagtcaccccgccccctccttacactcaggcctcccccaggcgggcctcactaagccccccgcgcctgtctgcgactcctctagctcccgcctccccgccaggcgagcaggagaggtaggcctgagcctctcctctccccaccccgcatcccgggctcccagaccctgcagccccgtgggcccgctcccgtccggggctgccagctctgcccgagcctcaccagtgcccgattcgggctcagcggcccatccggccggtttcgcttcccggtacgctgcagggtcagggtcgcggcccggaacgtggggattggtccgggcttgagctcctcggccttccacgccgcctcctcccacagctgccacctccgtacggccccctcggccaacggagcccgaacctcggccaggcccgggcggaagtgacgtcacgatagacccgcccacccggggccgggccgtgggagccccgccccctggcgcgggtggtgagatggctggggccgagtcccaggggcgccggggccatgggccaagctcaggggagcagagcctgaggccgagaggggtcccctgggcacgaagaaggggagctcattagtaacctcgatttgggttctgtggactggaagaggctcccataaggcaggggaggagaaggagaagaggaatccattcttcgggagggaccgggttggaggttgaacctgggggcgcagtgcagcacgttctctctccctcctcaaggggaaactggaggacgaggggcagatgccccttggggagaggcgggcgctctgtgggcgacgaggcggggcggatccctggggggagctttaagccgactctactggagaagcagtctaccctagagggaggatgggcagttttcctgcgggggaggcgcttgggcctgtccccgcttgaggaggagcgttcctggcagggcggagtccccggagtgacgcagaggaggtgaaactctccagcccagatctagttcgggcttcagaaagtcggatggggcagaggatccaggttggggggttggccgccagatggcgctcctcggccaggctggaaccggaggcccttgagaactcgcgttggagagggacctggaccctcccccgttacccatctgtgaagggttggactggggaaaggctacagttctgaatctattagtttaatgccactctccccttccttttactctaattcttgtgtcctcaagagctcccagtcctgcactgacctttcttggttgctttcttaggtcaaaggtctaaagtttgggggaacaaaggagtggagagctcagttaacctggatcacccaggggaggagctaaaacggggcccagaagacctgcctccaaggccagagactgatactttgacatactaaatgtcttgcataaaatctggctctgctggagagaagggccttcccctttggggtcagggcatttggactgtctaggatggactttaaccagactcatccaaactccagctttccctggttctttactctggcttttagccatattagtgctgtgtggagtctgacccaatgagaaagacttgttcccagtaattccctgggggagaaagagggggtccctggtgactcaggaaaaggtgctaggaacagggcttctcacgtttctttggacttgatcattattaaagaggaaaaaacaataatagagacagggagcagagatagataattaagatataagctgacagactggcaagtcaaaggaaaacagacagaatacaagtaaatttgtttttcattgctatttctgggggaagagacttagtaaaatcttctgtcttccagatctctgcacttcccaccatgcaacttccccttatcctcttgccccaaatgaaagcagtttgacatgtgatcaagagttgtcccagtaaaggttctgtggctgaaacttaactaaagagatcctatccattttttttcttttgtcctctcctccttctaaagcaagttctttattgtccagccaatcaacaaatgtttaaggcctggcgcagtggctcacgcctgtaatcccaacactttgggaggctgaggcgggcacatcacaagatcaggagttcgagaccagcctgaccaacaaagtgaaatccagtctctactaaaaatacaaaaattagctgggcgtggt

SEQ ID NO: 916502 - DNA, 4001 bp, Homo sapiens
tgttttttaaaaagcagaacatctttacaggctcagtgccagctcaaactggcaagaccagagaatcagcagagactgaccaatgtgccgggtaagggggatgggaggaggagctacgggaacagatcatcagggaaaccttcaagagaggaaataggggtgtttcaggaacataacaaagaacaagttgactaatcgtttattccagggaccgcggcggtgaggggggtgccatccagggctaagtatctaatattttaacttcaggtaaaagcataacatttaaacctggatatgcttggggctcacagctctcttaaaaaggtgaggtgagagggggcaagatattcctgctcttttattacgctgtttatggagtctcctaggaaacttctcccgcgatgcctccagagcagacctaagacagcccccgctagtccagttcctaatgcaataagcttaactcagcagagatcccatcatgagctttctgcagggccaagctgctcaaggccgctgctgccagtccaaagaagttctgttgcgcagacaaaaaagttacctgcagcaaatacctaatattcatagtgggaaagggagagagagtgaaaaagcgctttaatctttgagggccaggcattttctgtgacttggaaaagaggaatctctgcccagagccgaatccacatgtcagaacggtgtctgggatgtctgccctcaacaatgacatctccctcatataatgtttcaggaccggccagaaaaccctccaacttgccagaaggacagactgcacctccaacagctgtggcaccaaaagtcttcttaggaggcacccaaagccctcccgagatgggggcgggcctcccgatgaggttgtaagggggccagcctccaggtgcagggacacctaactctggccaagcactggaataagcaatttacctatctcactccatccccacaacagccccttggaggcagacactacagtcattccccttttataaaggaggaaacaggctccgaggtgttacacaaccattaaacagcagagccagcctccagtcaccccgaacaggtggtcctgaccgctgctggatatgggggaaacacacaaagcgtttggaggaaggagtcgatagagtcgggtaacacaagatgcagccagtgtttatacctcttcctcgtccaacatcggtggtcccaggacactggaggggagggcctggatggggaacgtgaacccgaaaggaccccggcactgctggcaggggaagaggccaggaccccggctcctctggcaacgcggggaaccccagatccataaaccctcccgaaggaggaagacccaaagggaatgcatgaagccacggggttgccaggcggcccttccctccacgcttgttttgtcaaacaagggcctccggccggggcctcagggggtcgcgggggtccctacctgtaggccaaagtcatgcactcgaagagcttggtgagcgaggcgtcgatggacaggtggcaggagctagtcttgccgaagctgtaggtctggcacgtctgtttgttgaccgtgtcgaaatcgtagcccttcttgggcgggtgctctcggtgcggcgacgacaccatgaagtggccgctgtggatgatctgctggcggcgcggaggttcctcgcggcccggcccggcccgaggcggcggtggcgcggcgctcgcgtgggcccgggccggggtggccgcgccggaggcgggcggcggggacggctcatccgtgtccgagtcgtcgtcgtcctcggacacctggggcttgagcagcacctggcggccccggctgcgaggccggcgcggggagcacatgaagacgtcggcggccatgagaagggctcggccgggggcatcccccggagcccggggcaacgcgacaagcgcgcgaggcagaggggcgccggcccggcccggcccgcgcgccgactgtccgcgagcgcgcggcgcggcgggagggggagggctccggccccggcgtgacgtcaccgaggcgtctgggccaatcggctgcccgcgtcggcctcttaaaggcgcaggggaacctttccttagctaggcggaccaaaaaaaaaaaaaaaggggaagcggaggccacgcctcccggccgtgcccctcgccacctcctcctctcccggcgtccgtgggtgctgagggacacggtggccgggcggagcggctcgccggtgtcgcgacctgggagaggcgtcggcagagtggggccgtgctagtcccgcccccgccccgctccgcgccccgggagtcgccctgtggcttcgccgcaggcccggccggctccacgtggtgggtgcgggtggggctcctcggcctccaggccctgctttttccctgccgggcggtaccgagtcctcgcagctcacgcctgagtttgccggacgtggtggctattgtcctcattattctcatcgtattgatgggaacactgggtggctgaataccgacaggatttttctcagacctggagtccacagagctgggaacttgcttcccctgcgcgtccccagctcggcgcagctgttgagtggcagcgcccctgagcccagcgacctccagaccccagctcttttaacttcaactcagcatgctgttgttatttttttaaagtttgacggacgagccagcccccgaaacaattctaaaaggggagtatctgagccagagttttcttctctgtcaaatggtgaacaattccgtttcctcagaaacttgggacagtttaaaaatggctatagtggggcgcggtggctcatgcctgtaatcctagcacttttggaggccgaggcgggtggatcacttgaggccagaagttcaagaccagccaggccaacacggtgaaaccctgtctctactaaaaataacaaaaattagccggtcgtagtggtgcacccctgtaatcccagctactcgggaggctgaggcaggagaatcgcttgaatccgggaggtggaggttgcagtgagccgagattgcgccattgcactctagcctgggcgacagagcgaggccctgtctcaaaaagaaaaataaatacaaataaaaatggctataagttgcttagcaggcaggctggcacaaaatgagcgctaaataaatgtgccacaggttggaggatttggatcaaccagaccagaggtgcctagaaattgccaatagtccaccactatttgacctgcagaaacggcaacttcgcgtggcacaacctaactgacagacacctctagaaagctgtcaaggtttccggggctcaaagccagtctggggtgggggtggcagggcatcagaagagccagtgaggcccatgagccaggaacacccatcctaatcctagcagggcgtccagagtccacagccactcctgcactctgctttgttttattgttgttttgttttttgagacagagtcttgctctgtcacccaaggctgtagcgcagtggtgcaatcaccatgttggccaggccggtctggaactcctgacctcaagtgaggcctgccttggactcccaaagtgctgggatgacaggcatgagccaccgcgctggctctgcactcggctttgaagctggtttcagttccagatttgagtggggggtgagtcccctgccccaccctcttcctgacaaaggcctcctgaagggaacagagggctctcaccaaaatggctccattaacttatttccaaatgtctgtatggaaaaatgggctggatgactggcagttttcaggcatgagttctagatttccctcttcaacctactactgttcccaatgctggttacaagtgtttaaaagtccatcctttgagttgccttcctttctctcaagacttgtctccttggtccttggtaagtttacatgcccagccacttttttttttttttttttttgagacaggatctggctctttcacctggactggagtggagtggtgccatcatgg

SEQ ID NO: 916503 - DNA, 4001 bp, Homo sapiens
ttatactttaaagtggctgcaaagaatttggaagaactttaaaatggtgtatgccatgagtatttctttgcatttttcacctgtccccaccctacctttgtctcccgttttggtgtaaatcttggggatcctgggtgtcttcgaggaaggctgtggcctaatgagaaataaacatcagtatctggtgagtggggatggcttacacagagggtcagctccttcagagggtcccagcttgctgcttgtaacctcagaggcagcacttaccccttactgcttagatggtcatctcttgttgatttctttcccctagatcctttctaatagcaaacattttgtgggcaagaccagagctggatgacagagtgtgtagagtagctgatgtaatgccttgctcaacaaagatgctcaataaatatttgctgaaggacttgattgatcctttgccattgtccctgcactgtgccaagtagtttacaggcattatcttctggaattatcctggaatctttccacaaccccaaaggtagccaacacctattctcttcattttactgaggaggaaactatggctcagatgagacaccttcctagaccatccaagaagaggcaggagtgggatgcccaaaactgtcctagaccagagcacaaactgtaacttctatcctaccgaaattatttatttatttattattattattattattttgagatggggtctcactctgtcacccaggctgaaatgcagttgcacgatctaggctcactgcaacctctgcctcccaggctcaaacaatcctcccacctcagcctcccgagcagctgggagcacgggtgtataccaccacacccagctaatttttttttttttttttttttggtagagacgggtttcaccatgttgctcaggctggttttgaactcctgagctcaagcaatactcctgcctcaaactcccaaagtgttgtgattacaggcgtgagccaccgtatctggcctatgattattttgttcacagacagggtcttgctctgttgcctaagctggaatgcagtgcagtggcatgatcatagctcactgcagccttgaactcctgagctcaagtgatcctctgcctcagcctcccaagtagctaggactcttaactctatcctacccaaatttttatcttatactccaccaactcagggcctcttgcaggaaaagaaacctgagccacttccatagtatgaggcttcgagtgtactcagagatgaagaattgccaaaatacagctcaaaaagtggcattttcaaaaaacaatgtaaacaactcaaggacatagctcaaaattaaaatgtgacattacaagcccattcgaaggttaatttcctggatctgtgaactaaattaatccattattaatccacggtactctagaggttctgaggtctgggttgaggtgcaagtttcaaggaatatgaggaaagccatctttagaaggtgctggtgtatctgggacctggggaataaactgctttggagattggtcacaatctgagtcgagagccctcctggcccacatgggatatgccctgccctgcccgatgatagcgggacttcattgggacttaggcaaagactacctggtctctggcgcccacgtggcccacgttgccatggtgacgtcagaacagcgtggagacgtcacctgacggttgccgcggtgacctcacggcggtgtgacgtacccatggcgacgacaccacgattcacggcaggtgttcgagttgcccttcccgccagccactcacctgtccccgtcttccacgccctgagggccgcggctctggaaacggggatacaggagcctggcggcgccgaagcacccgcgcaggccaagacggctccccaggccaagacggctccccaggccgcacacagccatgagccaggctgcttgacgggacctgaccccgccaggttcccgtccagtccgcggggtgactccacccacagctggccgcgccaccgctcaggtttcaatttttattggttcgcagttctcaccccagggcgggacactcccagggacttgtttcccattggtttaacggaaggagcggggcgggaaaacccgtgtcggcttggctgcaacacctattgaccaatgttcaagcctattggtaaaggtactccgggctcgcgcgctctgattggctggcctgaagtacaacgcctcctccccttgaggcacgggcgctctgggttgtgggagttggggagctgctccggcttcggcgcggaggggcggcggccggggaggcggcggcggcggcaggtgagaggccggggtcgggcggccgggcggcgcgaggtcctagacccaggacgacgctgagccaggcgtccagcttctgtggctcagtttacccagctctgagagtcttgccccgagggatcggcgacctcaatctgacagtcgtgattttgagcttgacaagcaaggggattccccgctctgagcctcagtttttctaagaaatggggatcacgatagtacttagctcatagtacacctgaatcttagcgtaaggtaatctacgtaaagccttaagcggaggataattttgcgttatgtataaaagtgtaaattgcacacacctatagaccctgcaagctcctttctaggactctgtcctgcagaaatactcatttaagtgtgcaaaacgaggcgtactgggtgttttctgcagccttgtttataattgtgacacattggaaacagcctaaatgtccagcaaagagttctttctgctccatgatttcatgtaatttctacctttaatagtagtagttgtaaaagctgaaacgaagaacagagccagtaataagtagctctcagtaattgaatgattagtaggtgccagacaccgccaagtgtttcccttgcgttaatttaaccttcctaacatccaccgaggtaggtacggttattttctctccatataacgtgtggggaaaccgaggttcttagccatttaagtgagttaactaagatgacatcactggggagtggaagagctggcatttgaacccagatctgttggatgtgtccagttgactcctgcattgcctttctggtacgtagcaagtgctggacggtaactaccttttttgttattatgatgggcttgaactaggtgttctaagatctcttcctgctggttctgacatctagagatctttgctcttctcattggctttcccttttaggattcccaggagccatgttgtcagaagtcctactggtgtctgctccggggaaagtcatccttcatggagaacatgccgtggtacatggcaaggtacaaagccgttagagcctttaaggattgggtaccccttctccctgatgctaattttgtaagaaggtaaaaggacaccctgaggcacagcttgggagcagatcagagagatcaggttctccccagccaggcaaggaaaagatttcttatgcccactgaagggattcttgggcctcgctcggtatgatagcaaaaagatgattataatataaagccctgtgagtggaatgagatcacctaggagtgagctttgatgcagaaggaaagaggtttgagaactgagctccggggcactaagacatttagaagttggaaggatgatctagcaaaggagttgaaaacatccattatctcattttacccttacagctacccccaaggcatacccttttattatcctattttacaaatgtgcaaactgaggcttaggagagaagtggtaacttgatccaagtcctatataccttggtagagcttggtgtgaacctaagtctgtctgaaaccacctctgctgcactctgcttttttttttttttcctgagacagtcttgctctgtcaccggagtgcaatcttgcgatcatggctcactgcagcctccaacctcagcctcccaagtagctgggaccacaggtgtgtaccaccatgccccacta

SEQ ID NO: 916504 - DNA, 4001 bp, Homo sapiens
ctctccggctggacaccggggccccactcactgcccccggccaggctggggagccacatcctccgctcggtgctgtcgcagggcgcggggcgggtgacccccggggtgccaggagagaccgaggcgcaggtaccagccgagaggagggcgcctgacccactctctccgggcaggggggcaggtgggtggcgagaaacttccaaaccgcactgggtctgatcagccaacatggctcggccgggggtccatcctcctgagtgtgtgggccccaccttgagtccttccctggcattgccccggccccttctgcggcaccctcggacctggaaggcgggcctgggttcacctccctccacagctggagaccccaggcccccagggcgtgattctcagtgggggatccgggagatccgcacctacaaaagggtcttgaggaggtggaggggggcaccccaagttcacaggctgcctggctggaaggaagccactgtggggacctgcaggcacctggacgcgggcagcagggacagtggccagcaccctcccagatggcttcggggcctggggcaaacggtggccaaatcggcttcccatccagaccccctggccaagtcctgccaaccacaggggctgcgggtgccacccaagtggcccctccatatgcctcgactgcctgaaatacacctgcgctgacttgcttggaccccaaggttttggagctcctgaatgtccactgcgctgggcgaggggccctgccaggaccccactgggagactgtccgcggacgagggccaggccgagtacttgtgtggggcggggaggcctcggctcctggcccgactccctgggtaggagtccattgaaggcagcggtggggcaggagcctcagaaggaaccaacgaacccagcgggagttcacccggccgccccagcgggggggcgctgaccccacgacgtgtgctctaaatcttccgggtccacaggagacgcgagtcccggctgcggaacaggggagggggctgtaggaagaggccacgtcgctgcccccaggcagggtttctaagctgagctggggacagctactgggtgtggagtgaggaaggctctccccgcgcccccggctcagcactgtaccagggcaaggcagggccagcctggccgacctggggtggaggggaaggaggctgagggccaggtccttgtccagtggggagctgggggccagcatccctgtgcccccaacaccctcaaccgagcaaactcgggggctcaaggctttcggggtgcccccactccgtagcccctgcccttcctcgctttgtgggtgcgtgctcctgcccccgccactcccacccggaacgcacgcagcgcgcagagctcggggcggccgcgatgcctgctctcgcccagcccggctgctccggggctgctgcaagccggcgacccgggctccgggtgggcgaccccctcacaactccacgggctcctgcggctgcggcgcgctcccagcgcacggagccgggacggcagccggcgcctccccaggactcgcgtgcgctcgcccggtcgctcagcccgcgtccctgcctcagtctccccacccaggaaatgggtccagggcgccagggctcccgcgcgacgccgacgtgcactgctggggtcttcccggtccccgccacccggcccgcggagacccccggctccggcccaggagctccgcgcccgtcccgcccgcgcgctcaccactcccaggctgaggtcctcggcgcgcggcgcgggtgcgggcgcggcgcagcccccgcgggtccccagcgccagcagcagcagcagcggcagcggcagccgcgagagtccgggccctgggggcggcgggccgggtccccgggctgcgcggcgccgcatggcgctcacatgggcccgcgggcggcgtgcagggtcccgcgccctccgcttcgcgttccgcagcccggcgccctccgctctccgcggcgcccccgccggactgagccccgcgcggcagcctcaagcggcggggcggggccatgcaaatgtatgctaacgaggccggccgccttaaagggcccgcgccgcctcggacgctgccacccccgcccgccccgccgtgtccgcgacgggactgggtccgcggcatcacagggaaggcgtttccccgggtgtcttaggacgctcttggggcggcggggacgcgcgggatgggcgcggaggcgggggtcggggcgcctgcggggagctgaccctgactcccctctccggccgcgctcccgggtccaccccccacggcgccgaggcccgggttcagacccgggttcaggccccggagccgccgccgcagcgcagcaggtgggcgcttggtggagcccgcggaccgcgggagagggagggtggggcttggggggcgcgggggactggagggcgagggcgggtgttgggggggctggggtcctcggcggaggctctgcggtccctgcgggcctgggagcgagaatgttaacttgtaatgtttgttggagcgcagcgtgtgcctggcacatgcccaggagttacataaataatttcatttacttacaacatttatgagatgaaaactatgatttccatttcgcagacaaagaaactgaggcccaaagaaatgaagtaacttatgggaggtcctggagcgggcaagcggcagagccagggtcagagcccgagcaggcgcttgtgtggattgaactcgtgcaagttgcgtacaggctgcccaccgagtgggagatcttgggagagggcagggggtgaggttcaagggtaacccttgcctttattcagcttctcctcgtgctggacagcatggcttcccctccttcccaggccctcctgctccaccaccccaaatcgcagctggtactgtcaggactgaggtctcattctacggacagggaaactgaggctcggccccttttaccagaactggtctcagggaagtggtgcccctcccctcctgtgagggccgactccccccaaccacccccccccccccccccccgcttccctgggtactctggcccatcctgtccctgctgccctcagagcctccctggcccggtctgaacagggtgattccacacctgcttcagatgaccttggttcggactgatgggatcacctgtaggaggtggggactttcacaggacatcccggattgttttttctttctttcttttttttttttttgctctgttgcccaggctggagtgcagtggcacgatcttggctcactgtaatttctgcttcctaaattcaaatgattctcctgtctcagcctcctgagtagatgggatttcaagcgtgcacaaccgtgcccagctaatttttgtatttttagtagagacggggtttcaccatgttggccaggctggtcttgaactcctgacttcaggtgatcagcccgccttggcctcccaaagtgctgggattacaggcgtgagccaccgcacctggcctcatccgggattttgaccaagtgcatcaggacaacctggtttccagagcagagacccagccaaagcggctgtagtcaaggaaaggaagcgtatgggtatgggctcaggaaacggtggcgtcctagcgtgtgccaaagtcaggcagggctggaccaagtctcacagcaacagcgtcagaacgcggtttctctcagtccatctctgtgtggggcaaagacggcccagggcagctcctgtgcatccttccccctcagcaggcccagccagagacagactctttctcaaccaatggtcccaaggccacctctctctggattctgggtcaggacctgatcgtggggccaggggcagggaagtgagctgaagccctgggctggaagggattctctacaggaaatcagaggtgctgaagtcagaggaagggagggtggatggcaggcaaagctgggtcgaggactcagaagagggaacgcggccagtgcccccactgcatcatggggc

SEQ ID NO: 916505 - DNA, 4001 bp, Homo sapiens
caggtaatcaccaggtgattatctattcaacactgagctggtccagactgtcctaatgccacccacacgccagaaccacatcaccccctcctctccctctcttttccaggctctgttctcacccagcaacaggtatttaagggtcttctggttgaagggatcctctaggccacaacgaggctgcctcatgcgggcccttgtggcatcatccagctgacctgagactggaagttcagatgcttcctgaaaagctctgaaggagggagagggatgggtctaccaggacaggaaaatctgaaatgactgggagatgattgctctttgacttcctgctgcccaagttcatggccaagaatagcacagaatccctgaagctgacagggttactccagcctccagtcctcataactgggactttctcttctgttctgcagaaatggagatactccagcttcatctccccattttcagtgtcttttatttgagtaagtttgccctcaggtgtagccttcctcctctactgcaatcttccttccttccttccttccttccttccttccttccttccttcctttctttttcttctctctttctttcttcctttctttcttttttggtagagatggggtctcattatgttgcccaggttgctgtcaaacttctgggctcaagcaatccccctgcctggatctcccaaagtgctgggattacaggcgtgagccaccatgcccagcccctctactgcaatttctaaccttctcctactctgtggaggtgtctggctcccctgctctggagagctttccactagtgctcccacctgacagcctgtcctccttcagccttctcccttcctgaatggatacccgtcccagcccagcttgccctggagcaatttcatccatctatggactgtcatagggcctaggggcttttcaagggacctgaacatatctgagagcagaaagaaaaataatccattacatcaacatataaaactataaaatagaaataaataagtaccaaattgaaggcccacaaaaggtaatagcatgtcaacaactcaactcagttttacatatcattacactttatgtggactataactaaatattagtatttgagatatgatgtgggtagagactccaaaggaatgcttatggcctaggaagatccaatgcctgtattcctcatctgtgaatccccatctcaccccatgccccaccaccataataatgatcgccacccatctctaaatccctggcatggtttagggtcaggaggaggtgggcctggggagaggaagggatgagaaggaagaagaccttgagaccttagccctaaaggcatacacctcatagcttctcacctcagagcctcggtgatatcttctggcttgaagttattagatccttctagaggcttctgtaggtacccatattgtgacaggtagtcctatgatgggagtggaggtaagcaggttaaaagggggttagtctcagagtaaagcttctaagtgacctaacagatccatcaggagaggagggacctgatatggaagcactaatggagaagcaccttagagaaggggctcaggtggaacaaggggaagcagcgggagatgggcagggtagaccatggggcagagagagcaagggaaaggcaggcaggctgaaggtcaggagggaggcttcgatggggctgtggagcagtaacccctgtccctccgctggcccaggtctctttcttgggggacttaccacaggcgccacctctgcaagccccaggacccggcctgagactgtcatggggagtaggaagcccagccacagctgctggcagttcatggtcccaccagacgagagctccagaggctgtccgtgcctctgacctgagatttctgggagccttgggggagcagtgctaggcagaggggctcttacccccagttctttttactctccagcctctagtcctctttataacagctgaggggaatttgggggagaggcagagggaggtgactcagccaagagatatgttgcaattcaccattaacccttgccctaccagagagcggaagccaaagagagttcccaatcgcttccctcagagtcctctgctggagatggaaaaacttcatactgccctagggtgagcatccaggcaggacgagaaccagaatctctggagagactagagatagggatcatggacatcccctggaattagacatcaatgtgcctcagggaccctgggccagcaaatcactccgcccctacctttgagtctccctagaataagctgagaggtaggaaacagctgaggtagcttgggtttcaggtgaaggagtcaagcgtgaagtctcagtttctttgtacccaagaccaagttgggaatatagatgctcctgcaacctacttatgtctgctttaataaaaagtcattatttcaagaatctaatgagcctggaatatgtgggtgtaggtgggacttaacaagggcacaaataagtaaagggcccagagcctaccctcagggagcttacggatccagtgaggcagatccagacacctgggaagaggggagccagcgtgccaggccagaggtgattcaccctaaggggcttggggctggggggaggtttgctgagaagtcaggctttgagatgggctttgaaggccagctaagaattgatggggtaaggccaggcatggtggctcgctcctgtaatcctagcactttgaaaggctgaggtgggtgaatcacttgagatcaagagttcgaaaccagcctgaccaacatggtgaaaccttgtttctactaaaaatacaaaaattagccaggtatggtggcgggcgcctgtaatcccagctactcggcaggctgaggcaggagaatcacgtgaacccaggaggcagaggttgcagtgagctgagatcacaccattgcactccagcctgggcaacagagcaaaaactccatctcaaaaaaaaaaagaattgatagggtaaaaggatactgagagacagacagtgcaggtcttgagtaaaagtgcagagctgagagactgctgtactcagtaagtcagaagggtcacgactgcttcattcaccactgaagcccgagtgcctaccccaggccacctccatgctttcgaggctgtgcttaataaatcactgtcaaagaatgaccagggtgggaaagtggttgggagacagaatttggagagggccttaaatgctatgcaaggaaaagaagaaaaacttacatttaaaaataccggacgggagcagtggctcacgtctgtaatcccagcactttcggaggctgaggtgggcggaccatgaggtcaggagtttgagactagcctggccaacatagcaaaatcttgtctctactaaaaatacaaaaattagccaggcgtgatggcatgcgcctgtaatcccagctactcgggagactgaggcaggagaattgcttgaactggggaggcggagattgcagtgagctgagatcgcgccactgtactccagcctggtgacagaatgagactctgtctcaaaattagttaattagttaattaattaaaataaaaatacctattattgggtgatgggtgaaccaaaatctcacaaatcaccactaaacactaaagaatttatgtaaccaaataccacctgttccccaaaaacctatggaaataaaaaattaaaggaattaaagtccgggcatggtgactcacacttgtaatcccagcactttcggaggccgaggtgggtggatcacctgaggtcaagagtttgagaccagcctgaccaacatggtgaaaccccgtctctactaaaaatacaaaaattagccaggcgtggtggcacgcgcctgtaatcccagctactcaggaggctgaggcaggagaatcgcttgaatccgggagacagaggttgcagtgagctgagatcgcaccactgcactccatcctgggcgacagagcgagactc

SEQ ID NO: 916506 - DNA, 4001 bp, Homo sapiens
tttgatattttctaaatgagagcatttctcttataattaaaacaacttaattctttaaaattctctaaaacagcctaattctttagatttacttgttataactttcaacagaggatataaaaaaaatgaaaatcaatatcaaaacagactattgactatgtgaaataaaacatatcgtaacagccatctttccaaaagtggcacatctggtttccatcactgggtaatactttattaaagaaatacaagatggagtttgttgaaaactgataaaaccaatgcacttacagaaaagtcaatattccttacaagcctaaaatccaaaatttattggtcaagttctaattacataatcttcataataataaagatatatttaaataagtatgtaaatatgaaatccctcggtgaatttttagggcaaagagtaaatgaaattgcaggtaaaacaaactacattaaataggaataaaaataaaaacagccgggcgctgtggctcacgcctgtaatcccagcactttgggaggccgaggcagggggatcatctgaagtcgggagttcgagacccgcctgaccaacatggagaaaccctgtttctactaaaaatacaaaattagccgggcctgtttttggtgggtttttttgtttgttttttttttttagagaattaaaatggcattttaagagaaaaagcaaatagtaaccaaatgttaaatatttcacctcaagaactatttggagaattaaatttccatgtattatttactgggatctctttaataatacccttctgctctgacatctttcccatacataatataaaaccatcctttaaccctattttacagctggaaaaaaaaacccgaagctcaaagaggttaagatttattgctggaactaaattcaggtgtattcgctctgactgcaagcccaacttcccactacagtactgctcataacaaggtttaacatgattatgtggatcttcaatattcttcataaattaggtggctctggatagtttattaacacgtcaaaggattgatacagagttaagctgaatgatatataccagaaggaaaattgtttccaattcagtgatatgccataaacgtgaggagtacaggtttcaacaagatgggtggatactcgtttcggggagcaacaaacaagtttttcaattttggtttggccagtttcaagtaagaaaaaggccagaataggctagtgcacagtacacctagctggattaactgaataggctcacttcatgaacttcactcctaaactgggaggacaggagaggggagaaaatcaaagtgcctcagccctctccagtggaaactataaaaagcccttgtggaacaacccaccgactcacaaatctggaaaggtgaggcctgaatgaaaattaggactggaaactggggtgaagcactgagtctaacaggaccaggcatgctcacagtgccttctcctgacgtcacctgaagcttacctctttgacaggtgggaatttcttcttgcactccagtgacaaggcgcgcaagtcgctctgcatattctccagcagcttcttcaccgcctcggggctgctggtgccggacatgatcctccaaggtcccagccaatttccgagaggtacaaacaagctctggcacggtcagctccttagggccacaggcagctccctcccggtgtctctggtccttcagcagcccgcttcttgggccctgggctgcgaacccggagcctgctcgagcgtcccccagcagcttccccgcaacacctctggcttttctcggaggcgccccccgcagtcgcaccgtcccgctaggctccgccgactctggccgagaaacccacaaggcgggcaggtccctccgctgccgcggggcccagccacaccgggtgtcaccagccaacctggcaagaagcttcagcgccagctccccaggcccctaagactcgccgacgccattagccgagtcgcccacaattccgagcgctgccgggacacgtcagccgcacttccgggtaccgtggcctccgccaccgccgcggccaaccccggcggcaggccgtcggcggggcggggctggggcttggccatgctcggggcaggcgggattccgggtgggcagcgattcccacagccccacccccggaatcaagtaggctagacagggtttaaggcgtcaagattcgcttcgttttcattaacaagtgcctgaacagagcccccgagtactccttggcatatctctttgcgtatgtttgtgttaaattgtatttcggtgtaaataatttgtttccctgtagattaatcttaacgtgtctcctcccgcttcatttcgaatctctggactagtggccccaaatcagtggctacctcctgttaatatacattttttttctttaaacgcaactggtgcacttactgtggggtagcctcttattttcctaatctctaaaatgagactaccctctgctccacgcattccgctggcctcccatctcactcaaagtaaaagccaaaattcctccaatcacctaccaggcgctacgagatctgtcccggcccctttactggcagatgctcccagctaaaaggagagtttcgcgagttgggctgccggttcttcctctttttaaatcttattttgtttcctgtgtatctccagcacctagaacagtgtctggcatatagcaggtaatcagtacatacttgttgaatgaatacccttctattataaaatcagagtttcgaggctcaaataaggcacagatacataaaagccttcatcaggtctgaagtgccaaataaatatgaggcaaaagccaaacagaaaaatcttcatctgtatttccccaagatccaggttggtctactttttccccaagacattttgcagctgctggtcagaaagcagaaaatgagggaggaaaaaccagaaacagtagagatgaagaaaccaacaccttcagacagctgagcttatgacatgatggaagacagtgagccatgagattgtcagtggatagcgctgtttggctgtaacagagctactttgtaagctaaataattttattttatttttccttctgataagaagcaaagcaaggatggataaaggggacagatgaggtaatagtagagagctcctagggcagtaattttgatcatttgtgcctattacacaacttctgggaaacttgacacctcctatggtataagctttatgtatgaaaactggtgaatttagcaaaaaagttcaaatggaatatatggcagacattattcttgaggtctcagggagcttgtaaaaacgaggcgctttttttgggtggggggtggagacggagtctcactctgtcactcaggctggagtgcagtggcgcgatctccactcactgcaacctccacctcccagggtcaagcaattctcctgtctcagcctcccgagtagctgggactacaggcgtaggctgccacgcccggctaattttttgtattttagtagagatggggtttcactgtgttgcccaggctggtctccaactactgagctcaggcaatccacctgccttggcctcccaaagtgctaggattacaaaggcgtgagccacaccgcaggcctttttgtttgtttgtttgttgttctttttagtagagatggggtttcagcatgttggccaggctgatctggaactccagagtacaagtgatccacccacctcgacctcccgaagtgctgggattacaggcatgagccaccacacctggccaaaaatgatgctttagtaattgggctagtgatataggatcaaattctctgactttcactatgtagccaacttttcttttggattttttactattggtaactttggcatgattaactcaaaatcgttagaatcttttacatctctgttcagagttgaggacatgcaattggaattcattgattgaaaacaatacttctaatgatttgaaaag

SEQ ID NO: 916507 - DNA, 4001 bp, Homo sapiens
gtcctgccaccttctatgctagttcctgcaaacatccactcagttactccctctcctccaagtctttttttttttcttttttttttggagacggagtcttgctctgtcgcccaggctggagtgcagtggcgagatctcggttcactgcaagctccgcctcctgggttcacgccattctcctgcctcagcctcccgagtagctgggactacaggcgcccactaccacagccagctaattttttgtatttttagtagagacagggtttcactgtgttagccaggatggtctcaatctcctgacctcatgatccgcccgcctcggcttcccaaagtgctgggattacaggcgtgatccaccacgcccagccccacctggcccatttttgtatttttttagtagagatgggatttcaccatattggccaaggtggtcttgaactcctgacctcaggtgatctgcctgcctcggcctcccaaagtgctgggattacagatgtgagccaccacacccagcctggaactgggatcctaacccaggtttatttgactgcaaagcacttaacccagcaaggcaggagagcaggatggttaagagcacagaattgggctgggcgcagtggctaaacgcctgtaatcccagcactttgggaggccgaggcgggcggatcactcgaggtcgggagttcaagaccagcctgaccaacacggagaaaccccgtcttactaaaaatacaaaagtagccaggcgtggtggcacatgcctgtaatcccagctactctggaggctgaggcaggagaatcgcctgaactcgggaggtagaggttgcggtgagccaagatcgtgccattgcactccagcgtgggcaacaagagtgaaactccgtctaaaaaaataaaaagagcacagaatctagccaggcacagtgactcccacttgtaatcccagcaattcaggaggcttggacaggaggattgcttgagcccaggatctcgaggctgcagtgagctatgaaggcaccactgcactccagcctgtttttttgagacagagcaagaccttgtcccctcaaaaaaaaagagtacagagtctggaattgcaagactggagtgagcagcagtgccacattttaaaataaaagctcttttttctttatttttttccccagtcaggatttagtttgtatcaacaggacccctttgccccctgctggtcagacttggagccccagctcctccttgtgggatggagtagggggtcctcccttgtgcctggcgctcagccctctgcagagcatcacagctgaatgcgaagcccagaaccccactgcaagctggcttcaggggcgtggcttttcttgttgccagccagcccagtgcttaacccaggtctcagaaggcaggaactgagccccctaggtcccagagccccgggggcaggccagtttctcaagaccctctgtccactgctggtcctgagaccctcactcagttgaagtcagggctgagtttgttcagaagccccagcatgtgaaggcccccagctggcctgggccagcgctcaccctgggggagccttggggacacatctcatgtccccagtgagctctgcactctgccttcctggccctgttgcccactgtggctctgaccccactccggccgcccgtcccggagtcccactcaccgtgtttcacgttgtccttccactcgcccacatagtagtcgccattcacagcgtatacctggctccgcaggccgttcctctgggccttccggtcccaccccttccacagggactccgacttttttgggcacttagagactggcatggtggctgcttctgcaaggctggagggtgctggaaaggggttagggacatctggggctcagcgcgccccgtgtaatgccgggatcctgagctcaagtggggagagtcatgtgtgttctgagtccctggggcaggtgaacagcccttagtggggatcctttagtgctggactgacctttggttggcccctcccttgcctctcctggggccccctcccagggggtctgatggcacaattacttgggaatctagggaaaccagtagagcaggagggtttgtgatggcatcagggagaagctgcccccagggagggggtggcggtcatatatacatatatatatatatatatatttttttttttatgtcttctaaatatttttatttatttatgtatttatttatttatttagagatggaatcttgctttgttgcccaggctggagtgcagtggcaccatctcggcttactacaacctctgcctcctgggttcaagtgattctcgtgcctcagcctcctaagtagctggtattacaggcgcccaccaccacgcctggctaatttttgtatttttagtagagacgggggtttcaccatgctgggcaggttggtctcaatttcctgatctcaaatgatccatccacctcagcctctccaagtgctgggattacaggcatgagccactgagccaaatatgaatccaaaatatgaacccaaaatatgggttacatattttgacaatcacacctaggagtagggaaaaataattccaggcaaagaaaataggcagagcaaaagctgggagtggggaaacaatctcaggtcctaaattctatgccgttgggattttttcttctcccatttccaaatatcacatgtactattaatctttatatgtaaattaactcacttggcagaggttgcagtaagccgagatcatgccgctgcacgccagcttggatgacagagtgagaacttttctcaagaagaaaataaaaataagttaactcactttaaaaaaatcaatacatatattgaaaaaaggagggccaggcgcagtggctcatgcctgtaatcccagcactttgggaggccgaggcgggtggatcacctgaggtcaggagttcgagaccagcctagtcaacatggtgaacccttgtctctactaaaaatacaaaaattagccaggcctggtggtacgcgcctgtaatcccagctactcaggaggctgaggcatgagaacagcttgaatccaggaggcggaggttgcagtgagccgagattgcaccattgcactacaggttgggagacagagcaagactcagtcttaaaaaataataataaaataggccgggctcagtggctcacgcctgtaatccccagcactttgggaggccgaggcggatggatcacccgaggtcaggagttcaacaccagcctggccaacatggcgaaaccctgtctgtactaaaaatacaaaaattagctgggtgtggtggcgggcgcctgtaatcccagctactcgggaggctgaggcaggagaatcgcttgaaccagggaggagaaggctgcagtgagccgagattgcaccactgcactccagcctgggcgagacagagtgagactctgtctcaaaaaaaaaaaaagactgggcgcggtggctcacgcctgtaatcccagcactttgggaggccgaggcgggtggatcacgaggtcaggagattgagaccatcctgactaacatggtgaaaccccgtctctactaaaaatacaaaagattagccgggcgtggtggcgggcgcctgtagtcccagctactcgggaggctgaggcaggagaatggcatgacccgggaggcggagcttgcaatgagccgagatcgcgccactgcactccagcctgggcaacagagcaagactccatctcaaaaaaaaaaaaaaattagaagaatggagactttacgtatcattattataaatagaaaaccagtagcaggtaccctaaggcaataataaatgtaaaaatgaaaacactgaaagaaccaatttaagtcttagctagatgctatggcttagagttgactgagctccaaggtctctgttaaaaataggaattagcaaggccgggagcggtggcacacgcctgtaatcccagcactttgggaggccgaggtggg

SEQ ID NO: 916508 - DNA, 4001 bp, Homo sapiens
tgggattatagcgcaaaccattttgccaggctttacaatgaaagttctagatataattctattatgtaacaattggaatacttgcatgccttgttcatttgtttaataaattctaccaagtatatatgtttgttgacttatacagagacaagaagaactgaactacttaatatttaatttgtattaaaaagagccaattaaactgttaacaaccatagcttccccattgtctggaagtacattttgaactatatatatggtcttttgtctctgtgcagctattcttagaaaataaaccactgggcacactggagcctgcctgcagctactgggagcatgtcccagctactctggaggctgaggtgggaggatcacttcagcccaggagttcaagactgcagtgagctatgatcctgccactgcactccagcttgggcaacagaccaagaccccatctcttaaaaaataaaaataaaaataaaaaaattatttgccaggccaactaaaatttcagtgaagctggatatataccatggcaaattggctgtaacaggtcaaacaagatgcctccttcctggggaattcatgcacttataaaagagcaagggagcaagaggaaaaaggagaaagaaagaaaacttcagctgcttacaaactgaaaagcttagagagtgcaacaggaatattatctagtattccgcttctgctagattcccactttctagggcctgcttttataaagcattacacaaaaacagggaccatttccttcagggacaggagtgaatgcaaagggtaaccggacctaactaaatggacttttccccagtggctcagcccatcacccacgacaaatggggcattgaaacagtcaaggactgccccttccaactggcaacagaaatacctggattccaatcaccatgctattacaccaggaaaacacaagctctccagggagatgaacctgcaaccccatctattatttcccctgctaaggtaatccggatccggatgcagatccagatggaaaaccactagaaattcaaagatgcttctccatttggggtggaggtgctggggggagggcagggaagtaagagggaaaaatccttaaacacccacaaatacaatgcaaaaaaaaatttttttaacttgatacagaatgaatataagagcagagcttttatatttcccagcaacaagatatgacgcttttggtgtccctaccccctagcaaaaaaagggagctggggaaaaggaacgattgatggttatgaaacatgaaagttaactgggcgctccgccttgacgggaggcttgggggagaggaagagatttcagatggggatgaggccagatcccgacattctgagctcacagtcagcccgcaatggctggtggcggctatcgggtcaaagtgggaaggagagggagaatctatgcagtcgcctaagctacggaaagcagggaggacggagaaaagccaccgctcctgcaactacaaccgcgattccaaaaggaaaccggggcaccttggcaaaaaatggggggaaaaattaaaaaaaccccacaaaccccccgcccctcaggaagagcgatctgcgattgggccgcgcgagtgtcactcaagggcgccgagtctagaaaaggcgcaccgcggccgggcagagctcccacacgccgaagggctccgagggggtcaggccaatcggcagccgtcaccccacaccccagcccatcaccacactcaaggggccgctaagacagtgtctcctaagtctcgtctcctgtccccagcggcctacagctccctgcaggctggtggccgcttacctggccgccgctcccgctgccgatgtcagggtcatgcaagcggcctctcgcgaccgttacccgagggagcgcgcgcgcgcccggcgtctctccagtgattggctgcccggaaggaggcggagacagcctcgcatggcgcgcgcgtccacctcgccgttccccctcgcgcagctccaaccaaagagagacatccaaccccgggggagtgacaagggggcgggattgctgtgaaactctcttctctgattggctctctgggagccagccgctgccacgagggaaagaagcttcagtttctcgcatgcgcagtgagtaaacatgagcctctggtagataagagaaaccgcgatcggagtacggcgcgtgcgcagatcagggatcgcgattgcgaatcctccgctgaggtgatttggatatccctagaacgttgagggcacgagtcgggtcctgagaccaggtaagcatctgcggagaagccaggtaaccctacggctgccgacgactgtcaaaggctccggagagaggactgcgagccgggacgcctgggtttttcccgacttgcgaccccgagtggcgcagccagtttacctgaggccgcgctggcggtggggtggggccggccgtgacacccgagctcagttttctcgggacctggtttacgctaggtgctgtgggtcggccctggggctgttcaggcactcagggcaggggagaggagagactaccgtcctggagataacggttccacggaggcccaaggcgaaacggaaggatcctcatgtacaaaactgagcggaatggagctgtgagcacgcatcaggtgctgtttcaggcctggcacgtagtagaggtcagcactgcccttgctaggcttttgcggagatactcgttttttttttaatagacgtggggtgggggggtctcactgtgttgcccaagctgatctcgaactcctggcctcaagcgatcctccttcctcggcctcccaaagtgctgggatcacaggcgcaagccacccagccctacttttgaaggaccaaagggaactcgctctcctccccgtgggaccccagcccatttcatgcgcactgtgcaggccacattcttcagcatagttaacctttaaggtctttccagctactcgatttacctccaggagttctggctcacagtaaagggacttccctggcactatcacttaggcctccacaacccaggaaatggatctgcccttggaataacagatctgccaggaggcgttacatctcattggagcttcctaagtatacctaccaatttttttttactttttttatttttgtgggggaggggggtaggggggacaaggtctctctctgtcacccaggctggagggcagtggcgcgatctcggctcactttaacctctgcctcccgggttcaagtgattcttctgcttcagcctcccgagtagccgggaataccggtgcccgccaccacatccggctaattttttgtatttttagtagagacggggttttgccatattggccaggctggtctcgaattcctgacctcaggtcatcctcctgcctcggccacccaaagtgctgggattacaggcatgagccaccacgcctggcaattttcaaagggtaaatttgatgttatcctatctttcatgattttttaaattatattacataattccaaaagatattttatgtttaaaccaggacttacttcattgaagatggttttatctttcagtgtgaacctgctgggaagtcaggctatatttttggcatcacagtgatctccttagtacctgatttcacagaccagaattatgatcccaccaaataacatgttttcagtaatgtcatggcttatcaagtacttcttaaattggaccataccaagtaaaataatttacaagccactgttgtagatgccttttcaccctaagctctaaaacaaaggccgatgaaataatcagttcccagactgggtttgtgtcataagacaacagtgtatgtggtgtgtcattccaaagttcctcagccttgtagttgagagatctgacatgctcccatttagtgaccactaagtactttacatttatggcaacatgtatgattttgttcgcactctaggtagtagtatctccattctacagatgaggaa

SEQ ID NO: 916509 - DNA, 4001 bp, Homo sapiens
tttaggttttctcccactttccattgctgcaaacactcctgcaaattacaggcatatacaataactaaatgctttaaattttcttaattcttaaaagtttaaaagtttttaaacattaaaaaaaatttcacttactttggactggaaataaatgtttcaagatagttctctttgacatcacccattttactgcagctacagccatggtgtttcaagatgcttatcaagtggtatgaaaaaagatgttctgaagagaaactgcttttagaatctgcttctaagcataccaatttctactcctgctgaagagataaagaaaaatcagtgctacctatggtaaatttaagttatattaaacaccacaagaacaaggtaagaatcactgcctagaagtcaactgaagcaatgcttttaaacaacttggcaattccacatgattgaacaacaggacgaagagcgacatggacagaatataagatcagaaccactggaactatgtccattactatttatcttagatacaaacttctctgcaggacccagtgcagctccttccacttaatgaatactcagtaaatgtgtaattactcttgaaacagtcactcacaaatggtacacagagtattcattcttttaatgctagtgtggctgtgtacaccctccaaggttccatacacaagatactacatcatttacagtactatcctgtttctgattaaatgaaatagttgtctgccctgagccattaataataataataataataaagaaatatcaaacaaggcctatccttagcctattactcaattggaggaactcataaatgccctcaagtcccagataaaatttcaccatcttatatgtgtacaaagtctttaactttccaacgtactttcaccaccatttcattttgctctcgtattaatcatgtgaggtatctttattctgattcatgaagaaactaaagtacaaaatttaaacgtcttgcttccaaggactttagagtcagtcactgccaaattgggaaactttaaacaagtcattaactaaacgatcctcagtttctccaatgacaaaatggggaaaaccacaatcttcatggcctgttgtgaataaatgacaaataaccattgttaaatcttgtttttaatagtcttcaatgagtatccgtgcccttccccccaatagtgataaaagagaattaggacacaggccctcttatttgctagtctaaaccactcacactgataccttgcactgccagtacattaacaccgttaaccctgagctcataggtgtgctttttagtttacaacccactttcatatacaatatgtgctctgactttcacaagtgtgtgaagcagcatctccatttcagattaagaacaaaggctcagagaggtcaatcgattacttgctcagtatatcgctgcttaatacatgcgtgggacgtaaacccatgacttctgaccacgaataaaacatcttgggggaaattaggtcccctctgtccgaagcccagagaaaagcacgccctgctgggagtcagattattcaccccaggaagatcatttcagagatcaagtccctcagcccggaattcaaccccaaaacaaaagctacagagcctctgagggtcagaggtttgaggaacaggctaccaagagcaccagaactcttcgacctaaaggagtccctagagccacaagctgcatcacctccccacgggcgtccgccagggaacaaagggggcgctataagaaacgcgcagccacatgccggctcttctgcaggaaggacaaaggctggggatgcaggcaacctcgccctgccgggaacgacaggcgggagacctctacaactgccgaccaacactgtgggactgcccagtttcgaggaagtcctcgacaggaggagtagagggaagcggttaccttgacggcttctcaccacgaacccgccatcttgtttcaatcctggtcccacgaaacagcgctgcgcgcgccgtcccagcccgcggggcattctgggaaatgtagtctccgcgggaaagcggcccgggtgcagagagaaagggaggattgttgctatggacttttacctttagttggggaagcgtggccgcagtgttactaaggtgcccagaaaaacaaaatcactgccccaaacacatacccttagaaagtaacaagcttttttttttttttttttttgtgaggcagtctcattctgtcacccagactggagtgcaatggctccctcacggctcactgcagcctctacctcctgggcccaagagagcctcccacctcagcctcctgagtagctggtactacaggcgcacaccaccacacccagctaattttttaatatttttgtagagacgaggtctcggtatgttgcccaggcttgtctcaagcaatcctcctgcctcggcgtcccaaagtgctggaattacaggcatgagccaccatgcaaacctataagtactttttaaaaaaattatgttaatattcagagaaatcgtagattgctctttagtagatgagttaaagtttcccaggggaagagacattccagagaagccctgaaatgtggaggctaggatttggacgtttgaaatcagaacctgaagagaacctccactctgaaaacctggcactgtgccctcagaactgtgctggctacctattatgggaggaagtaaatatgcagaatcttggacctcgctttccatcttaggaggaaggaaagacctctgggcctttgcactctctgttcccattgccagcaatgtgcttctctgacctcttctcatgaccttacaggtctttctcaaatatcatcttagaaaggaccacaccattaaaatagcctcacccacccttattccatgccccgctttattttccttcagaatatttaccattacctgactttatattgattatttgtttgctcgttgaatgtctctttctttttttttttttttttgagacggagtcttgctctatcgcccaggccggagtgcagtggcatgatctcagctcactgcaacctccgcctctcagcttcaagcgattctcctgcctcagcttcctaattagctgggattacaggtggccaccaccacgcccagctaatttctgtatttttagtagagatggggtttcgccatgtttgcccggctgatctcgaactccttacctcaggtgatatgcccacctcggcctctcaaagggctggattacaggcgtgagccaccacacccaacctcgtttaatgtctcttatgctggataatgtaagctccttgaagacagagacatatgtctatcttgttcttcactgtatgcaaacccagcatctcagactgtgcttggtctcattataggtctccaggaagtgtttgctgaatgaatgaaaagactagataacgctgcaagtatccaagacagtagatgattggctggtaaagcagaagcggtcgcctggaaattcccttctcccatgatttgcaaaattttgcttttgtatatttttctaagaaataatctatagcttttattatgtattccagggaattgataaacccctcaacaagttaagaaccatattcctgaagtgactagtattgaaagtaagtgaacacacatcacatagtaaagaaaactaaatacgggctgtgtagtgtgtctcctcatttcccacggaatatcaggaggctaatctttgctcttatagaagcccacagagggcccatctgtgtcctttccagtcgtgtccatcctccaaagccacccatgatgtctttctggactgtgcaataggaagggacagagaggagaaacagatttgaatgagcagtcaactggactggttgaacattccctgcgtaaagtgtaagaagaatggatcaaagataattccagaggtcaagtcttgatggctgtgagcagagtgggaccagtccccaacagggagactcacttagtgggac

SEQ ID NO: 916510 - DNA, 4001 bp, Homo sapiens
gtccgccaccactcctggctaatttttttgtttgtttgtttttgtattttcagtagagacagggctgtgttagccaggatagtctcgatctcctgagctcgtggtccgcccccctccgcctcccaaggtgctgggattacaggcaggagccaccgcacccagccactttatttttagtagagacggagtttcaccatgtcgcccagaccagtctcaaattcctgtctccaagcaatcctcccacctcagcctcccaaaatgctgggattacatgtgggcaccattctgcccagctgtaattcttaaaaattattattaaaaaagaacaaaacacatagatgccctagactcaactcagctctactgatcaatctttaggggttaggactaggcttttgaaatgttaaaacacccagaaaactgatgaccagtcaggcttagtatccgccatctctaccattcatatggtacttaatgtttcatatttaaatggaaaggacacctcacacttttttgtttttcctatagttcctactcagagaatatgcctaataaatattttatgagagtagtacagaagtatgactccatttttctcttatatttcatttcagtgtggaaggctctttagaaacactattaacataacagcattatgtcaaaaagcgccaataacattctcaccaacttttctttttaaaggaattaggtatagctagactgtaaaaggcaagtggtgtgaagcccaaacctaagatcctaagatctaggatgagtcaagacttcatagtctacatgagtagaggcagcatctagaggaaaacaaaagtatgtggctatcaaattccaaagaagccccattttattacagagaaaatacaaagccgtttcctcacagggaaaagtacagtttcccttctccagggtgacagatgagccttttccgaagttctcagctttctcttctatcgaaacttcccatgtcggttaaagtgtttgtagagatagcggatgcgtttattaaggttgtgcaggtcatcagcgaacattctacttccaaccattttcctctttcggatacaacgttgcaattcattccctttccaacctcgaagccatatgggccccctgatcagttctttggggtgcttttcaaagtttcctgtgtaatgtgagagaacacattagatccaagacaagagaactcatcctacaccagctaagctttcaacccacggttgcatcttgctgagcagcacctatagacaaggaacattacagtacagaacaatagcacagactctggagccagactgcttggggttaaaattctgatgctgccatttattaactttggaaaaactgtttatttttacttatgaagtaaaaattatacgaggggactcagaacagtgccaaacacaatgtaaacagctacataagtgtttgctcttactattgagcacagtaccactctctacacaggaggaaaagatagtcgttacagcctaattgccattctgaaattgtgtaccacgtcgaaggtcaagtcttacccaggatcccgatgttgtcatacactccgaacatggcccttttctcgttccaacgatcaaccactttggggggcgggagagtgagccttataccgatcaatctaggcacacctggggatggggaagggagggaattaatctgagccgcctattatactacgaagcagttatcggggtgcctacatcagccacttaccaagagagaagcttctgcacgccagaggcacccagtcccacaggcgcctacctgccccggataagaggttccctgccatttctctagtctccccccttcaacagcacaccaaataagcccaagaagatgacaggaaccgtccccgccaacttcacacgagtactaaggcgaagacagccatcttgggccttacccaggcagctgtgggcgcaccgcccacctacgccccatccgcaacagccacgagccccgccccccgggttccggcaggaggggcctctaccacccttcccgcctcagtgcttccggtccgcctgccggaagttttggagcgccggacaagctgaggtccgcgactcgtcgctaagattccccaaaactgagatttcaagaaaattcaccctttccgctttctttggcgtccttcaaccgtgaaggaaatgaaggttgagaacctggaacccgcttccaatgaccaagccctttctctgtgcctcacaacagtcttccgctgtagctgtttttattacccctattttactactggggaggagatttgaggtcctgaaagtgaagtgacttgctggacgtcacttagcagaggagatggcgaaacctggattagaggcgatgccttctaactcccagcgtggacttgcctcctttcctgggggtgactgaatgcccagccagggacgcgacgtctctggccagcagaaatacggcctcctccccgccgactgggcaaagggggaccttgcggccaaggagggattcgcaggcgggccgggggtgggagcgggggccggagccggagccttggcccgcccccgggcggcgctgtgattggccggccgctccggcgggcgtcgcgattggccgtcctgcagccgttgagatttgaactcggtatttgtggctttgcccgcgcgttgccagactcagaggcggccctttgcctctgcctgccggggattggccggattctccgccgacttgaaaactgccttgctaattggtgcgtgttgtgcacgcgtgttttttccttttcatttcagcctgactgccggaatcagagccgcgggtgagatccccaggtaagatgtggtgttgcaggtcgtaaaagagtaggaaagtcgagtacatggcagtgtgacccagtcttgggcaaaatacaataggcctagtaagtatatccctggggcgcgatgtgtgagaaactgtaagtctgacagatccgcaacggaagttgttaagcaaatcgcttaacagatccgcaacggaagatgttaagcaaatcgcttaacagatccgcaacggaagatgttaagcaaatcgcttaactttcttacttcaatttccgctctgtaaactcatttgtattattatgcacctcatgggattgaggttaggatacttagatcagatatgatacatgcaaacagcctaacagacttggcacaggataaataaatcatcattgttaatgctcttaccattctggtgcaggaagcccactagcccatgctggggcactgttttggcctcagacgagatcagaccattctctctatacttaaggagctttgcacataaaaatggaaataatagtactttgcacattaatatgccactttatagttctttaaacaccttcgtactgcttgatttgtttgatcatcagagcaactttgtgaagtaatcagagtttagtaaccctgtttttacagataaagcccagaggtttaagtgtcaagaccaagtgccaaagtcactactagaattagtttctagtccagggtcaatctcagatcccgtaagataatgttactagcttgctataaaactaaaaaccattatatatgttgggggtggggaactaacaaaaccagatgatgttactagcttgctataaaactaaaagccattatatatgttggggatgggaaagtaatagaaccagatacgaagacaggtcttgaatatagaccctgactttttcactgtttggtttctagccctgtgagcctgtaggagtagaatggctccccaaatgtatgagttccatctgccattatccccagaggagttgttgaaaagtggaggggtgaatcagtatgttgtgcaagaggtactgtccatcaaacatcttccaccacagcttagaggtaagagtccatagctgtcactgtacctagctctttcaaaggaccatctcacatggaattgctacattgtcatttctgttc

SEQ ID NO: 916511 - DNA, 4001 bp, Homo sapiens
cagtgctgggattacaggaatgagcccccacactcagccccttggcagggcttttgattttcttcttccagtcttcccaattcgtgtacatggaatcatcattcatccaattgctcagaacaaaaatgtaacaggatttttttgagacttgtcctcaagccccacatcaaatccatcagtaaatcctatgaactttaccttcaaaatatatcgcaaatacaaccacacctccttctccactattactttaatccaagtcaccatcacctcatttggattactgcaacagcctccaaacagatctttggcttccactcttaccccagtaaagcagccagtgatcttttaaaaacgtaaatcacattatatcagttccctgttccaagcctttcaatataaaacccaagccaaaaatccaaatgaaatgtctacaaactcttgagagatcagattattacttaactaactctctgacgtcttatactaccactctctcctctactcacacttagctcctgccacattgtccttcttcccgttccttgatcacacccctcagattgttctcaacttttggcctttgcacttatagttccccataccccaaaggctctttccccatatctctgcatggcttggggccctgttcaaatgtcacttcctcagaaagatctttcctgaccatcctgtggccactactccccccaaatccatcattctcaatactctactttatttttcttcaaagcattaaaccctatctgacatcttatttagttgtttggttgtttatactattgacttccccaccttgccgtatctccggtgagtgtctagaacactgcatggtatacaataggagttaagtattccaagaatttaagaatgaaaatttaaaaatagacaattattagacctatgaagagccagtatgaaggattaatgtatttatagtttatctgaaaacaatgggaaaccatttgtagatcttgaacatgagagcagcaagacaagatctaaattttgaaaacctcatttggctgttttgagaattcaatgtaggagagcaagaggggaaacaggaaacggaaaaaaaacttgtagaaatgagatggtcacctgaactagatagttggtagtatgaggagagtaaattagagatataacaggaagtagcacaggtaggatccgcctattgattagactcacgccagctcctcctcaacgctcccgtcattctagccacacttctatcacagcgcctctcaccctacatagcacttctccgctaataaatctgtattttccactagagtcctccggggtaagcacgctatcaagcatccctacaatctctgttaaatggaggtcatcaacgcctgttgaatgaaggccgcccatttggtggcctggaattcagagcagcaatttgtcctagcacagccgtatgactctcttaatgtttggggaaatccatggttcaacagcgccgatgcccgataaacaacacagcaccagtaacctgtgccaggggctgtggacgggggcaacacaggagcaggtcacggggaagggggatgtaagctttctgagcaaactcccagagcacccagggcagaaacaggcggctagaagccgggcaacgcgggtgcagagcacagacccacgtccatggttttcctaccagacgggcctggcagcggacgcactggcctcccccgggcggcgctggctcagccaccgcggcacccttcatgaggccggtattccgctcttgcacctcccccaaagcccagagaagacgagacagacactcacgcaggctaggtgtcgggaccggagtggccgagtagacggcagtggagaatgcacgcagagtccttgccctcgactgcagagacagccatgctgggagcgcggcggccgccatggctgcgaggacggcaagccggaggggacaagcggcgttcagtgtcaggggcgggcctggggccgctaagcgcaggctccctgggctggcaccgccctaggctggagaaagaggaaacacgttggtctgcgcactcagagccgagtcaaatgtgcaggaagattcccccaaactgaaagaagtaatgaaaagaaaacaaaaaaaatccttaaaaatcgagtgaatcagttcgtagagaattgcagataaagaccgtagggataggggttgcggctcactgaaggcgggcgtgctctgggtggaacctcagttgatccgagagtcaggcggtctacccgagggactcttgttatttataattgttgcttttctacatttacttggattaaagaagtcttcaactaatgccagtaatatgcgctaaggggagagaagcagtatcccgagccagagtgcttgggtttcaaacttgacttcaccacttctgggatgtatgatctcagacaagttagcatagacaaatatttgtgtacagcgttggcatacagtgaacaccgcgtgtacgtagcctataacttttagctatatatggttagcttgttgttagatcagcttagaattacagaaagtcagaactcatcaggacctagaaaataaacttttaatgaacactcttaaattttctacggtaggatgaattaacatacaagccttaataaaacaattctcggccggacgcggtggctcgcgcctgtaatcccagcactttgggatcccgaggcgggtggatcacctgaggtcaggagtttgggaccagcctgaccaacatggagaaacctggtctctactaaaaatacaaaattagccgggtgtggtggcacatgcctgtaatcccagctactcgagagaagaatcgcatgaacccgggaggcagaggttgcgatgagccgagatcgcgccattgcactccagcctgggcaataaaagcaaaactccgcctcaaaaataaaataaaataaaataaattctctattttctctttattttaaaaattattttaattaattaattaattattattatttttgagacagagtcttgctctgttgctaggctggaatgtggtagcaggaccatggcccactgcagccttgacctcccaggctcaagtgatcctcctacctcagcctttcaagtagctgaggctacaggcacgcaccaccacacccagctaattaaaaaaaaaattgtttttccagagatgaggtctcacagtgttgccagggctggtctcaaactcttgggttcaagcgatcctcctgccttggcctcccaaaaaagtgataggactacaggcgtgagctactgcacctggcctattttttctatttttaagttttttgtagagttgggggtcttgctatgttgtccaggctggtcccaaactcttggcttcatgtgatcctcctgccttggcctcccaaaatgtcgggattacaggcatgggtctggcctatttccctattttgtctcaaagtgacaaaattataacagtaaaaacaactaaaaataaacaaaaccgattcttggtaagcatacaaccagtagagcagaggtatgcaggtgtccaagaatattctagctgtgaacattcagtgcgccatggacatcaatcagtaaggtatgggagggggacaaatagcatgagatggacaagtatttgtaatattcatcatcttcatcttttctggacttttaccatcctgttattgttccaaaatagaagcatgatgtatgagtttcctaggggattggaacaaagtaccgtaaactgggtgacttaaaacaacagaaatttcctctctcacaatcctggagtctggaaagtccaaaatccaggtgtcggcagggttggttccttctggaggttctgagggagaatctgttccatgcctccctcctagcttctaatggttgctggcactccttggctggtagacacatcacatcacatcaccttctgcccccatattccaatggagttctctcctctcctcggactatttttaag

SEQ ID NO: 916512 - DNA, 4001 bp, Homo sapiens
agaggcccaaggctgggggacagcagggaagcatggagagaagagatccacactatccctgcccccagcagacagacacccccatcacatgggagtaaccccctcctctgacttttctacttttccatctgccctggagccagcgccccctgcagggtctaagacacgaaggagctgtgggacaacagcaaaatgttccatgagtttgaatgccaaccaagcagcttctcctaagatctagtcttccgaagggtcgtttccaggcaagctagagcctttctcataaatcccctccgtgggcaaagcaggtccctgtcttccacacaaagcaaggagctcattgaccaaaagtcgggggaggagggaaggagagagggagggggcttcaagggatgctttgccattggtctggatgaagagggggtgtcgcagagccaaatactagttagagttcacagaagccaccgggtgggtcagtgctaccctgactcacccaatttgggctgggggagggacctagccccaccccaagctctgctctgaggcatcatgattagtacttctagggagagggtggcggctgcctctcccctcaccaggactaggggaggggggatgtagcatctcatggcaggccagggatttttctcctccctctcccccccaactctagtgacaaagtttcagagcatggcagccctcttactcagaaaaactccctccttcctcatggaccccgtccagctgtcccctggggagagtcctgaccctctcctccggcagcctccctctcccaaaggacccccgaagccccgagggccactcactgttttggagtcgagctcgtgccgcgattgcgccagcactttatccacccccgcctggtccatgaaagtgacgaagccgaaacccctgcgcgccgtagtgagggagaggcagatggttacaaggcagtgagtggcgggtggaggggggcgagccgggagcaggaggagggggtgaggggctcacctggatctcttggtcagggggtcccgcatcaccagacactccttcacctccccgaactggccgaagtattcgcgcagcccttctgtaaccacacacccgccttcggaccagcccgggccccgcgcccttcccccccccccgtcctttgcccccggtgaccccggagcggcccggccgcccccgcgccaagctgcccgcgcgttctccactgccgccgccccccaccgccctcgccccgttcccgctgagcctcctggcgcccaccggggccccgggaagccgagggccgagctgggctggaagggggacggctccggccgggttcccgccgctccgggagcagcctcacaaaagtttgagccgcaggtgcgagcggagttggcgctgccgccggcgggtcccgggggcccagcccaccccccgataccccctgaacccctcatctgctcccctccacccgctgggccgggtgcgctcgcggatcgccctgcgctctcggggtctccgggcggggcgcgaaagagggcgcgagggcgcccggggtcagcagggcgcagggccgggctggggtgtccgggtccggggcgccggggggtccggggtgccctgccggaccggcgggcgctcccgggctcgctcaccctgcgtagtctgccaactgagtcccccgatgaacatcttgctgcgggaggaggagagacacaaagggcccgcgtgagcgccgggcgccagggcgcagggggcgcgggcccgggctccggggaggcccggccggacccggatcggccatgttggcggggccggggcgggcgcgggccaagcaggccgggccgggccgtaccaggggtcgtgcggcgagtccggggaggcgaggccgggctggggcgcgtcagtctccatcgggagccgcgggcggcgcgggcagcggagcggcggcggcggcggcggcggcggcgctcggcgcggggcagatgaggagcgcggcgaagggggccggacggacaggccatgctgccccctcccccgaccccgctcgggcgggcgggcggggacggccgaggggagggcccgccgggggccgacctgccggctcctccccccgccgccctgcgcgcataaagccccgcgctcgcccgcgagcccgggcgcccgcggaggcggcggcgccgggacccccttcccgcggggctcctgggtctccggggccgagcgagacccccgaatcccggtgcgggccgggaccagggcgcggccgcaccccccacccaccccggcgcgggggcccggccgcgggaacgccctcccggaatgaagcgcttcccggtgccttcaaggtagctcggttccggatcgggaacccccccggtcttccctctcaggtccctgctgtccagaattgaagagaaccccaatctcctcgggtcgggcgggagatagccctagtgctccccagtccccacatgctccatttccccagtcggagcgagaagccgccctcagagcccccagtttcctcccaacctaatttacagccccccacccccaccccagggctctaatttagagccctcgctccgttcccaggatcccatatccagtttgggggacccactcagtgcctcgcgtcccgagtggggaacctccatcagcaccccagtagaaaccgtatcctcttccccaatccgtcctcagcccttggtgtccaaagtgagagtcccccttagtttccccaaatccctgccgtccacattagtggaccctatggtctgttgagaaaatcccgcgccccaagcccgggttctcagtttgccgccacccccacctcccggtgtgaggagtctcccctggttctctccctccctggccggtttttgtgagatccattcagactcctgtcctgattcgggaaacccggttccagacactcaccacccccaccacaccgaggctggaggaaaaggcagtgcctcttagagcctcctgtttccagtttaggagcccaacgcctcagctgtgcaccgtcccctccgaatgacccccttcttttgcagaggtctaagctccaccccatcccattggaagagcctaaactacctacccactgcatttggaatgacttccctcagtccctcttattttgaggctactccccgtgaaggcaaacaccttcctttctacccccatcttctgggtctctgggatcccccagtacttgcacccaaggctccttggagtcaccttacgtacccctaaaattccctccctccagcctgggaacaaccctgagaaagtattctggttcaccaggggagctgcggggccactctccttatccccacctctccttatccccgcctctccatatccccacctctccatattcccacctctccatatccaagccttaggacccttcacttccccagctgaaaccagccaaaaaaggatcaaaccaggaagcttaggtggccaacaccccttctccccatccctgctgggggtctcagtgccacacaagcccctccctcccaactcaccttctactccttcccccatccctaccttaatccatccggtgtaatccagtgacaacccatgttgacaagccctttgctgttcaccttcacattccatcctgaattcaacaccttttattcctgggcatcataactctgacctctggaagggtgcccatccccctcttgatagccctccttccctctccccaccccaaccatcaggcagagaagaaagtgagagacttacagtaatggtttccttggggaccttctgggaatgctcagcaggtatatcctgccaccctgtgagcataacactagaaacaaacttgctttttcctgtttgtgtcccctactctgccccacagtttctcagcatcccctggactggggactggagggccacccacacaaggcatttcttaccattccgacacaaaagcattccagtttgtgttgtagcagagacac

SEQ ID NO: 916513 - DNA, 4001 bp, Homo sapiens
tattcatatagggccctaataaaagtcatcagaaattagactgatatatcagctgggaccggaattaaaagaatatatgtttaaatggtccaaatataaacttgatgttcaaaattactggcaaggggccagtacagtggattctggtcttcgaaggccgtttcaccacaagtattaggtaagtcaacacatcactgaggaaaaagaaagcatacatatgtttcctggcaataaaatccactcttcactatccagcacagtattttttagaaatccattgaaaaatgtgaaattagaacctgttgtatttcccaagaagtgctattaaagttacttccaaaatatgaatctataaaaaacagggtttttttgaaaaacaatactatgcagaaagaaacatgaaactgatatcactgctcaagttactatttacaaattgcaaattgaataaagttaaatattgtaaatatctgccattaatctgaactgacaattttataagttatatgaaccctgaagtttttttatagacaaaattgtttttgaaaatcgatcttgccaccagcgctgcaaatgaaaatatgaagagataaaccagagagtactgaatataatctatgcttcatagagtcatgtttcaactaatttatgagtcctagtttgccatatcttatttgacaatttagtctattggtagaaaaaacaaaagcaaactaaaatctcctaagaaatctcagctctaaggaattataatttatattcttccattcccgataaaattaagaagcaagaagctttgacgactactcatcacaaacgtaaaagtccatgcaatttcacatttacctttatccctacctttgtactttaaaataactgctttttaaaataataatctgatattaaattccccccaacagttcccacatgattcaagaagattatcttataaagtcttactgtaacgacttcataactgccacttccgatagctattagccctaaaccaaataaggcaggaacagcacttttcattcatatagtttgactcgaaatagcccagtgtaaaacttcaaaaatagacttggatgcctttttctgcttaaaaacaaagcaaaactgatacctggcaaactcggggttctgttcgattttggcctgtgaaatgccaggcgggcccgctggagtctggcccagcagcggggcagcagcgcagggagggcgggcggcgggtgcgctcccgggtgcgcccctccctgccgcctgcccgccgccccgcacccccgtcctctccgaggcgcgcggcgaaaagcgcaggcctggcgggccggttcccacgcctcgggcccgttatctgagcggcaaccccggcagggtcgacgcacagagcagagggctccgggatggacccctcccctgcctcccgcgggctgccccgccagatccctctctcctgggcccgcgcggggcgagaggctcccgcgggttcaggttcgctcccgggacaggataaggtgtcagtgaggctgccagacgcctcccttcggcgggtggggggaaaccagccctgacctccttccgttcggcccctcaccgctggcgcggggcgcaacccttctgctccccttctcggctgaggcaggggctgtccccgcaggtggccgagggggcgcagcaggcgcagaatggaatcccggctcggggtcacaccctaacgtggcagggtcggggtgggaggggtgaggcgaggaggagaggggaggggagcccgaacttaccggactgcgcacttcccagagccgcggccaggcagaggcagaggcagagggagaggcagagcgagagggggcgcgggagggtccgccgcgggctcatggaaaggccaggcagccgccgccggtgtccgaacctcgctccctccctccccggctccgggcgacggacggggcggcgggaggcatgacgggaaattcctgggcacgggcagccgagtccaaatatgagcataggagacgagcgagggaggaccacggagcgcgccggccgcggacggggcccgctgcccggggctcggcggccgccaactccctcctcctctgccctgtcctcttcctcctcctcctcctcctctgcaccgtcctcctcctcctccttctctgccctgccctcctgctcctctcctccccctcgtcctcctctgccccagggctgccggccgccttctgcctgggggcatccctttccaactcgggaccccagaacacagccaagcgcccacctggcgtgttccacctgagaccgctgaaggagtgggaaacggacaaaccaacacgaagagaccggacagcgagccagggacctgtgggaagacgtgtcaggggttgttgagagcgttggtggtgaggggataaaaagttgtgggagagtgaggcaggagcagggctgccagttagttacttggccatcctatacatacagaacgagcactcactgtaatacggagaaccagccgcctgcgttccaggtgagcgggccctctctagcagaggagggtgagtgtgtgtgtgttcttggccaaaattgcaaaggtgctcgtcccaaacttatatttgaacaccatatatggagcccaggcaggctggctgaacagtagtttttcacaacaaaatgcttaagtttacaccggtctttctctccacctccaatctctattcatgtccaccccccaaccccctccacacacttgttttgtatgtaccgtagcttgtctaaaatgaaatggtgtaattcattcagaaggtgccacctctgatgaacaaaatgtcagtcctagatgtttaattacaggcccaagcctgtagttgcctaattttccttggcactgataactccttgggtaatcaagtccaaatgacccttagcttttcaagacaacataattatgtcttaattactataatatattttttccctcaaactaatgggacaggacctggatatgtagggtattaagtagttacttacgaacattttaagatgctagatgatacagaaatgatttattgatccaaaatacttaaggggtaaatgtcaaacagatttagagtgtggattatttcaacgtgaactaaagtgatggtaatttgtacatcacactatttgtttgaaaatgctgtatttgaaaatcaagaacgttgtttcaaatcaaactcagttctggcaaactattaaaacacatacaccaaaaaacagtccattgcaagtggctcccctcaaaacatctggtactgaaaaacaccacatcctgtgaattacatatagcaaatgggcaaatgtcacccttaatgcattggcaattataatgggactaagggtagatgacccagataaagtaatggtgaataaattgtaatgcaatgaataaaggatttaaatgacacataacatgactatttaattaggtacctagaacctaggtagttggaaatactgaagaagctcttcagtattccctccgtttcctctttttttatagccttgtgttacataagtgtctgtttttctacttcccccacaacactttgcaaagttctttgcccatagtccaaatgtttgtttaaaaacaaaaataaaatgggcacagccatttgtagaaaggaatttagaagctccctaagtgtaaagcatgtttcaaaggattgcaataattatgcctatatttaaaatattttagtgaagaaccttacatacaaaaatatagaattataaaaaatgcaatatcattacaacccaattcatgttagtaaaaatagagagttcattgtatcaacatagctgacatcactgtcagcaatgccaaccactattctaaaggcttgaataaatatgctaagagtggcagaaaagaactaaagttactaagtgcatgataagtgccagacactgtgctagatgttttttataactgatatctcatttaattcttacaaatatctctgaga

SEQ ID NO: 916514 - DNA, 4001 bp, Homo sapiens
cccaaagtgttgcattacaggcatgagccaccacacgtggccttaaaatctatttttaattattaaatggcatatgtattagaaaaactgatgaaccttactgttgggatagtctttggatattcttttgagttgagcaaaatagcaaggatttctgacttaatggattaacatcttagttaaaatattagaacaagcacttttaaaaacaaaaagcagtgtgttgattcaaaatctaaattacattgtatgctgcaaccttgccatacaagcagtttaagcactgtgacaaaattctagataagtagcaaagagctacttatcttaatataaaaatttccagatattcatatagggccctaataaaagtcatcagaaattagactgatatatcagctgggaccggaattaaaagaatatatgtttaaatggtccaaatataaacttgatgttcaaaattactggcaaggggccagtacagtggattctggtcttcgaaggccgtttcaccacaagtattaggtaagtcaacacatcactgaggaaaaagaaagcatacatatgtttcctggcaataaaatccactcttcactatccagcacagtattttttagaaatccattgaaaaatgtgaaattagaacctgttgtatttcccaagaagtgctattaaagttacttccaaaatatgaatctataaaaaacagggtttttttgaaaaacaatactatgcagaaagaaacatgaaactgatatcactgctcaagttactatttacaaattgcaaattgaataaagttaaatattgtaaatatctgccattaatctgaactgacaattttataagttatatgaaccctgaagtttttttatagacaaaattgtttttgaaaatcgatcttgccaccagcgctgcaaatgaaaatatgaagagataaaccagagagtactgaatataatctatgcttcatagagtcatgtttcaactaatttatgagtcctagtttgccatatcttatttgacaatttagtctattggtagaaaaaacaaaagcaaactaaaatctcctaagaaatctcagctctaaggaattataatttatattcttccattcccgataaaattaagaagcaagaagctttgacgactactcatcacaaacgtaaaagtccatgcaatttcacatttacctttatccctacctttgtactttaaaataactgctttttaaaataataatctgatattaaattccccccaacagttcccacatgattcaagaagattatcttataaagtcttactgtaacgacttcataactgccacttccgatagctattagccctaaaccaaataaggcaggaacagcacttttcattcatatagtttgactcgaaatagcccagtgtaaaacttcaaaaatagacttggatgcctttttctgcttaaaaacaaagcaaaactgatacctggcaaactcggggttctgttcgattttggcctgtgaaatgccaggcgggcccgctggagtctggcccagcagcggggcagcagcgcagggagggcgggcggcgggtgcgctcccgggtgcgcccctccctgccgcctgcccgccgccccgcacccccgtcctctccgaggcgcgcggcgaaaagcgcaggcctggcgggccggttcccacgcctcgggcccgttatctgagcggcaaccccggcagggtcgacgcacagagcagagggctccgggatggacccctcccctgcctcccgcgggctgccccgccagatccctctctcctgggcccgcgcggggcgagaggctcccgcgggttcaggttcgctcccgggacaggataaggtgtcagtgaggctgccagacgcctcccttcggcgggtggggggaaaccagccctgacctccttccgttcggcccctcaccgctggcgcggggcgcaacccttctgctccccttctcggctgaggcaggggctgtccccgcaggtggccgagggggcgcagcaggcgcagaatggaatcccggctcggggtcacaccctaacgtggcagggtcggggtgggaggggtgaggcgaggaggagaggggaggggagcccgaacttaccggactgcgcacttcccagagccgcggccaggcagaggcagaggcagagggagaggcagagcgagagggggcgcgggagggtccgccgcgggctcatggaaaggccaggcagccgccgccggtgtccgaacctcgctccctccctccccggctccgggcgacggacggggcggcgggaggcatgacgggaaattcctgggcacgggcagccgagtccaaatatgagcataggagacgagcgagggaggaccacggagcgcgccggccgcggacggggcccgctgcccggggctcggcggccgccaactccctcctcctctgccctgtcctcttcctcctcctcctcctcctctgcaccgtcctcctcctcctccttctctgccctgccctcctgctcctctcctccccctcgtcctcctctgccccagggctgccggccgccttctgcctgggggcatccctttccaactcgggaccccagaacacagccaagcgcccacctggcgtgttccacctgagaccgctgaaggagtgggaaacggacaaaccaacacgaagagaccggacagcgagccagggacctgtgggaagacgtgtcaggggttgttgagagcgttggtggtgaggggataaaaagttgtgggagagtgaggcaggagcagggctgccagttagttacttggccatcctatacatacagaacgagcactcactgtaatacggagaaccagccgcctgcgttccaggtgagcgggccctctctagcagaggagggtgagtgtgtgtgtgttcttggccaaaattgcaaaggtgctcgtcccaaacttatatttgaacaccatatatggagcccaggcaggctggctgaacagtagtttttcacaacaaaatgcttaagtttacaccggtctttctctccacctccaatctctattcatgtccaccccccaaccccctccacacacttgttttgtatgtaccgtagcttgtctaaaatgaaatggtgtaattcattcagaaggtgccacctctgatgaacaaaatgtcagtcctagatgtttaattacaggcccaagcctgtagttgcctaattttccttggcactgataactccttgggtaatcaagtccaaatgacccttagcttttcaagacaacataattatgtcttaattactataatatattttttccctcaaactaatgggacaggacctggatatgtagggtattaagtagttacttacgaacattttaagatgctagatgatacagaaatgatttattgatccaaaatacttaaggggtaaatgtcaaacagatttagagtgtggattatttcaacgtgaactaaagtgatggtaatttgtacatcacactatttgtttgaaaatgctgtatttgaaaatcaagaacgttgtttcaaatcaaactcagttctggcaaactattaaaacacatacaccaaaaaacagtccattgcaagtggctcccctcaaaacatctggtactgaaaaacaccacatcctgtgaattacatatagcaaatgggcaaatgtcacccttaatgcattggcaattataatgggactaagggtagatgacccagataaagtaatggtgaataaattgtaatgcaatgaataaaggatttaaatgacacataacatgactatttaattaggtacctagaacctaggtagttggaaatactgaagaagctcttcagtattccctccgtttcctctttttttatagccttgtgttacataagtgtctgtttttctacttcccccacaacactttgcaaagttctttgcccatagtccaaatgtttgtttaaaaacaaaaataaaatgggcacagccatttgtagaaag

SEQ ID NO: 916515 - DNA, 4001 bp, Homo sapiens
acttgggattctttccaacttcttctcaaaatgtgatcttgtcagttccctgcaataaacttgccaatggcattttaggataaagacaaagtaaaataaaacatagaaatgccttaccatggcctacaaggcctctttgggctctgccaccaccctaattcccatttccctctcctgcaccagctgcatttgcttcctgtcagtccctggtgctctactggtttctaccatgtggtctttgaagactgtgggccagattccatgcccaaaatgctccaacttttaggcctaagtgtcactttctcaaggaaacttttctaaccttcacgaatacatgaagcctcctgtccccattacatgatttcatggcaccatggacttttacacttgcgcacaagtggtacaacagctgcagctgttcacgtgttgtttctgtctcaacactacatggacagactggtcaccacagtgttccaatgaactgcttccctatccttcacccagctgccttcactgcctctaggaggcattcctgggcaggtggccttctgtgtgctcttccacagcaccctgctccggacgctactgcagcacttattatgctcttacaagttcttcattcttccaaccagtaggaattttgttgctgtttgtttgaagttcaagctgtgtatcaggcatactaggcacagatctgctaaaacaacacttcttcacacctctgtttggatcacagatcaactcagaacctgagagtcacagactctctttccagaagaaaagacccacgctcacaacatttcgcaaatgattttagcaggattcatggacaccctgcagcccggccatgaatgacctgcactagatttacaagcgttgggaaggcaggaactgaacggtgttctgctttattccctgcacccagcaaagaacttgttccacagagagacaaaattagtatttgtcaggtgaaactgagtgaacaagtggatgcggtacattaatgcagtgggtaaaactgggttagcagagccagactgcctgattcctggacaacagttgtgttgtgacttgaagaagttacttcacctctctgagcctcagtttggcatcaggaaaatggtgatactatctcctgggtgactgcaaagatcaaacgagttaataccataaatcacttagaatatgcagaaaactcttcacatatactaaatcattaaatcatcacaacaactcattttaaaatgaggaaacagacgcaggtaaaggaacttgcccaaggttactcagctaaaaaaaaaaacaaaaaacaaaaaaccggcagaatttggactcaaaccccacaggttggctccagagtcctgcctgctcttagccctgtgcccccacatatagcaatgcttttggtaaatgtttgttaaatcacaatgtgggctgttctaggatgcttgtttcttaagcatttttggggagtgaaattcacttctgtaatacacagttatggttagtatggtcttctctacaccaccactggtttcaataaagttcttctttcgtaacacatatgccctgctgccagtttcaaattgaccaacgtttataagcaaggaaaaacgagggtccacggaagatctccaggaccgatcaaaaggccgcacattcactgtggggcctccgcttttccagagaaacccggcaggctgagctgagcgtctggcgaggcgtggggttttgcgggccctgaccgctgcggcgccgctggtgaggaacacgcccaggagcagaggaagggggcgactcacccgtcggcgtcagctccaagcaaggcacagggagtcccgggggccaggccccgtccttccctctctctccggccagcctccccacagtccgcagtccccgaggcctggagccgggatttcggtcctcggtctcaagaagctcccgacagttctcagcagcgccaaccaggccatcagtcccttcgcccatggccaatcagggctcgggagatgaccgccaacccccgcccccccaagacacgcccccgcgtcccaacgcagccagtcagagcgcgggacacaactacgcgtccctccccgcaccacgagggcgagtcggagtgggaatcggctttccaggcagcccagcctgtgctggcgggggcatctggcattttcacaccctttccttcccagcattttaggaagcggagttccagtagctttgacgcttagaaaatataagaaaaaaaagaagtaacagaaaccgctatatctttaagatagagccaatcactgttcccaaaataattcagttaggtaaagaaccaacttacaaaagaaatgtttaaaaaacccccaaagttctttgaaacacatctgaactcttccccgcccccaccctaccccagcagttagcgactgtctttaaaagccattctcctttctctccctccttgccaccttcacctaaatactccccttttctgataaactgccaagtggtttccattctaattattaccggtgatgcccaacctcatacactaaacacgttaatttctccttaaagccaggctgaatgtctctctcatttattttcacatttatccatccaaaaaacaagtatttatggcaggcctgctaagtgccaagcatattgaaacagcaatgagaaaatagagggggaataaaacacattccctgtccttatggagcttacattctagtggagggcagagatatcaacaactaataacgtgactaatcacacctagttaagtgttatcgaggacagggtgccctgagctgggcctggtgattctgtttgtgtggagttggagtcaggaaaactggttttcccagctggaggtgtctgctgtcaggtgttcgtagcacactgtgcacagttctgccgtcggtggcactggcatacagactgccctcgcaccctgtggagtgaattccttgaggctactgattattttttctgtcaacaatgctgggcacacagtaggaactcaggaaatgttaactaaatctttgagtctagtctcactatgcagtttaggctcaacaggctatattgagaggagctcacacgtgcatttaactccactgagtagcagcaagaatcctggctcctcaagatcacccacctctgatctctaggatattctagaatgatctgagcaactcatgtgtacagctggggggtgtttgtccagcaactcctgagttatccgaatataaaaactctattatgcatagatttattgcacactttttcctgaaataaaatgatttggggtccagactaaccaaagtgtgtcatttgcacttaggaaaaggaaattaggatacagaaaaggaagttaaggaatgtaaactcaggacttagaactgcaagctgccatcactggtcaggagggagggagcagaaatgtgcaccagggtgctggaagcttgtattagggctccacgtaattgtgcaaggaattacaatacatatgaccccgtgcattgtaatcaaaacttgaaactgacaaatcagctatgccaactgtattaaataaatgctactcaaagttttttccagcccaaatatttaaacagtgcatttctaggaccatataatcagaaaaaaaaccttgaatgaagaaaaggggaaaagaacttacaattatgcatattatgtacaagaaaattacaaacacatttgaattgtgagaagatcctgaaatttctagtatgtaagagatgcattaaaaatactgatagacttttatatctcaaatttacttatttattttaagcaaatatgaaaaacataaggactttgtacagttcattcaaaaccctggttctctcaatataattttcccaagttgtcagtacagtttttggcaataagaattgaagaagtatttgctgaatgagtaaaatgtcttaaatcccttaaccacaagtaggatttctagttaaggggagaacactgat

SEQ ID NO: 916516 - DNA, 4001 bp, Homo sapiens
agaaagtttgaatggcctggaaagatcaagccagccacaatattcccttaagccaaactgtaatccagaaaaaggctttaactctcttcagttgtctgaaggctgagagaggtaagggagctacagaagagaagttttaagttggcggaggttagctcattaaatttaaggaaacaagttgtctccatactatgaaagtgcaaaatgaagtagcaagggctgatggagaagctgcagcaagttcagaacagaagatctagctaagataattcatgaagatggctgcattgaacaatagattttcattgtaaacaaaacagcttttgattggaagaagatgacatctaggactttaatagctagagaggagaagtcaatgcctggtttccaagcttcaaaggacaggctgattctctttttagggtctaatgcagcttctgacttgaggttaaaaccactggtaattgaccattctgaaagtcctaggtcccttaagaattatgctaaatctactctgcccatgctctaaatattgaataactcagcctgcatgacagcacatctgtgtacaacagggcttactgaatattttaagcccgttgctgagagctactgctcagtataaaagactcctttcaaaatattactgctcattgacaagagttcaagagctctgatggagatgtacctggagattaatgttgttttcaggcagctaacacaacatccattctgcagccaacaggtaaaggagtaattttgactttcatgtcttcttattgaagaaataaatacatttcataaggttatagttgccgtaaataatgatgcccctgatgaatatagtcaaagtaaactgaaaatcctctggaaaggattcacctttctagatgcacattcatgattcatgagaggaagccaaaatatcaacattaaaataatttggaagaagctgacttgtagaagttcaagacttcagtagaagaagtaactgtcgatgtggtagagagagcaagagaactagaattagaagtggagcctgaagatgtgaccgaattgctgcaatctcatgagaaaacttgaacagatgacgagttgccccttatgaatgagcaaagaaagtgatttcttcaattgaaatctacttctggtgaagatgctgtgaacattgttgaaatgacaacaaaggatttagaagagtagacaaagatagatgctaaagcggtagcaggatttaagaaaactgactccaactttgaaagaagttctactgtgggtaaaatgctatcaagcagcattgcatgctacaaagaaatcgttcatgaaatgaagagtctatcaatgtggcaaatgccatagctttcttattttgagaaattgccacagcacccccaccaccttcagcagccaccacattgggtactcagcagcagtcaacatcaaaccagcaaaaagattacaactcactgaaaactcatatgatcatagcattttttagcaataaagtatttttaattcaggtatatatattgtttttatacataatgctattgtatacttagtctacagtatagggtaaacataacttttataagtgttgggaagcaaaaaactgtgtgtgctttattgcaatattcactttattgtggtaagctagaagcaaacccgagatatctccaaggtatgcttgtatccacactcttaagacacgattgttaaagctgaggtaatacacagtaagatgaaaaatccagttttcttatcctactttaaagtgtagtgtaagaaagattgctaggaagaaaaatgttggatctacagaacactaaacattcagacaaatatatacttggggtccatcacatttgaaagaattctttaaattagtttcttacctttgaagaagcaccaaagtgccacaaccaagtaccataagatcaacttcatggttgtgatttgggacctagaaatggaggatagtcattctggagagacaagtctacaagggcccttgtaactttggtttttatacccactcatcccactgtctgccatcatgggctaggtgtggtaaacttggtgacaagagagcaaaggtaaatgtcataggctgccaaagatgaaatccactttcagtctgtttagtgccttactcctatgacatcttctatcttggaccaaatccagctcataccaaacccagaacatgtcttcttgccaccctgtgcaaacagcaaaaccaggaactaaaagccccaggattaaaaactaaatatgctgaggatacacacatttatctatcccctattaatcactgcagaagtcttaatacctcaagaaactcaaatattgtgattaaatattgtaattgtctttcccttaacaacaaaatatattttaaacattaacctactttgaaacaaagaactctttacttatcaatacgttattaggcattttcttaaagaaacacaggttataagtataggtatagatgcactaagatgtataactgtacagtaatagctttattattcaaaaggatatgtaagactctaatgatataggtttttactttacaataagatatgtaaataagtagaaaatatattaaaatgaaaacaacataaaaagaatgttttaggacaaaaacaaatttaaatagaaaatgtcattcatcaatatatatatctagatatcctgggtaaagagagaagttcaagttagaatctgggaggagttctggtctggtctgtgatgagcagggtagagaggattaacaagggaggaatctcttgcgccagtcaggtggacctggaaaatggaaaggccacctccacagcttcgttgatgccatttgctcctcatctgctcccagttgctaccaagaaaagactttagcagctaaaatgaaagcagtccttagtttatctccccagaaaagcagaagaatccaggaaagggggaaaaggtatggaccaacagcctttttcttcccctttatttactcatgactcaactcacttaaaacaaataaataattcctaccttttcagagggcctcaccaatacatattgaatgcttttacacatactccttggctggccaaatctgtttagtctatttgttgagtcttaaattatttcaaaaggggacagaatttaacagattacaacattttaattgcatttgcctgattaaggtggcacatttactgaaggccatgcaatattaaatctgacaccagtgtaagtatcagagctttttctatgagtcaggtatttggagatggtaaacaatagacattttagagctggagaagaggactcactccaagaacagagaaagaggtaacaaatggaggttaaagagactaacaactcatagactttgtcatttttccaaaacccagccttttttctttcaatgattcacaaattcattaagatggtacataaaggacttttctccaacatagaaaaaaatatagttcagagggaactatcttatacattgagacatatgactcacaataacactgccattgatgatgttcttttctttatcatacacgacttcattgtgaagaagatttgatctcaggaaacccattttttagattatcattatgacataattattctgctatatgcttcacagtaagcttagacttgtaggagccagaatgatacaaagttatcaggggctgttgagcaactaagaatatatgcaagatacaacatttcaataagcaagattgaaagggaatgctatggaagctccaaggaaggtgagattacttttagcttaggagaatcggggaacatttcattacatttgcttggcacaaccctaaccatgcttaaattaaactctttcctctttccaactacacagtgcagatgaacacaactggttcatctatgaaccatatgctaacttgtctctcttaaattcattaccctgaatggacccttaagacagctaggcaattatattt

SEQ ID NO: 916517 - DNA, 4001 bp, Homo sapiens
tgtcccaggtatgagcacaaaagaccaaggccacgagtgttcctattcacagggactactgctcagaagcaataaggaaatctctagtagcctgacattctgaagccgtcccacagaataacctaagacagcatacattccaatgtagcatgaatgaggatgagtaaagggatgaactctagagggaaggaggaggcagactaagaagacgtatctcatcttagagtcatatctcctgtcttagagtgcagtaagatatcttctatcaggttctagaatgaaaagagccatatttgtctcaccctctgtggcagcttggactctgtttattagagaggtaattgtgagagccacattagatataacaggagaaattaatacacttctgatagtaaaaaaattccccattaattactatatgtacaaaggggactgggtaagagttttgaaaattatctctctctctctagaccttacacaagagctattgataaggatcaagagtcaggccccacatttgtgagttagactcacctcagcaaataagtagctccacctccaaacccacactctatccatgctgtctcaggctttatttaagagagaaaatattttttaaatggggcctcacatggcaggaaaaatatatgtgaggtctgactaaagctaatgcccttgtgaccaaaggatgcaaattcccaagatgcgaaggataaagacagacccccttaacttgtgcatgggcacaacacacacacagtacagaatgtgaagaacactttgggagaagcccaagaatgactaaaggctttggtctaccaccttcgttttcaggttagagaagggaaacaaacatcagcctgggaataaggaatatagaccattacaaagagtaaagcttagaactgacccctgcactccacatcccacacaccaccctcacttgtgatccaaatggacttattttcatatcacttcaaattctgagacccactggtctctttttgacactggctatatattcagtccttccatttattagaggcatctctcaaaaattctcaggctacaacatcagacctcatgctcttgtgccttatgctggaaaacaatgaataataagtccacatttgtataagtctatggcctagatttcatatattctaagaatgtataagaaataagcagattcactatgtttgtggtgaattttaaaatcaggaatatagctttcacagacttttgcttaggattccttataacaaagactatccacatggaaactggctgtttgacatgaggctggaagtgaaaaatggttattgctggaaagagatgacattcaagtgcagactcactagctggatacgtgtcagctggagcagctgttgtcggattctctgaaagagaagaaggaaaaattaagatgttagctgaataccagtttggaggatggaggtaagagagaatatggacaatattccagactttacaatggaagaccctcagtccttggtgtaccagttgaggaagaacaagtgcacagataagataaaacccatgaaaaccaataaaaacctaatatgtggtcatttttcctttcccgaaataaacctctgattaccttcttgaacatattttactaacagtaacaataaacttgggttccaaggtattattgaagtaagatctgactgaattaagaagagcctaaggataaccatctccatcttgaacggtcagtcaaaatggtgatagaacaagttaggagaggtaaaaaagcacattctaagcaaccataagcccacatctttagaggagatattttatgtatattcccacaaaacttatgttcaggtaagaatctttacttacgggcagagaccagaaagatggaaactcccaagagtaccaggactgctaagaacttcatggtggtgacctgaagatcagggagcacagacaaaaatgcttcaaagcctaagagaaggcaaggcgctgacttcaggattccacatcctgacaatatatatgcagagggcaccaatcaggagctgtcaaccagaatccaggttaggtaatgccaggaaacgttgggacacaaaccactggagaatcaacaacacagccaggggccctttggaaaggttgtgaattcaaatcattggttctggctaaacaggtttcaattcgagtctctcatgttaaatatgctccaggcaacttctcttccaggcatcctcttacatgtagggtatagtgtctccataattaccagctcctatgacaggttggagatgccccataaccagccttcctgaaatctgcagtgctcttttcatagattctaggagtcatacacttacagagtgcttagacctctgtctccccctaggggaataatcagggtagagcagcctgatccaaagaccatccggtgtaactcaggctgtgcattcttcgagtcatggcctccctcctgaacatgtaattaggtcatctgacactggtgcagagtgagtccaacactgaatgatctaaagaacgaactatgaccttactggatttagcaaccattgtataaaaattcaaaatcaaggagtaagtatacagaataaactaacatttgttaattcatgcatccatttaatcaattttttcattcaaaaaacattcattgagcattattgtatgccagacacaatgctagatgttagaaaaataacagcgaacaaagcacacaaaaattttatttaatacatggttttgcaggaattcatacactaaaaaagtaaagaaagagaaaacacaatgtattatgtgtgaggtgataaggcctaataaaaaaagaaggcaggaaagaagaaaggagagtttagagatggaaaatggggagcaattttatataaggtgaccaaaaaaggcattactgaataggtgatatttgaacagactcttaaggagctgaggaatcaacaacgtggtatatttggataatgcaacggaaaggaaatggtcagtctgaaggaaagcaatggtgagtgcatgtagaatatggtcatccagacttctctgcagttgttgagtagggcccagcactgccccaagttccatcaatctacttgccctttgtcataatggagccaagctgctaagtaaagacagcaagggaggaaaacaatccacatttacagcacaatcaagtgctggacccaactgaggcctcaaagaggggtgatgaacatttggaatacccagaatcatagggaattctctacattttaaagatttcccttgctttaaagttcttcttcttcatacaaagtatgcctttttgggtcataccctcattggaaggatctctgtaatctggaagagcactgaacatctatttctccttttattggagagtctgtctgataacagcaaccagtctactccccaaaacatgctaagaggtccccatcaggtgaatgaagaaaggcagaggaaattcttgagggagtggtcttcaacctcggaaagacaagtcagtgtccttgtcctgggtaaactcatatcttccatgaggcacagagttgtcataatatggtgagagattagcataaataacgctaagaaaaaaacacatattctgaaggaaaagtgaaagagaaatatttaaaagagataaagaaggaaggaagacttaaaagacagatactatctgattataccccgtagggaataagccctacagtcacctttgtaaggcctcccaacaacactgacacaaattgaagggtcttctaggagacggttacttattgagagcccactgtgtccctccacagaggcagagacccaccacacagacttaagacaatgactggcttgctaagaaaaaaagattaaacatatgtatcagttagggtccccttaagagatcaaaactgcacagtggattaaacaggaaaagtgtgatacaaagaatttctaaagtttgatatatgagtagtttt

SEQ ID NO: 916518 - DNA, 4001 bp, Homo sapiens
cagtgagaagccaggtgtggtggctcatatctgtaatcccagcactttgggaggccaaggcaagaggatcacttgagcccaggagtttgagaccagcgtagtgtcagaccacgtctctacagaaaaataaaagaaaaaaattagtggggcatggtggtacacacctgtggtcccagctacttgggaggctgaggttggaggctgcagtgagccatgatcgcaagattgcactccggtgacagagcaagactgtctcaggaaaaaaaaaaaaaagcagagtgcagcagaggtggtttcagacagacttaggttcacaccaagctctaccaaggtatataggacttggatcaagttaccacttctctcctaagcctcagtttgcacatttgtaaaataggataataaaagggtatgccttgggggtagctgtaagggtaaaatgagataatggatgttttcaactcctttgctagatcatccttccaacttctaaatgtcttagtgccccggagctcagttctcaaacctctttccttctgcatcaaagctcactcctaggtgatctcattccactcacagggctttatattataatcatctttttgctatcataccgagcgaggcccaagaatcccttcagtgggcataagaaatcttttccttgcctggctggggagaacctgatctctctgatctgctcccaagctgtgcctcagggtgtccttttaccttcttacaaaattagcatcagggagaaggggtacccaatccttaaaggctctaacggctttgtaccttgccatgtaccacggcatgttctccatgaaggatgactttccccggagcagacaccagtaggacttctgacaacatggctcctgggaatcctaaaagggaaagccaatgagaagagcaaagatctctagatgtcagaaccagcaggaagagatcttagaacacctagttcaagcccatcataataacaaaaaaggtagttaccgtccagcacttgctacgtaccagaaaggcaatgcaggagtcaactggacacatccaacagatctgggttcaaatgccagctcttccactccccagtgatgtcatcttagttaactcacttaaatggctaagaacctcggtttccccacacgttatatggagagaaaataaccgtacctacctcggtggatgttaggaaggttaaattaacgcaagggaaacacttggcggtgtctggcacctactaatcattcaattactgagagctacttattactggctctgttcttcgtttcagcttttacaactactactattaaaggtagaaattacatgaaatcatggagcagaaagaactctttgctggacatttaggctgtttccaatgtgtcacaattataaacaaggctgcagaaaacacccagtacgcctcgttttgcacacttaaatgagtatttctgcaggacagagtcctagaaaggagcttgcagggtctataggtgtgtgcaatttacacttttatacataacgcaaaattatcctccgcttaaggctttacgtagattaccttacgctaagattcaggtgtactatgagctaagtactatcgtgatccccatttcttagaaaaactgaggctcagagcggggaatccccttgcttgtcaagctcaaaatcacgactgtcagattgaggtcgccgatccctcggggcaagactctcagagctgggtaaactgagccacagaagctggacgcctggctcagcgtcgtcctgggtctaggacctcgcgccgcccggccgcccgaccccggcctctcacctgccgccgccgccgcctccccggccgccgcccctccgcgccgaagccggagcagctccccaactcccacaacccagagcgcccgtgcctcaaggggaggaggcgttgtacttcaggccagccaatcagagcgcgcgagcccggagtacctttaccaataggcttgaacattggtcaataggtgttgcagccaagccgacacgggttttcccgccccgctccttccgttaaaccaatgggaaacaagtccctgggagtgtcccgccctggggtgagaactgcgaaccaataaaaattgaaacctgagcggtggcgcggccagctgtgggtggagtcaccccgcggactggacgggaacctggcggggtcaggtcccgtcaagcagcctggctcatggctgtgtgcggcctggggagccgtcttggcctggggagccgtcttggcctgcgcgggtgcttcggcgccgccaggctcctgtatccccgtttccagagccgcggccctcagggcgtggaagacggggacaggtgagtggctggcgggaagggcaactcgaacacctgccgtgaatcgtggtgtcgtcgccatgggtacgtcacaccgccgtgaggtcaccgcggcaaccgtcaggtgacgtctccacgctgttctgacgtcaccatggcaacgtgggccacgtgggcgccagagaccaggtagtctttgcctaagtcccaatgaagtcccgctatcatcgggcagggcagggcatatcccatgtgggccaggagggctctcgactcagattgtgaccaatctccaaagcagtttattccccaggtcccagatacaccagcaccttctaaagatggctttcctcatattccttgaaacttgcacctcaacccagacctcagaacctctagagtaccgtggattaataatggattaatttagttcacagatccaggaaattaaccttcgaatgggcttgtaatgtcacattttaattttgagctatgtccttgagttgtttacattgttttttgaaaatgccactttttgagctgtattttggcaattcttcatctctgagtacactcgaagcctcatactatggaagtggctcaggtttcttttcctgcaagaggccctgagttggtggagtataagataaaaatttgggtaggatagagttaagagtcctagctacttgggaggctgaggcagaggatcacttgagctcaggagttcaaggctgcagtgagctatgatcatgccactgcactgcattccagcttaggcaacagagcaagaccctgtctgtgaacaaaataatcataggccagatacggtggctcacgcctgtaatcacaacactttgggagtttgaggcaggagtattgcttgagctcaggagttcaaaaccagcctgagcaacatggtgaaacccgtctctaccaaaaaaaaaaaaaaaaaaaaattagctgggtgtggtggtatacacccgtgctcccagctgctcgggaggctgaggtgggaggattgtttgagcctgggaggcagaggttgcagtgagcctagatcgtgcaactgcatttcagcctgggtgacagagtgagaccccatctcaaaataataataataataataaataaataaataatttcggtaggatagaagttacagtttgtgctctggtctaggacagttttgggcatcccactcctgcctcttcttggatggtctaggaaggtgtctcatctgagccatagtttcctcctcagtaaaatgaagagaataggtgttggctacctttggggttgtggaaagattccaggataattccagaagataatgcctgtaaactacttggcacagtgcagggacaatggcaaaggatcaatcaagtccttcagcaaatatttattgagcatctttgttgagcaaggcattacatcagctactctacacactctgtcatccagctctggtcttgcccacaaaatgtttgctattagaaaggatctaggggaaagaaatcaacaagagatgaccatctaagcagtaaggggtaagtgctgcctctgaggttacaagcagcaagctgggaccctctgaaggagctgaccctctgtgtaagccatccccactcaccagatactgatgtttatttctcattaggccacagccttcctcg

SEQ ID NO: 916519 - DNA, 4001 bp, Homo sapiens
ccaaatttacactaaccaaagaatttatgggtataaaattactgtcctgggtggaggaactcctacacagaatagcaacatgcttttatagcaaaagaagatgatggagtctttagcatccatgctgttttattcagaaagaaaaaaatatatattgggggggtgggggctgaagttaaagatatattttcctctttgcagctctataatttcattccccataaaagagtgaatcagactgagttgtcaaatgaaaagtaaacttcatcgcctttgcgatcagaataatttaattagctttattggctcttacaggctgtcaccttatttattggtttttcagctttcttctcattttcaattaggctttaaaaaaacaaatgcaaaatcattcactaaattcagaataattaaaacaatattgtgtttccagtttggaaacatggtagaatgtattgcttctgggtacacttcggagaggttaaagtgacagagcagataaaaaggacacttagtacacacgtaaatcatttgcattacaaataagatactttagcaggggttggactccctgcctgacagtcaggattaagttcccatattaatacatgcatttggtgtggttattttgggtgaaagacttcatccatcaatgccctctgccactaagtaaggccaacctgtaaactgatcaccacagcctgtcaacactggttacttaattatataaagaaaatatgtttaaaagacttttgataatttggttagtatttcaacatctttttcaaggttccttaaaataatagctaaagcatttttaagaattaaaaactgaaaactatgactatttttatgtttcctgctaatctttctttttcttttatttgcagaagggaaaaataaagattcagtaagcattaatgaagatgaatataaatgaaataatatttttaaaagatattttaattaaaaattaaattcaatgcatgcatagtattaatttgtgcttattattatttattttcataactactaattccaatttacttctgttaccaattggtagctttaatacactaatttttttatagaaaggagaaactttgttagggaaaacatttcttctaaggaagaatatttttatactttcagcttaactattcttaaagcctactacatattatgaaattctctacaataaaactcatgaaagaacaatctattcatgatattcagggacatccttttttatcaggtgtttggttttctttccatgcaagaatttaataacgaacctccaaaggcactgataagaacaaaaaaaacccttcgtctgtatattttaaatatgtttccattaaaaaaagtagcaaatatggaaataatgtcacaaattcttttttgaaatcttgatccaatgtattaaccatttgagaaaatattttaagtctcctactctctgcaaattgcaaatacatggtaaaaaatttgtgattaaatctaagaaaatatgcttgaaaacgtaatctgtttaccatcagcaattaacatccttaaattacactttaaggattctttacaattgaatgatagaattatcatttgataattttagtcaatatccctttagaaactatcgttatcagaaatttttcaattcaatatactctcgctgtatttttcctctggtctgtttaatctaaaagatcgtttccttaaatcatagtgattttattttctcatctagttaagatatttgttatttgtttgaagataaataccaaaataaacactttattcaggagtacaacaaaaagatttctagataagtcttaccctctttcttagtgggttctggcatggccacaataagatgttattctttaaagagtctccttccctccacgactagttgacagaaaccccacaggcaggcgagagatggtgcaggtcggtgtgacaagcagttggggagaaacccagtgcttttatactgcctctgaacatcaatcatgatggcacctccctttcttcagcacaaggatgcaggaacttgacagctatggggacctttctcacatctgttgtctgcactctgctctctcgcctactggaaggaatctcctgcccatctcatgtggctgatgagaacacctctaactttctaaattcagctgcagcctcgtgctccgtcttgctcttctctctctgacagatgcatgtgctgactcaggagtgcaaaaagtttgctggatgattaaaaaaacaaattaaaaatcataatatgccaatccaacctataccttaattttcactaagattaggcagaaaagtctttgtattcagatgatcacttttatgctccaattagcttttcattttcatcagtccttaattattgcatttatattttttcttattcctcattgatatgtcaatattaatttttcaagccaaatctctaggttaaataacttgtctcatgttcttctctaagaatagcaaagatttctattaggggatactctgcgtttgcatttttttccaaaaacatcatttttcaaaattataggacatataaaagaatgaggcaatgacacatgctacaacgtggatgaagcttgagaacattacactaagtgaaagaagtcagtcagacatacaaacgtagactataaaataatagatcactgctgggctcatgcctgcaatcccagcactttgggaggctgaggggggtggatctcctgaggtcaggagttcgagaccagcctgaacaacataaagaaaccccgtctctactaaaaatacaaaattagctgggcatggtggtgcatgcctgtaatcccagctactcgggaggctgagacaggagaatcacttgaacccaggaggcggaggttgtggtgagccgagattgtaccattgcactccagcctatgcaacaagagcgaaactccatctcaaattaataataataataataaaaaataatagaacacacattgtacaattccacttatatgaaatatctaggacaggcaaatccatatggtgagaaagtatatcagtgtttgccagtggcctaagggaggtggaattgggagtgactgccagtgcatatggggtttcttttggtcatgatgaaaatgttctggcattagatagtggtgatggttgtacaactttgtgaatatattaaaaaccactggattatacacttaaaaatatatatggaggctgggtgcagtgctggggcctataatcccagcattttgggaggccaaggtgggaagatcacttgaagccaggagttggagaccagcctgggtaacaaaccaagaccctgtctctacaaaaaataaaaataaaataaaaagatatatatggggcctgggcaaagaaagtcaaatagactagtagctattgttttgattcaagtgattcaattggagggtacacaaatctaacttaagatgttgaaagactgtagtagatgtggtcactttctcccaaaacgctcatggaactgatagagaaataggaactaccaagtagtcaacctgaagaagacaccttactttctttgttcacatgcactaggactaacctgagtttatatgaaaagacaactacacacatgcctttattggtgtgtgttttcaagataattttcaaaaactttgattgattggtactgaagcagccacactgtctcgtctaatttcccttgtggctgagagtgcagctggtcagacttagctctaccaaactctgtgccaagctgacttttcatataagggtggaaactagacttagaactcaatagcatcatgctttagttatgtggcggggagggggaggaagccagtcaagatggtaatgaacatcttttataaagacagcccctccttaaccacattatactactgaacacatttttgtactttaaaaaaaaaaaacgttcctttgctgagtccgctctggggatatcaattaat

SEQ ID NO: 916520 - DNA, 4001 bp, Homo sapiens
aggtgatccggtccactatgttggataagcaatccaagctggataaggagtttttatctgtggcatatactaaggatacaaggagaaaagcattaaaaaataattagcccaagatagacagatttgcttatgttgctccttaaattgtaggtcagctcctctgacacccagaggtcaggtggtcacagaaagcctaacatagaaatttgcaacaaatatctggcaattcctgaggggtagacgtggggagtggggaagccccctgataatatttcaagcaacattgtgtgtgcatgtgtgtatgcatgtgtgcgtgcgtgtctgctagggggatttggagcagaagatgtgtttattttgctttaccaaagcctccctataagaaccatcacttccattctcccttccccaatactatcagcaagaacagaatcttataggctgaattgttaggttgaactggtctttaaactcctgtgaagttatcaattcttaccatttgatacatcaggacagtagatgctgtcaaaagtactgctctttctggaccagacaggactgttacattcgggctataatacaagacacacaacaaagtttgttttcaggtcttggcaaaagatgttctgaccaaaggtgaggctgtgcttgcccaccagctctgtaaccgaacactgtcaatcaccttcactgccttgatttaggaagggctagccctctccaaattcccagggcactgaggtcaatctctgtgcttgaagaagaggagagcagcagcaaagggaagagggggtggaattcagcagcaatgtgcattgggttaaccatgcaaaatggattggagtagaagaaagccacactaattcagggaaagaacactttcccagggcaaaaacacattaaaacctggcagccttggagcaaacgccctctaaaaagaatgcatcaacatctttcagccaggcctcattggagcaggaactggggccgtgtgggtatttctttccatttcctcattaagttagaaacggtgcctttagatattagcgtagggcatgatccacagatggcatattttgaaaataaattcaggaatggagaaaacatctgagtgatcattcacagccacccatcttccatgtcaacactcgattacagtgtacacctagaacctgctagaaagttaaactaaaatcttgttcagcagcggtttggggagtctttctaaatgtggacccctctcttcttttaaagcaactcagcatctgcctccaccccactctccccaccacaccaggttaaatgaggtgtaaggactttagaaaagattagggtagcctagcaggtaccagatctattgcttaccatgccatcagagcagttggaggtggggctggtgggctccgagcagctctgtcccggcaggctatagtagttctccacctgctctctcagcaactcctgcaggctctcgatgtagcggatggcattcctgaggatctccaccttgggcagcctctggttggggttggtcgtggtacacctcttgagggtttcgaaagcctggttgaccttcttcaggcgcctccgctcgcgcatagtggctgccttccgccgatccatggtggtggacttcctcttgcaggctttgcaggcccacatgaggcagtgaccagcctggtggtggccggtaggcgctcgcacgtgctcgtcctcatctgagccctgcagctctgctttgtgcgctccgaaggcagccactcgcggcacaaactcgtccccaaattcaccctcgggggacggtatgcaggagccgtcgtagaagtactcagaaggtgagaactggcagccatccatcacgtccatcctgctgagaggcaggcggtgcacctggacggcagcgagagggatggggagaaacgggagcctggcgcctccgccgatgggcaaatcccgggcggagctccctagtctgtcgctccggtaattaacaagggcagacgcctgttggcctgggtagacaagctggggttggggttctttatatattctttcgggagggaggccggccccagtggccaggcactattagcatatcccaccgcaacccccgcgggggctgtctggacaaacctccgcctttcctctacagacaatctgctgtgtactgccccttttgacgctaatggttttactgtatttctgctggggcggcagtgggtccccaacctgctcatttgcactctctagataggctaaaacaagggatcacttaaggagtgtttcacacaaaagtgaccaaggcagtccaactttttgcaattggacacacattttaaaatagtggtaataaatagaaatccctttcagctggcaccaagagccgacctgccctcccaatcctgggcgtgaggaatcacctgatttgggggtgtttgtttctctttttcatgaacttcaattatctcgaaaactttttccagcaattggattgaataacggttactaaaaacttgaagtggcattttcaatcttggagtgaatacagggtttgcctttccaaatctattttgtatagcttcagatgagtaaagttttgctcagattgtcatttattctaggctctaccttattgagagtagggagggaggttccttttcccatgactgggcttgctctgagttctccctgtatgtctgctcatctaaaaggaggtggggcacaggagggccaggtgaccaggaacattcctcccgttcttgcttccttcattttccccttctgtacgtatttgttgagcaccttctcctttgtgccaggccttccctagatcctgagcaggccaaagacctgcactgaaagtgtctctaagatttccaacagaagaagcccagttttcgacggcaaactccctttccaggggtgagtctcctttctccctctctttctgctccgccctgtcatttctacagactaaacagccaagctgggctttggggttgctaattttctgctttcaggcaaactaacaccgttacagatgcgtcccagctgccgccactgcaatccttgactcgtgtaaaatttccaactcctcaaaccaggagtaacttcacacacttcagtgacaaaagccttccagaaaagcaatcacagcagggtctttagaacttcgatggatagaaggcaagaggggagggttgtcatttaagtgggaatgaatctattaatcagcttttaccaatcctcctccaaccttaatccactttcaggttatttgggttggggaggtgctgtttatatttaggaaaagcaattacttaaggtctacacaattagtcttggggttttggactaggtcttgtggccccgttgaaagaagcaggagtgttctcaactcaatctagggtaacccagttcaataaatatagtggctccgaagttattgcgaggaggagggagttttccttcctattattattattatttctttcagtgaatggtactttgtacttttttttcagaattattttcttaaagcaacactggttcattgatccagcatcttcaggggccagagaagtagcaaccttttcagggtgcgatctctctaaagtgaagaccttgaaaaccagaggtgggagagtgacactgtcagtcactaaggtttgctagccacaccattgctgtctcctctcttctgtcctgtcatctctaagaaaaagatctctcctgaaaatcaggttccctctcacaccaatgggctgcttaatcatctgaccagtgggaaatccatctgcaccttttttagggctattaacaagtctatgcctttgaaatgaatacggtatccagggctacgccagataaaaagaggcaagttcaagaagaacccaggtggaaactaagatgccatccacgctggtggaaacattcaaatgcacagcaaatgcaaagcacattgctacctctgaaatacaatagtgggtagatatcctccc

SEQ ID NO: 916521 - DNA, 4001 bp, Homo sapiens
taaggaaagccaaatttcctttcaattggcatgtaaggaaacacccaaataaatgggcttgtgtggtgtctaaattaaaatatggctcctctttatttttgtacacatgcctccaaacatatttttccagttccatcaaattaggaccaactttgttcatatagaaacttctttttaatattacaataccaggatcctcgcacattttatatacatcattccacatttaaaatatatttcaggtttacgtaaaaaaagaaagtgttaaactatttacaaaaatacattaaatacccctaacattaaatgcaactttcccactttagacaggaatgaacttcttttgaacatggcacaaaaggatcaccgtaataaaagttaatatagtataaaaccaaccaaacaaaaacaaaatgaggctagacctaagccactcgcagttccaaaaaaataaaagcccaaagccgaaaggcgttttcatttgagcatgcacaacagatttcgcaattttcgcaacgtttctttgtgaatgtgtctccttccctttcagcaacttttcggtctgggttcctaaatgttaatgtaatgtgacctaatctaaaggattaggccaggaagggtcggtgggatcttcctgctgcgtggagaaggtctcaagcgcaggctcagttacttctccaccacttcctccacgcaggggagtttgcgttcctccgaggaaatactgtccacgatggaagaaaggcatcgaaggctactcgaggctgacgaatcaatacttgctcctcctgagcgaaaaaacaacacacaaacatagcacccaaagaaggaacacgaagcagctccgcgccccgcgcgaggccgctttggcagcgaggaaaggcctggtcccggcgcgcaaagagcgcccttttcgcagggcgcgtccctgctctcgcttcgagccctctcggcccaagcatcctatccacctcccggattttctctggtgcggcccagagcccttttactttaccttccttagccgttatcacgagccccctggaatgatcggaaacacttggccactgggagctgcaggtgcgcaggaaatccgcaccctcaagctggagggaaaaccaaggcagcggcagattaggaaagaaacatcggttccggggttggggtggggtggggggcggctttcctgcttcctcgggccgggtacgcatttcctgcctattgcaagcacccggtcttcttgggtcactgggggttcattagagacggagcgggaggggcgggcgagaaagggggaagggaaaaaagaccaagcagctggaggttaaggccccgcggaaggcgtttaatcagccttcgcatttccctgccccggcagcatctaggcttacattttcttgtttgggtctgtagctgaaggggtccacccccagctcctgcatcttctcctgctgatccagccggtgcagcaggtcctgcagccgctcaatatagctgatggcgctccgcagaatctccaccttgggcagcctctggttggggttggccacagttcgccgcttcagtgcctcgaaggcctcgttgattttctttagcctcctcctttcgcgcagggtggcggcttttcgccggtcagtgggggcagattttctcttgcaggtcttgcaagcccagatcagacactggccggggcagtgtggaggctgcaggcccgggggcgccaggacatgttcctctccgctgctgtcgctccccgcttccgggggcatttggtcctggcagggggacaaggtaccatcactccctggatacaaaggagagccttctgccacttctaatggctgcagagtaacattttccccatccaagtagaagaaataggagccagtttcaaaaaggtccatcatcatgttctcctccttggcctctgactcgatctgaactgggtgatggactcaaaaacccagaggaaccacccagatggcatttaattagtgcagtgacataagtcgacccagctttatatatagtagctcctgaaactcaatccaacttttagctgtcatggagcatcagtctcccaatgtgattgcagctagtgctctctagaacatctagtttgaaagaaaactgagaagtgtcacctcccagagtgttgtgacaatctatgtgcagaccaggttacacagagagaatcacataacttaaacaaagcattgaacccttccattttgggcagtttagatactaacctgcttacaggacaacttcaaaacaactggggattaacattgccctattcccctccccctgcgctcatctgaattctaagtatagacccatgatgaaagatttcaaaggcaatagccattgctccaaaatagccgggttaatatttgcagagtggttcagctcctttctctctcctgcctctcaaaaagatgctattcctgtgattaaaaccattacagtgcttcaaaggttatacatgactttcaggcttcaacctcaatagaagcaggtaaatctctttcctctcttttactaaggctgcaagatgatttgggaaatggagggggttgctgaagggtgctcacatcccatgatactggatgaaatgattctctgggtccttccatagagaccgtccttgactatcttttttttttttttttcctttggggagaggggcaaccaggatctgaattctgtacccttccatttgtggagcagtattacatatgaggtagggagtgggatagaggatggggttacaatacatgtagtaactcctccttaaaaatagttttagtgaaaacaagactcacaccacagctacttgatatttcagcatttacttgtggccccctccaaggtgcctctcttatgattccagttctgcacactgtgtgctcaccactttttcttttgcattctcactatccattgactccaaataagttgtttgataggatttaagtgagaaaggttagcaaccaaggcacgagcaaggaaacagcattttttaaattgcagcttgcccatggtccacaagatacatgtattgttcttcgggagacagtacaatatgaaggtcaagtgcgggggccctagattccaaagaactatcaagtcctagcaaggttaatttctatgtatatatccatgggtaagtactagatcttgatgtcttcaagatgatagtggtttccttacagttttagtgaggattcaatcaaatgataccatgcatgtgaaacacatagcacatagctgcttgatgaacagtagttatcatttgtagtataaagccatgttagggcaaagactcattcctatgaatgaaataaagcatagctgttggagaggtttttctttttcttccctctctctgttttgttgttctttcccttcctttcacctttcctcctagagctctagaaagacttcctagctgtaactggcctttgggatgtcagttgaccttggttttggtctttatagtcagtgcctcaaaaactatgtgggaacataaaatcttattgctctaccccaagcagtaatgattataagctgtgttctttatgactttattttaaaaaatgaatagagtgaagataatgcaggaaatcaactgtcagataatttagaaattagctaatcaagtcgcctattctagaagatgattcttcacagtttctattgagccacagactggatgttaagctttgatatttttggctgtttttattccttatcaagtttaatactattcttagatttttggaatggtaagaaggagagagaagagttgcaagaggccaatacttcttctgtgacttttttttttctattttcgccagtttcttggttgctcaagtcagcaattaaaactgcagattgaaagtttcagcaactcagggtataatctaacatctattatagaaaattagcttgtgctcttaaccacactttatgttgtctcttgtaaatgtgaagac

SEQ ID NO: 916522 - DNA, 4001 bp, Homo sapiens
aggtgttatttatagtagtaaaacattataaacaaatgtcatatttaaccataggaaatggtttaaatacatgataggaaatgttaatggtgaatttctcaacgaaaaaaatgcaggtgtaatcagtgggcacagaagattataattttgtttaataaatatatacatagataacaaaaatggtttgaagggtatatactaaaatgtgaactgattatctctgggtaatagaattgtaggtagtttttatttccttttctgtgcttttctgaaaaattttccaacatttttcaacatggaatatgttttactttgataatcagtgaaaatattaaaaatagtttcttttaaaaattcacacatccgttcaggccgaatttgggattgtttggaggatagaggcatctaatgaaaggtccctgctgggaatatggaacaaaaagaaggttctccctcgtgggtgggatttccatccaggcggatgattcaatagctgcacccacctccttaaattcctggatttgggtctgttcgaacatggagaacacgttggagttggcgcccccggctctcttctttgctttcttaggtgcctgggggaaaaaagcatcgattaaaagagtgagaggctgggagtcaaaaaactaggtcaggcccctactctgggtgtgttcatctctgttgcagggctcagctgcccatctgtgaaatgtgggtacagcatccacactcaggtctccaaacggtgatgctggagggagcaaaggacatgacatgaagtttctccagagccctctggtaccagtggatcataagcgtttgtgcatcttgcagtggctccttcaccaactaggagaagccacaggtgtgtccctggggatggaggccacaccttcagatcgcccctgcaggatccagccacttttgttctgatgcatttcacaaaaagctcagtaatgcacagaaggagaattgattggagggaaagaaaaagtcaggctcactaagccatgatgaatgccaagatgaaatgacagttcttcaaggtgttaaaacccaactgcgccccacaccccacaattttcccttgctccaaatggcagcaaaacctcctctctgaatgctccgtccttgcaccacatcaatagggcagagaagagcgagttgacctttcttccccaccccacttctctctgactttcaataacagcaaatgattcggtactctacatatgtattatttaattctcataaccactctgtcaagtggatactattattatcatccccattttacaggagaggcaactgaggctcagagaggttgggtcacttgcccaagatcacacagccacacacacagaaggcagagccggagttgaacttgggcgttgaacttggggagttgaacttgggcattctgactccagagttcctgcctctaaccactctccctcctgtgctgaccctgatttggggactgcccacttcaggagggggacacctaacccaacagcacagaaagaaaggttttaaatttgcaagttcaaaaggtgaaaacaaaaacattctttttcccagctgcctgaacaagagaaaagaattacaatttgatccttaaaagcattcaatcccattttgcaagtcctgggagttattgattcctcgagaggtcagtagacaagccataaaaaagccaactctcttattttgtgtttgtgagtccccgagagctgctgttatttgtggcctatcggggcattgattggggttcctctgtgcccgcgcagtcaatggggctttttccacaaggggctggaggctttgagggccgccttcctccccctccgccgtggtccctcgcttgtagtggcttcctctcctcgcccacccggcatcatcacctcctggagcccttgtactcaccatggtggaaaggacccagcactgcctcccgagaagaattccacactccgcccagctctctgcagcccaggaacaataaatacttcctccccatgtttaaaaataaccccatgaccgcttttggcagtcataggtgaggcgggcaccacctaaggcccccccaccccatgccgttcttctgaagtaagggtggctcactcgccactgggtgacacgtgagcccccaaaaaggcattcaaggttaaagaggcagtagctgggtcatggtcacggggagagatgctgcgcgctctctgcggtgcttgggccggggacacttgtgcttgtcaattttgagaaaaaaaatggcagggagaggagactgctaaaatgctctgttttatcagcctggatctggcctcagggtctttgcacctgtgtgccctctacctggaatgtctttctgtcagtcatcgcacggctccttccttcacctccttcactgcatctttgctcatatgtcatctcctgagtgaagcctccccgaccaccatctttaaaataaccatgaaggctggcactgtggctcatgcctgaaatcccagcacggcgggaggccgaggcgggaagattgcttgagcctaggagtttgcgaccagcctgggtgacatagggagatgcctgtctctacgcaaaagaaaaaaaaatagctgtgcgtggtggtgcatgcctatagtctcagctattcaggaggctgggacaggaggatcacttgggcccgggaggttgaggctgtggtgagccacgatcacaccactgcactccagcctgggtgacagagcaagaccctgtctcaaaacaaacaaataacacagccacgcacctcctgcgctccgatctcccttctttgtttctctgcacagcgtgaggcagtcccgaacactgcccacagtgcactgactcattttcttcagcatctgtggagcgtcagctcagagggcagggatcactttagtttccctcaccactgactgtctccccagctcccagctcatgatgcacacagcagcagctcaaaaataaatatttgttgactgaagaaatgacaaatctcattgactgagcactggcacgtgccggacactatgtgctcatggctcccacacataattttccagccaccctagagggtggggaccacctcatcatccatgcccccattttacagatgcggaaacaaaagctcagagaggcgaagtgagctgcccagggtcacacagtgatggagctaggcgtggacccctctggaggcccctttgtctccagagtccaggctctttaagagccttgaaaacagcagctgctctcagaatgcaaggtgtcattatataatacttttactgaagacagctttcctgctgggtgcagtggcttatacctgaaatgccagcactttgagaggctgaggcgggtggatcacttgagtcaggagttcaagacgaccttggccaacatgatgaaacttgtcgctactaaaaatacaaaaattagccaggcgttgtggcgcgggcctgtagtcccagctactcaggagactgaggcaggagaatcgcttgaggccgagaggcagaggttgcagtgagccgagatagcgccattgcactccagcctgggcgacagagtgagactctgactcaaaaaaaaaaaaaaaaaaaaaaaggacgggcatgttggctcacacctagcactttgggaggccgaggcgggtagatcacctgaggtcaggagttcaagaccagtctggccaacatgacagaaccccatctctactaaaaatacaaaaattagctgggcgttgtggcacatgcctgtactcccagctacttgggaggctaaggcaggaggattgcttgaacccaggaggcggaggttgcagtgagccgagatcgtgccattgcactccagcctgggcgacagagcaagactccatctcaaaaacaaagaccaaaaaaaccccaaactaaaccaaaacaacaaaagatggccatcttcctgtgcccttaaagacagccttgggattcagggagcaagaactc

SEQ ID NO: 916523 - DNA, 4001 bp, Homo sapiens
tcctctgtcatcttctcacctgcagggggaaagaaagcatttttggaattgggtgacaagtgaggtacctcagggtgccatctcagctcaaggacaaggacacagaaccttacccagtgtgacaagaacatgccggatttcagcacccatgacggtgccatttccttccttgtcaaacacccgaagtccttcgacataatcctcataggtgccctggtccttgttcttggccactgtctgcagcatgggcagaaagtgctcaaagtccagcaccttcacattcatctctgccataaaggaggtggaagtgtcaggccagagaagtaacacaagttctcaggacaggggattatagagacctcaactgaacagagagatgacagatgactccccactaaaagcaaggaaatccatgggatttgctaatccagacttgcttgagtttggggcctatgaagataaagggaagctcttagctgaagaactgtgggcccatgaccacactgaggagttgttctttaggcccctcaccatcactcttggggttccccaggaccttgagcacctcggcgttggtagggttctggcccagggccctcatcacatccccacactggctgtacaggatcttgccatcacctgttcggtcaaacagctggaaggcctccttgaactctgaggattcagatgaatgtcaacacaggatttgagggttaatccaaaccctacctcagagctctgctgcccattcaactttgatcatgctgaggaaacgagatatctgcaccaaactgtacaccaaagtctacttaagagggctctatttctcttcctcccaactcaagtgttctatatagaggcttcctccccttctggcagcctggtaacatccatttacacaacccctctgcctgcggcaggcctgccaatctccactgctgctactacacttctcagggcaggaattcgccaccgcccagtctcagtcctgtccttataaggaagtgggagcagcagcctgggactagggtcatcccaacctgccacttcgcacccctccagtataaagagaacttccagagggtatagctacagtcatatccttagcaaactcccctgtcttgtccccatctgcacagaatatcaggtcactgctctacaatcttcacaactgcaagctgggagggcggggacagttatcacaagaggagaaaagaggcagaagtagctgattaaaggacaaaggaaagcaggcagctttatacaccctcccgagaccccacacacagcaggcattaagtgaccaagttttttcacatacccacaccacctaaaactcacccagtgcttgggatcagatctagagtggaaggggagggaggaagaaagtgagaaaagaaaatggaggatccagaagaagagaaaataatccagggggtaatctcatgggggtgctaaagagatgacagattaagattagaggataggtgctggggggagggtgtccctctccctaagggtgacctcggtagggatcagagataacctacctgcggtctggtcttcggtgaagtcacactgctcagagaagagggaagtggtcagcatctgaacgccaatcccccgagtttctatcccagccccacaaactctgacccacaaactctgacccacaaactcctgtttcaggctgcagactcgcttccccgcagggccccagtctttccaaccccacctccaacctttcgggtcctcagattccctttgcctcctacccctgccttctcctcgccccccacccgtctcttcctgcctctcgtccccaatcctgcccgtctcccaagacctgggccccaccatcttgactgctcagctctccgggaccttttcctgcagtaatggctccgactctcggcccaaccctagtcttagtacgtcccgatgacgtcaccctcagaggactcagccaataggaaccgtggcctgggtttatgcagacgattgctacattagtaatgacttgggcggggtccgctgttcctttctccagcgccacctgggcacagaacccgctcggaggtggggggggtcgtggggggaggtgggggggcgggggtcgtggggggacgtgggctggggcacaatgaatctgcacctcccaacagcaggaagatcagaggattggaagaggagagagccctcttttcccgccctctcctcctagcaccctccccgtctcccgctgctcccccaaccatgaaaaaaatagcagtctgaaaccaagagaggaacccagtctttattttgaaacaataggtggcctcctggtggctggaacgtgctttcgcctgcggggcccagtgtccggaccccactggatctgtggaaaaaaaccaaagttgcgaagcgctggagcccgtgcagcaaccggacagcagaatgaactccgctgcttttctatgttggctgagagaagggcgggagacttgcctcgtaaggcgcggcgaaggggtgggagggccctacctgcagcactcagacgcttaggatgtgtttcaagaaggctgcagagagaggaggcaagaggggcttcagaagcaggcctttggataatacatctgactctaggtaatccaggggtgcccccgcccacacgcggcaagacgccaggctgccctcctccctcggccccgctcccgcttttttgtcccctcaccctcgtagttgatgcagccgttgctgtcctcgtgtcctgccagaacggtctccacctcctcctcagtcatcttctctcctgaatcccagacacaacgtctgaggccctcctttccctccttcactcacccaggccacgcttttcctttttttttttgagacggagtttcgctcctgtcgctcaggctggagtgcagtggagcggagcgatctcggctcactgcaacctccgcctcccgtgttcacgcgattctcctgcctcaccctcccgagtagctgggattacaggcgcccggctaattttttgtatttttggtagagacgaggtttcgccatgttgggcaggctgctctcaaactcttgacctcaggtcatacacctgcctcggcctcccaaagtgctaggattacaggcgtgagccaccgcgcctggctttttccatatatttttgtaaacaacaatataaacataacaattgtaattttttttttttttttttgagatagggtctccctctgtcacccaggctggagtgcagtgacatcatcatggctcactgcaacttccacctcctgggctccagtgattcacatcggccttcgaagtagctgggactacaagcgtgcaccaccacgcctggctaatttttaaatttttttgtagagacatggttttgccatgttgctcaggctggtctcgaactcctgagctcaaatgatctgcccatctcggcctcccaaaatgctgagattacaggtgtgagccaccacgcccagccttgtactttttttttttttaaatagagatagaatctcactacgttgcccaggctggtctcgaactcctgggctcaagcgatcctcctgccttggcctcccaaagtgctaggattacaggagtgagccactgctcccggccagcccatgctgttttgcttttttttaaactgagtcttgctctatcacccaggctggagtacagtggcacggtctcggctcaccgcaacctccacctcccgggttaaagcgattctcctgccttagcctaccaagtagctgggattacaggcacccgccatcatgcctggctaatttttgtgtttttagtagagacgaggtttcaccatgttggccaggctggtcttgaactcctgatctcaagtgatccgcctgcctcggcttcccaaagtgctgggattacaggcttgagccaccgtgtctggcctttttttttttttttgagacagaaccttgctctgtcccccaggctggagtacagtggcatga

SEQ ID NO: 916524 - DNA, 4001 bp, Homo sapiens
ccaggggcaggcaacagctctcttcccttcaccttgaaactgttctcagaacccagatgttccccatctaagagtccctgcctccagcagggggtaagtgagtgtgtatgtgctgtacacacatgattataggttagagggagagaacagcaaagacaacagcagagtcataagactggatgcttccaaatgggggactaagggaaagccccaatctcattccagggctcactgattccctaccttctagataccccctaatcccctaggctgtatcccaccctcaaaccaccccctccaattctatcttcactttccagagactcaccaccactttggagagatcgactggaggctcctgggttttctgaggggcctgggggacagctggctcagctttggtcttggctggaggagcccctgctgctgctggcttagcagcaggtttggagatggagggccctgctggtttcttcacgggaacatccttcttgggaggcatgatgtccggtggccaaaggacagtgtgcggatgggggcacccatctctgtttaaatagccagggagtctgggatgtcaaggggcgggggcaggggcagggagccagttggctgtggcaaagatgaggtagaggagagatataaccgcctgccctcactcccctggcctcctatggttcaggactcctgccccaaggtcttcttccctctgtccccttatccccaaaggctgaccagaaaagaacaatgtttcctttaggggtaggggaggaagccagagactgcccagaatgaggtagttaacctccagggtgaggataggatgcttgccagtggcactgagatgggggtggtgaggcaaagcaggtgatccagcagctttagtcttcttgaagggtggggtgaggggtagcagccagggaggcttgtgtgaactggaacaagttaaagtgtggtctgggagcaatgacaaaaacaagaagcccatctgcccagcccctccactcccttctgaccatggctttgtaaagagcaggggtagttaaccttagagtctaatgatccctaatacttgtagttcctgagcccccacccagccaagaactggaactattcacagtataaaggaagaatagtcataaaaacaggagtatgacatccctcattgtctcctgtgcccagtgttgttttaggggcaggagtgggggcaaagatcaggtttaacatctgctacccattcttccatggaagaaaccttccacaagcccacggtcattcaagacaaacaaaaggtagggtgcttgctgaacctgtggggaccctttggtggcacctgaggagaagggcaggctctgggagacggcttaaattccctaatccaagaggatgtgggcgctcctatggctccatgagtattcaccccacaaccaggggtataataaaaatcctgactcaggggccaggtcacaaaccttgccaggggcgctgggagagagtccaagttggggggcgtttgggagtggggagggattgcaggctacttttgttctggggtaaattaggaaaggatttaggtagcattctgaggaagatagcagtgattccacttaggccccggggttgatgctgggtctcccattcgcaaaacagcgtctgaatctcatgactgcaaattgtcccatttttacaaaatacatcacacacacacgacacacacacacacacacacactcacgcacccccactaaatcttaaagaaaatggccctcctcagcccccaaaaactcaccctgcggggtccgtgtctggggctggggagggggcggggcatagcgcggcccccagccctgaagggttaattccggtggccgcggagcatgccgggagtcgtagttccccgcgggctcacgggatgcgccgcgctctagattgcagttgacgcgagggcggtggcttccggcccatggcggtggttggtgactcagtgtccttccagcgcgctttatgtcccggaactgaaaggcaatgaacaatttccaatccaccccaaccctaaaaaccctgcggggcccctagggtatccctcctacttaaccctggcgggctcctagtctcgggaggtggagggggcggggcggctgttttcctggacctactgctgaaagaactcagaacctggggaaagattgaggctgcagcaggcagcgtggaggtcagatagctggaagcacttaacggccccggggagaaccgctgcactctcttttgcttcctctcgcggtttggtagaaaaaaaagaggcctcagagtagtttgtttttaatgagctggttgctgaagtaaatgttaaaatttgcaattaagcccagtcacctgccccagccttctctgatcgaggtttccatcctgcggcagcatatgcgccatcctcctcgatcttcacaggtctctgagcggagggctgggctttccagccctactttctgaaactcttatggtcagcattggagttcactggttcccctaggcgttgatcagaggatgggaaccagcccggccgggcccaccttcactcactggatcagtaaataccctggcggtgcacctggtgttggaagctggtgctgcacaggcgtgtgaggattagatcagagcagaaaactcgggcgatggcagggtggtgaggcacaggtgaactttatgggcagtaagtgaggttcactggttggggaaagtttattggaaaggtagaaatgaattgtacgacagaaataacgataatagtaagttagcaaccatttctggaggccgccatagatctcgtaccggtgaaggggctaaattatctcagagggtgctcaagtggatggggttcagacagcctactcagatttaaatcctggttctaccaggtcctagttagtgaccctcagcaggtttagttatctctcctgggcctcagttcctcatctgtaaaataatgataatggtacctacctcatagggctcttcggaggattcgaagtgttattattggtaaaatagggccgggcttggtggctcacacctcccagcactttgggaggcgaggcaggtgggtcacctgaggtcaggagttcgagaccagcctggccaacatggtgaaaccctgtcactactaaaaatacaaaaaaaaaaaaaaaaaaaaaaaaaaaaaaaaatagctgggcctggtggcgggcgcctgtaatctcagttacttgggaggctgaggtcggagaatcacttgaacccggcaggttgcagtgagccgagatcgcaccactgcactccagcctgggtgacagagtgagactccaactcaaaaaaaaaaaaaagtgtaaaatagaataggcctggcacagcataagtgctgtataagtttttgttaaataactttcctttaatcttcccaaggtatgaggtcgctgatattttccccattttacatcaatgaagtaaggatcaataggtgttgtgaagagacggagaggaagaaggaatacatttttaagtggttataagactgggaaagggccacattatagatgcctttgtgtggctttcattacttttgcagacattgatttcaaaatatggctcttgtaattttttttctttccttttcccatttttggcattttgccaagtatgagtggttatggcatcatctgactttctagcattttctatagagaagtagtacagggaaaaaacgttaagacccttgcagagatgggaaggctatccttcattttctgtgccatccctgtcttgatcataaataacaggaactggacgaaacatggtcttaactgggcatagggtgattatatatgtgaattatctgtgagaaatgcctgtctctcctctctcctctccctgcttagcatgtgatttgtatattcttatttttctttggttttgtttttttctagaaatgaggtctcactgtgttacccagtctcaaactgagctcaagt

SEQ ID NO: 916525 - DNA, 4001 bp, Homo sapiens
tccagactccccatctacccccagtgcttcttctcaacaccttacctctcacagcccctattaaagacacccaacctacccataaccatttcagaagttcttccaaaggtctctccttccctgtcattgctacagtgagcttcatttttaaaatgggaacttgacaaggcagaattatagaggatagaggcaggattcctccataagagattggaatttcccaaagaaaatgaaagtggggtttgcttccccaacaaacaggcagttgtcaggacctctggatgtgctacatgtctgtctctatttttccatctctagcttttacacccactcctgtaaacttctggcatggactttgccccagagggacacacctagcttcttgcgggagtgggcaaggaggagcacagttggaactacagggagggtggtggggcttggcccccatgcagtaggcacatggcaggtgttccctaaggaggaaacctggccctcctcagtctttcctgtgagactgagtaggcagagtggccaggcacaggacaggattattagtacaatggtcaaggccactcctgaacaggaatgaaagagacacatcctcctatgctattgcatctctgaacccgggtggaggagcggaggaaggaggaacggaagtggggcaagaaggggcacaggcttccttctcccttcacttggctttccccaagctctaggaaaagagagcacttgtcacttaccagaaggacacaactgaggaagcaataagaatatcaataatagcagtctctaggaatcatgcagcgtttaccacgaactgggcagggctctaagcactgtacatacactaattcatttagtgcttacaatatccccatgaagtagatactatttttgtattttctagattttacaaaaagctaagtcttttaactaacttggcagggaagggtgagaagcagaaggtgggttgggagcagtcatcttctttggatttggatttgaagggagtgggaatgtgactggttgagggtggggaagggaaaaaggcaagaggccccagatggggcgccccaaggtgttaaagagaagcagtgacaggtcaaggcaggactcacccaacactggaactagggtataacttcactgtccttggagaatggtggatgaaatctcaatttgacaggaatggggcataagagtcctggccccaggatggagaggtggcttaatgggagctgtccatggtgcaaggaagctgggaaaaaggctgccctcctcttgccagtgtccactcttctgattttcccttttgctgcctcttccagcccaggctccctgtgccagtcaaaccaggagaggccggagatggctgatcagcacaaagtccagactgttcctgctgagggtgtggctcacttaacccttcacaggcctgaagccccagagggagacactcaagctccctctaggtaggaaagggtatctggctggcgttagctgagaggcttaactaaaggagggttcttgctccattgtctcccaaatttggaaatgaaagctggaagaatggaatttatagccaaggaaaatatttcccaaagagaagtcaggaattttgtcaaggacaggtagggccaagtgcggttgctcatgcctatactcccagcactttgggaggccaaggcgggaggatcacttgagcccaggagttcgagaccagcctaggcaacatggcgagacacgtctttacaaagagtgtcttcctagcaaaaaaacagtacctccctcatacctactcttcctatcttatcgggagtcaggggatgttaatgagattacttggagagctaagcagacaaaatccccaaattcttctccacttcccttcccccatgaatcagaccctatcatagagacccaaagattaaagtgattagtaataatacctcacatgtgtatagatgtcccagtttcattgaactcccccttgcattgcctcactgaatagcaccaccccgaggaaggcaatacagatactccattaaaatggaaaactaggaacaaacaccagactcagagaggttacacaatgtgcccacagttccatgctagtgcatggcagaaccaggaacagaatgcagctccctaagtttgccaaaagttgcagcccaagttctgaagtttctaattttaattcgtcagcactaggatactgagtaagaccctgagctaatgtaatagctccctctgatagataagaagtaccccttcatccagccaggaaaattcctaaaaacagcaagccccctctgcctaccatcctctctcccaggcatgcagaaagaacaaattaggtaattatagacacttaactgaagagagacttgattctccaactctcagctatggctgcttggtgcaaggtccaaactctatggctctcacagaagcactctgcgtaagcctggcacatcagcagttctattatcaacctgcctttacataatttattgatctactacatatatttgaaggtggaggggggcaaggaaaagagagaaagctgagtggaagtgacatcaaaacataatgctatgtgtaggtggagcagtatccatgtcctagaggcagaagtgacaaatatcacctatttaccagtggaggaaacagatctagagtgagaaaaccacttttccagggtcacaccactgcaaacctggcagagctggcaccaaaacccaagtctcatgttctctaggccaggaatctgcagccatctggggtttacctgcatgtccacccattcagtcaactgagtgcctactatgtgcttactcacgagaaaagtgactctaaaatgagatggcactctcaggtgtaagaacaatgacatgaacatcacagctagggcaaccaactgtactgatccgcctgtgggacacagtggggttctctggacatgggaatttgagtgttaaaactaggaaagtcccaggcaaactggagccagtgggtcagcctaaattaacaagatatgaaatacacatccaagtcagctgggattttctaatctcctgctttctaggcaaaactgaagcaaccagagcgtattagtcttcctctactttgactcctaaatcaccttcctttttcccccattaacatttctagaccatggaaggggcaagagggaactttttggggttacagaaatggtctatatcctgattgtggtagtggttatacaactgtctccatttgtcaaaactcagcaaatttgtacacttaaaactggcaaattatattgttatgtaaatcgtacttcaataaaactggcaaaaaaaaaaaaaaaattctaggctgggtgcagtggctcacgcctgtaatcctaacactttgagaggctgagccgggccgatcacttcaggccaagagctcgaaaccagcctggccaacatggtgaaaccccgtctctactaaaaatacaaaaaagattagcccgggcatggtggcgggtgcctgtaatcccagctactcaggagactaaggcaggagaatcgcttgaacccgggtggtggaggttgcagtgagccgagatcacgccattgtactccagcctggacaacaagagcaaaactccgtctcaaaaaaaaaaaaaaaaaattccaaatcatttggtgctgatttctgacaaattgggaaggcagcaatctgattaagccaattcactcattaatcttcccacaggtactaacttttaaaaagatgttacacaataaaaaggcagctattttcagatatggtgaggaagacatttggtggtagagggtcttctcggctctcataaactatctggtactaataacatttatcatacttagactggactaagatgtgccaggcaacaagctaagtgctttacatcattgctattcaaaatgaggtccacagaccagcaccatctgatcaactgggagcttaccagaaatccagaa

SEQ ID NO: 916526 - DNA, 4001 bp, Homo sapiens
gaaggtgaagggaatgagcttgagggtgaggtgggagcctgtgacctctccagccacatatccacagccagaggcacccatatgacactcacataaatctccttgttttcatagcgaagctgaagattcttgagcagtgactcctccaccaagggttccaggaggacaagatcctccacccccacagaaccttccaggagaggcatgtccagaggggccactgatcctgggaataagaggcacagtttgctgatgtccactcagctttaggggccagtaactgtttgaggggaggatggcagaaggaccaaaagagccttcctctcttcctaccctggccctaaagagagcccccaacctaggagaggcctctggaccagcccaagctaatagggaggctgaaactctcagcaggaggtgggggagatcctctgctgcctgggttacagttggtgggggtggggcaggggtggaacaggaacaccttcctctgaccaccaggggaaggcaggcacccagtgggctacaactgggggagcagagttgtgactgaaggagagagggctgaggaggaaagtgtaagcaaagacttgtgctgccgccaggtacagaaagccctctctctcctacaatgggccctggccagggtccagactccccatctacccccagtgcttcttctcaacaccttacctctcacagcccctattaaagacacccaacctacccataaccatttcagaagttcttccaaaggtctctccttccctgtcattgctacagtgagcttcatttttaaaatgggaacttgacaaggcagaattatagaggatagaggcaggattcctccataagagattggaatttcccaaagaaaatgaaagtggggtttgcttccccaacaaacaggcagttgtcaggacctctggatgtgctacatgtctgtctctatttttccatctctagcttttacacccactcctgtaaacttctggcatggactttgccccagagggacacacctagcttcttgcgggagtgggcaaggaggagcacagttggaactacagggagggtggtggggcttggcccccatgcagtaggcacatggcaggtgttccctaaggaggaaacctggccctcctcagtctttcctgtgagactgagtaggcagagtggccaggcacaggacaggattattagtacaatggtcaaggccactcctgaacaggaatgaaagagacacatcctcctatgctattgcatctctgaacccgggtggaggagcggaggaaggaggaacggaagtggggcaagaaggggcacaggcttccttctcccttcacttggctttccccaagctctaggaaaagagagcacttgtcacttaccagaaggacacaactgaggaagcaataagaatatcaataatagcagtctctaggaatcatgcagcgtttaccacgaactgggcagggctctaagcactgtacatacactaattcatttagtgcttacaatatccccatgaagtagatactatttttgtattttctagattttacaaaaagctaagtcttttaactaacttggcagggaagggtgagaagcagaaggtgggttgggagcagtcatcttctttggatttggatttgaagggagtgggaatgtgactggttgagggtggggaagggaaaaaggcaagaggccccagatggggcgccccaaggtgttaaagagaagcagtgacaggtcaaggcaggactcacccaacactggaactagggtataacttcactgtccttggagaatggtggatgaaatctcaatttgacaggaatggggcataagagtcctggccccaggatggagaggtggcttaatgggagctgtccatggtgcaaggaagctgggaaaaaggctgccctcctcttgccagtgtccactcttctgattttcccttttgctgcctcttccagcccaggctccctgtgccagtcaaaccaggagaggccggagatggctgatcagcacaaagtccagactgttcctgctgagggtgtggctcacttaacccttcacaggcctgaagccccagagggagacactcaagctccctctaggtaggaaagggtatctggctggcgttagctgagaggcttaactaaaggagggttcttgctccattgtctcccaaatttggaaatgaaagctggaagaatggaatttatagccaaggaaaatatttcccaaagagaagtcaggaattttgtcaaggacaggtagggccaagtgcggttgctcatgcctatactcccagcactttgggaggccaaggcgggaggatcacttgagcccaggagttcgagaccagcctaggcaacatggcgagacacgtctttacaaagagtgtcttcctagcaaaaaaacagtacctccctcatacctactcttcctatcttatcgggagtcaggggatgttaatgagattacttggagagctaagcagacaaaatccccaaattcttctccacttcccttcccccatgaatcagaccctatcatagagacccaaagattaaagtgattagtaataatacctcacatgtgtatagatgtcccagtttcattgaactcccccttgcattgcctcactgaatagcaccaccccgaggaaggcaatacagatactccattaaaatggaaaactaggaacaaacaccagactcagagaggttacacaatgtgcccacagttccatgctagtgcatggcagaaccaggaacagaatgcagctccctaagtttgccaaaagttgcagcccaagttctgaagtttctaattttaattcgtcagcactaggatactgagtaagaccctgagctaatgtaatagctccctctgatagataagaagtaccccttcatccagccaggaaaattcctaaaaacagcaagccccctctgcctaccatcctctctcccaggcatgcagaaagaacaaattaggtaattatagacacttaactgaagagagacttgattctccaactctcagctatggctgcttggtgcaaggtccaaactctatggctctcacagaagcactctgcgtaagcctggcacatcagcagttctattatcaacctgcctttacataatttattgatctactacatatatttgaaggtggaggggggcaaggaaaagagagaaagctgagtggaagtgacatcaaaacataatgctatgtgtaggtggagcagtatccatgtcctagaggcagaagtgacaaatatcacctatttaccagtggaggaaacagatctagagtgagaaaaccacttttccagggtcacaccactgcaaacctggcagagctggcaccaaaacccaagtctcatgttctctaggccaggaatctgcagccatctggggtttacctgcatgtccacccattcagtcaactgagtgcctactatgtgcttactcacgagaaaagtgactctaaaatgagatggcactctcaggtgtaagaacaatgacatgaacatcacagctagggcaaccaactgtactgatccgcctgtgggacacagtggggttctctggacatgggaatttgagtgttaaaactaggaaagtcccaggcaaactggagccagtgggtcagcctaaattaacaagatatgaaatacacatccaagtcagctgggattttctaatctcctgctttctaggcaaaactgaagcaaccagagcgtattagtcttcctctactttgactcctaaatcaccttcctttttcccccattaacatttctagaccatggaaggggcaagagggaactttttggggttacagaaatggtctatatcctgattgtggtagtggttatacaactgtctccatttgtcaaaactcagcaaatttgtacacttaaaactggcaaattatattgttatgtaaatcgtacttcaataaaactggcaaaaaaaaaa

SEQ ID NO: 916527 - DNA, 4001 bp, Homo sapiens
gcaccccagcctgggcgacagagtgagactccatatgaaaaagaaaaaaaaaacaaacaaacaagaaaacaggatgggtatacctacaaacctcctaaaattgggcaaaacactcccgctactggcacttatattcctagatttcaacattaaattctactcatattcaagtttttcaagtacttacttatatttataatataaccactaacataggcttttgaaatacaattatgaataaacaaagagctccaagctcttatatagaaaaaaaattaatatactccttggaaaatacatctggtattctcagattctcagtgtgtagctgtttcaaatacaggatgcactaaagtatatattaagattatgctaaaatagctgggtgtggtggtgtgtgcctgtaatcccagctacgtgggaggctgaggcaggaggagtgcttgaacccaggagttcaagactagcctgggcaacttagcaagacccaactcaaaaaaaaaaaaaagaaaaaaagattacgctaaaatcgttctccaatctccaggacaaaaatcaaacagagaaccaaagcagagaagtttcaataaaaccccatattacttcaatcagtagaaattcagggtggaagacagtttctgaaatgtatccgttcaaatcagaaacatttagcttaatcgcaatgatcctgtcatgccatttgtacttctctgtaccatgctattttttccttttcctgtacataaaattagtttttctatttctacaattaagggtgataattatgaaagttaggctctaggatatgtactctaagaaacaccttgtttacttcttctggtatccttggtttcaacatatagattaagtcacgagcagcattacaaacaaaatagctataagacaattatttttaaaccacttctgtctaatttactcttagcaaaaagctaataaaatctcaaaaaattaaataattttaataacacccacgacacacacagggacactatgaagtttaccctagaggaatttacctgaaaaacgaccctcaaatcagagtatggtgataaatgggaatttaacgaaaactagcttttgaataaaaactagatgtgacaagatcaatctgagaagagtttggtaagtgctgcattctcgacccttgaccattcgtggggtgtggtggacagctcttatttttgcctgcttggtatctctgcccctttctcccaacagagtcctttggggaaccctcttccccagctctctgcctataccgtccagggctccaactccacccctcaccttcaggggcaggcctggtaagagcctggccaatcagaatagtcttcatttctagccatgggattggttcagagacaggcacatgaccgaaagtgggccaatcagagctgatcaatgtcaacttgggccatttactagagcttatccccagagtattggctcgcttctctgcagcaaccctgagctgataaaatgacagcctggatctgagggcagccatcttgctgccatgcacttgagaaagaaatggatgcctaagaaagcagagcagagattgagaaggagttgccagacattgtctgaaaccctagatctagtcccgggacctacagtaacagacatggacagattccttttagtgacttaggctggtgtaagttgggtctctgtcacgggcagccataaacgtcttagcacaaaggatcgaagtgcatctaagagtggcgcctcagtatctccctttaatgtctaacctaatagagtgctattattcacactcatcaaagtcgtgaaggcaagaagggaacaaccaccctagaaaaacagctgagaagtgggtcacgttacgtatatgaggttctcgctgaaacgcttgcggaggttgtcgacaaaggcagattcgctggtgtacgcgtccaatagcacaaaatcctgaaccccgaccttgtcccgggcagtcagcgccccttccatgtgcagacggatgtgtttcctcctcacgtcttctttctacgggaaatagaacattcttcagcagctcatctatttggtaatatctattacacgtctaatgcatggaaataacaagatgctaaaccctgggatagtagagagccagcattaaattatgccgtcttcacttagagtttacaatatggttggggatacaagatcataatcataaaaaataggaatagcagcagctgataggaaccaagtatttactgctaggtactattctaaacacttgacttatactgtttcatttgatcttcattctgaccctatgaaatactattatgatgcccattctacagatgagaaaactgaggcataggaatgtcataagccacgcccaaaatctgccaaaagacgcagccagaaaatgaacctagacaacatacccagacttgctttcctgacaaccatggactcaataaatgttttttttaaattaatgtttcctttatgttgattagtcaagcttgaattttttctttttttaaaattaatttttctttatttcaataagtgttaattgtgtaaactcactttgtaattctcacatgggtggtgaggagtttgggccagaaagggaaattcttgctacagaggaatatttaaggaaggacaaacttggagtgttcctctccaaggatgggcttcagatgtcactggagaaggtgtggctacagcccattggatggcaaagaatctcaccaggataccagggccagagctggttcggtcactgggcaggcaccaggcatgaccttcctgagcacccgcgctgctggatgggagaccatggagggggccaaggaaatcaaccttccagggctcaggcaagctgcggccagagggcaggtgtgcgttgggagagggaacaggagtaggtatgaagcctggagtgtgtaatgtctgcatcaggagggctgtgacaaagtggtcaccaggcccttggccagagctgtgaggtcactgagagactatgtgctctgggcacacggttagtgtgtgtcccccccacataccacgtgcagcagaatgtacagtctgaaaacaagaaaaagcaaaacatagcaaaggacatcaggaagagaagcggcctgcctttgcaatgtccctccagtgccctctagtgacaaaaatgacattgtgttcactttaaggagaaatgcctaaagcgtgcagttggttattgctcagcaggtaatgaagggtgaatttggatctgagaggcaataaattgacaactggtacatatggatatgcaaaggtcctagcatagccaaattaaccttgcaaaagaaaaacaaagctagaataagactgtgtttaataagactgcgtctcaattgattttcagtagaggtcccaaaacaattcagcacagaaatggaaaacatttccatccaatggtgcaggaacaactagatatttataaagaaaaaaaattgcagttgtgtgtggtggctcacagctgtgatcccagcacactgggatgctgaggcaggaggattgtctaaagccaggagttggagaccagcctgggcaacacagggagattcccatctctacttaaaaatatataaatagaaaaagaaagtaaaaatgcatttcagtccctatattacattacactacactacacacacacacacacacacacacacacacacacacacacacacacgaacttgagatgcatcttagacctaaatgcaaatttaaaatctatataaagctactggaagtaaacaaggggaccatctttgtaaccaggggaaggcaaagttttcttagatgagagccaggaagaaataataataaaagacacaaaataagaaatcagacttcaccaaatataaagcttctcattagaagacactgttaagaaaataggcaagtcacagaacagcagaaaatattcctaaattatacagacgcaaagaatttgtatccagaataaa

SEQ ID NO: 916528 - DNA, 4001 bp, Homo sapiens
aatcccagctactcaggagactgaggcaggagaatcacttgaacccaggaggcggaggctggttgcagtgcactgtgattgtgcaactgcactctagcctggatgacagaatgagactgtctccaaaaaaaaaaaaaaaaaaaaaaaaaaggtgagcctggagccaggcatggtggctcacacctataatcccagcactttgggaggctgagtaggtcaagagttcaagtccagcctggctaacatggtaaactcctgtctctactaaaaacatggaagttcgctgggcctggtggcgtgcaactgtaatctcagctactcaggaggctgaggcaggagaatcgcttgaacctgggaggcagagggtgcagtgaactgagattgtgccactgtactccaacctggacgacagagtgagactcatctcaaaagaaaaaaaaggtgagcctgaaacagtccacaggggttcaaattctagctccaagaaatactaactgagtggccttagacaaattacacaacaacaataaagcctcagtttcctcatctgtttttttttttgttgttgttgttgttaaagggttcaggggcaggaaaaaacagtagccacctcttgagaatgggtgaagattatattagataacccatataaaaggccaaggccagtgactgtcataatgagtcatctataaaccttagctataggattgttgctaaaatcaaatgagatgtgagagtaaaaaaaaaaatcacacaaattatgaaataaaagccggactaactgtggccagaaacaaagttaaccaccgccccccgctcccaaaacgattcccaccttggagagaagcctccaatttagtaacatccacatgaggtctataaatacgatgtctacttttgtaaaaaccactgaccttgaagcttcctcaccattaagtgagatagaccaagaccataaaaccatctaagaggaaaggaaatgcaaaaaggaccaatccaattacacatttcggttattggaaaagggtttctcccaaactcaaaatctgtgatttttcactaccagggtaaatggatgagatgacatcaaggtcttcaagtctgcgggttgaggtaagagttgtggagagggatctgcttagcacagggaaggaaagctgcagagaaaaccacagagaagctgcagaaaggagaagccctccagtagctctgcatgcccctctgacacgagctatcacaatctcttcaccgctattttaggcccaagaccccctccccccgcctcccacgtgtgaccagagtagctgcttctccacccaacagctctggattgggagcctggaatctcgggcctgctcctgactcgatctgggtgaccttgcgtcagccccttccccactccggacctcagtttctcctatgcaccgaagcccacctagtcagacaaccctctaggcccaattcccgtaaataaaaaaaaatctctggtagggaatcttccctcaggcagggcgtcccaccctcgtgccggagccggcttccaccttcggggagatctccggtctccctaggagcggcggtaacgatgcagcctgcgggtagcgcaggtgtctgcagaaccacgcgtcccacggggcctgccaagcaggccagctctgccgaccagctgctgcccagaccgcgccactaccaccccaaggctgaggaaggttgggccggcgcctacgcgaggcccgcggctgcggcctagtggcccgcgcggcccgcccccctgcgcctgcccggcccgcgcgccggccctcagcacccctcctgggctttcgccccagcctcggcagccctcggcgcgtcgggctggcgagcgggctggtccaagacactcaccgtaaatgggccggaggcgcctgtcgttagggtcctgcacatggccccgcgtcgccatgatgacaagcgcagaaccacagtgcgcacgcgcggggcaggaccccgggaaagggctattaaagggccagcgtcgatctcgcttgtctatcacgatagtcgcggtgctgcgactgaacgcgcctgcgcggaaagggaagcatccacccttgccgattgccacctctttaaacgctgttccttcacttagcaggtgggatcaagctggcaagaggaggcagctgttgctgttaaagtcttccgagtcactgactgggaagttaggagaggaggggagaaagctctcaaagttagggttcggctgctcctgtttatcctatttattctccgtcctgaagaaccagctagacttggctgtgattaatcgcagaggaaccagaaactcccgggggagagagacccaggggaaagttggggaagcggggctgatcaacagcaaaaatctgccaaaaaagttcgagagagccgggcgctgtggctcagcctgtaatcccagcactttgggaggccgaggcgggcggatcacaaggtcaggagatcgagaccatcctggctaacacggtgaaaccccatctctactaaaaatacaaaaaaagttagcggggcgtagtggcgggcgcctgtagtcccagctactcatgaggctgaggcaggagaatggcgtgaacccaggaggcggagcttgcagtaagccgagatcgcgccactgcaccccagcctgggcgacagagcgagactccatctcaaaaaaaaaaaaaaaaaaagaaaaaagttcgagagccctccaccacctgttcctggaccaaactgagcgtcaggctgctgtttctcctggttcagtaaggagatgcagatgaactggagaggaagcgagtttttatttctgcaaccagttacagggagaaggcctggaaattatcaccagaccaacttaaaattacaaagctttccagagcttatataccttctaagctatatgtctacgtgtaaatgtgcattcatctaaagacataagtgattaactcgccgggcgcggtggctcatgcctgtaatcccagcactttgggaggccaaggcgggcggatcacgaggtcaggagatcgagaccacggtgaaaccccatctctactaaaaatacaaaaaattagctgggcgcagtgacaggcgcctgtagtcccagctactagggaggctgaggcaggagaatggcgtgaacccggaaggcggagcttgcagtgagccgagatcccggcactgcactccagcctgggcgagggaggctccgtctcaaaaaaaaaaaaataataataataataattgattaactcactttagtctataactaaggtttgagtcctgaagactttcctttgaagcctcagtaaatttacttaatctaaatggcaataggtgctggggtgattatccttatcttgcctcctactaaatcacggaggtttggggagttacttcagacccccaataaaatttgtttaatcctaaatgggtcctgttaggaattctttcgttattttgtcatgctttaaggccaaggaaaggcctaggcaaaactcttggtgggcttttgttacattccatcctttgtataagggcactggctttttttttttagcttttaatatgtaacttaaccactcagttagtactgaaacagttgttatggaggcctgtgttagtgagacctggcctgccacacacccttctcccaggactcagccaacaaagaagcatcctagatgaatacttactcggtatctgcctagagtatttaaatgcaaggtctttacatttattctctcatttaattttcataactgtcatcgtatttccctgggaggtagatcttattattacctctctttttacagatagatttattcgtacaacactgagttattgagtgcctattatttgacacactcttgttttaggcacagaggatacatcaataaataaaatagacagagacttaatggagtttttatttgtagtgagggagacagacaataaataagtagatagcctattacatggtgata

SEQ ID NO: 916529 - DNA, 4001 bp, Homo sapiens
tggcctgtgtctgtaggagtcgaagcgtcttacaaccttatcttcagcttttatctttttggtctggggcaagaagaacttgagcgctgaggctgaccagcaccgacctgggatggctggacctccctctcccccaaaacacaatcctcaccttcccctctaaacactcagcagtctcaacactgaagtgaagtcacccatactaaagtgaatgtaggagcccagtctcccccacagtggacgctgctggccagcttcattccctgtgaaggggccacagccccaggtggctaaaagggagggtgtggcaccttccctggctttcccactcagtgagccaggtggtgccttactcttctccgctcagcttttcccaggggttaagcatttatttatttatttatttatttatttatttgagacggagtctcgctctgtcacccaggctggagtgcagtggcgctgtcactgcaacctccgcctcccgggttcaagcgattctcctgcctcagcctcctgagtagctgagattacaggcgcccgccaccatgcccggctaatttttgtatttttagtagaaacggggtttcaccatgttggtcaggctgggctcgaattcctgacctcgtgatccacccgcctcagcctcccaaagtgctgggattacaggcctgagccaccgggcccgcccggcctggttaagcattcttaacgcacgcttcctctctcccctcagaacctctccacccttccaggctgcccagtgctcctcagtggcccctctcctagcagtgacactccccacttcctcggtcagccttttccttcagctcaggggccgtggcagggggaggggcgcaattgttctgctccggggccgttccgcccacacacactcccacagtggtagcgtctgtaggcgaaaaccgcccaggggctcccgcctactctcctctcccatattttccacccgcatcttcaagtggagtgggggagcggctcaaggcctcttgatgaaggggctgcacactgaaactcccctccccgctctgtgaataaagggacagatatgggaaggaacgcctaaggcctccctgcctccctcgtcaccccccctttcccccgctgatgctcctttaactcaaaggcaccgggggcccgcgcgctccgtgccaacgagggactgaggcaactgagcgtccccccaccttccgcactgatgccagctcgagctccagggcatcccctggtgcttggaggctcccacattctttgcagggggctcttaggccagatggagcccacagagtaaaccaggaatggagatttgggtactactctttcatatccagcttcatcagatgcttgcctgctcccagggccccctaattcgaagacgcacccccttttccatcagtctccaccccccacccccgtcctgcttccccacgtcctcccctcgacctccgccctctggaccccattcccaagtccagctccacccatctccactccccgctgcctccctttgcccactaacttgagtctgggctgcagggtccggcgggcgctgtcccctccgcccggcggctgctcggctgtgggggaaggcgctctgtgcatggacggccggagatcacccgggctgcccttctcggtgcccggcgctcggcgcctgctgcgtgctgccctcttccccgcgcacgatgccgtgtccaccgctgtccaggctctgtccctccctccacgtcttctctctccgagcctccgcgcctctgtctgtgcctctgcccccccaccctccccggctgcgcttgccgcctctccgcgcctccgcccccgcaggacgcacagggagcgaggcccggagctgcgctggctgccgggctggcgggcggagggcgtgggcagagccgggggcgggggtgggggcgggggccggggaggcgggcgctggggcctctcggccgcggagacgccgcggcttagagactgggagaggcggagacggggggggagggggtgtggagcaggaggcgggggcggggattcagagccggggcgccgaattggggaccgaggtgaccgaggcccggctgtgcagggcgggcttggggacccagcgggcggggcgaggtcgttctgtgccgcccacgccggatgcacagccggccctcttggcgcccacgtacccacgtgagcgccccgccggcgacattccttctctcccccacccctccgagctgagagaggagtttcacaaccacgcacaagtacacaaagacacagaagcgcacggacgtgcacacgcgcctaaacaactacggggacgcccgttgcccatactcaggccttgtggtgctggacgtgtgaatgttagcagtgagccgggaaaagttagcgaaggctgggctgtgcggcttctcctgtgcgtgcatctgactcccgtatagtgtgcacttaaggcgggcctgagagcgtggggctctgcagggatctcctagatatccccgcgcccctcctcagccccaatggaataatctgagggggtcgctctcagaaacccaggcctccatgctagcctggaaagtttgggaaacaggaatgggagggttatgctgcacgccaccacttaggtgcgcgtgttgattagacgcgtcggcttttgtcagcgcgtaggtcaggcagggattcctccacttgtcctctgtttgctgaggatgaggccctgcctgggaattttgtgtgacaaagacgatacccttcctggggccgtctattagggacctcgcccgagagtctagtggaagatgagtaagaggtcgggagcctacgacgtgacttcctgcggcggagctggaaggaggagcgccttgaaggagcttagcccccgcctctgcaacccaccaccgtctccccctttggtttctcctagccccatctggttcgcattgcactcccgcccacggctgggagggctgttgggggaggcgggggctctaagggcccggcccatagactctaagccccagggaaaggagggggggtgggggccggggaaagcgagcggactggccacaggtgaggtttcccctagtccggaatctcagccccgccccgcctctctgtccgcacttctgaggggctggggtggggcatggcggggcgtggaggccgtggaccggggctggttttacaatgtggcctagcgaggagacctttccgccttgtggggtccggggagaaggagcgcgttgttggtgggaggatttcagttgctcaggtcctcttctccaacctattaagcgccaaacacagtgggggtggtgggaacgagcagagtcccgtctcccagtcccccgccccgcaactggagggtgcggctagacgggctcccctggggacgctcccgaccccgtacggggtgtgggcgacccctccccccccacctcaggttattttggatcccgggctgccagccgctggccccgggtttccacgtgccccctccctcccccagcccacgctccccgtgacgcacatcctccgcccacgcagcctctgctcgaggcgcccccctccctcccaccccggcccccttggggcggcgctgagccttaggatctggagggagacgcccgcccaaggaggaggcggagtagggcgtgagcaagtgagcggcaacctactgggcgcggggcgcccgggtcccggtcctgatccgggaaagagggggagggaggagccgattttgagctctccgctcccgggtcctgggagagggggtgctcggccagagagggacgagggaagagaaattccgcagaaggggcctgcccactcccctaggggagccagcgggggtccgggtgcgaacccgtgtgtgagagtgaaactaccgggtgtttgtgtctttgtgcccttgtttctcaagattgtcgtgagattcggatgagagaatgtacgggaaaactctctaaattgtagaatgctaagcatat

SEQ ID NO: 916530 - DNA, 4001 bp, Homo sapiens
tacatattcagatcctgctccctcccatgcttcttgtcttgatctgccctcctttcccaccattgtggccacaggactcaccgccttgttgggtgcctgctgggtgctgtactctgggtttggctcactgaagttaggaacctcagaataaaccatacagaatctgcaagggaagaaagtagctaaagccttgaattcatcctctgggccactgctggaggcctcagaaaagtccagataggttcggtgtggtcactcacacctgtaatcctagcactttgggaggcagaagcgggaggatcacttcagcccaggagtttgggaccagcctgggcaacatggcgaaaccccatccctataaaaaatacaaaaaaattagctgggtgtggtgaagcacgcctgtagtctcagctacttgggaggctgatgtgggaggatcacctgaccccgggaggtcaaggctacagtgagcccagatcatgccactgtactccagcctgagcgacagagactgtttctcaaaacaaacaaacaaacaaacagaaaaagtccagaaatgaggcttggactgcacaccctatgctgcctccttgcaaacccctttgccctggtgcttcttcatcccaatccccaagacagcacttactctccaatcttctgcagatcacccccacggccagtatatagtgtcagacaacctttgaaaactgaagcgtacctatgggaggcaaaaaaagcaaaattcagtactcagaagtgttatagggactgttaaccccactcttgattgttgttgcctttggaaggccagaagtcaccagctgacttaccctttggtgagccggataatgtccccaggctggatcagattgccaacatcgtcccagacagagatattgatgctgcctgttttgtccgccactttgcaggtccgaacctcatgcccgtcctttgtcttggtcactcggcctgaacggaacagataaatcgaggtgggaggatggtcaaataaatggagtggtatctctcagaaggatgagatgtggatattggtggaatgagggaaaaggtgtacaaacaggggaaagcccaaatccctggggcataaagggttgggattgtggaaggggtggtggagggtggaggtgggagttcaggggccagcaccatggagagggccctgagtggaaagaggcccgcgtcgcacaggaggtctagatctggcaagagttctatctaccctatacctgactgcaactttctgtcccagggtcgaagagattgggagtgaggagtgtcttgcagcttgccttgccatccccatagcaagttaagaacgcagacagcgttcttcccctcctgcccccgacccccatcccgcgaacccgccaccccagtatagacacctgtctccagcacaatgaagataaggttcagattcttgagcccaggcttgatatccttcacaaaggtctccgtcgtcatgctgcctgagcctcggcaccccactggatggggaatagaggatgaaggctcaatgcttggatcctttgcccccatgctccacttcccaaggcctacctaccccattaggctggggtcaggcagcctcaacccctctaacccttctaaaagattaaaaaagaacatccccggaggcctccaacttcaggatcagaatttgggggtctctggacaggctgctttggggctggaaggccccctgccgggatgctcttttagtctcaagccgcgaagtggcggagccgacgtagacaggggtagggaacccggtgcacagccagggagtagaatcttactggccagatcttccggaaccctcatcccgacaagccgggactcggtccatcccctcccctacccgcagcccaccacccacccaagccagccggcaggactgtgcacgccgctgagcagcccgcagggggagccacaggctccgctgccgccggatgctgccccgtggaacgcgggagtgcggacattcccggaagtttcccccggctggcctcctccggccaatcagcaccgcccgggcgcgccctgcgtcccgccgcctgccctgcccagccaatcgggatcagagactcgtgcgccgcgaagggggcgaatttcaggtattaaaggaaccttggagatagttggctctgtagggggaaaaatccaccactagaaggcgcacagggcccccagttttccttaacttggctagggagaatgcacttaggttctaagacgtttctttccaaagagtgacacaatgggaaaaggagcaagggcttcggaatctggcggacaaaagtttgaatcctggctcaatgcttcacttcatttctcgactatttaaacatatgtaattccaattccgcaaggcgcggtggctcacgcctgtaatcccagcacgtagggaggcataggctggaggatagcatgagtccaggagttccagacctgcctgggcaatataacgagaccccattctccacaaaaagggaaaaaaagacaaaaaatatgtaattccatcttacgagaaaacggaagttatatttaaaaaagtgccttgcacacagtaggcacacacggtttcctccctttttattgctctaaccgttatctttgttcctgatttggggttctcatctttaatgcactacccagcttggtcaaggtctctgggaaaagtggcatttacaccagagacaaaaggcaggctcacccttcttggaagaaatggaacctgcgacaaagagagaaacattgttagtcccttttttttttttttttgaaacagggtctcgctgtgtaacccaggctggagtgtagtggtgcaatcttggcttactgcaacctcccaccacagcctccgtagtagctggtactacaggttcgcactaccaccctcggctaatttctgtattttttttgtagagacagtttcgccatgtttcccaggctggtctcggactcatgacctcaagggatccgcccacctcgtcctcccaaagtgctaggattacaggcgtgagccgctgcacctggccatactactcttccccgccccgccccaccgctccaccccggcaaaggagtcttgctctgtcgcccaggttggagtgcagtggcgcgatctcggctcactgcaatgcaacctctgcctcccgggttcaagcgattctcctgtctcagcctcccgagtagctgggattacaggcgcccgccaccacgcccggctactttttttgtatttttagtagagacggggtttcaccacgttggccagcctgggctcaaactcctgacctcgtgatccaccagcctcggtctcccaaagtgttgggattaaaggcatgaaccaccgcgcccggccatactactcttatcttacttatctcagagtcccgctagaagacagcagaaaggaggcctgaaactttagttccttttgggacctgtcaaattgtccacaaaaggtagctagctctgtattgttgtgtataaacaaattacataaagatatgtgtgtatgtgtgtattaatgtgcattagcatttgcttagccaatgtccacaataaataccatactatttaataccagattagtctaggaagtcatgtgattgtaatgccttggtttgcttaattaatcccttatctgctcacggagctctttaggctccacattgacttcccttggatcccacgttctctaccgcccacatccccaacaccacggtgttgtaagctaaggaaatcaaaccccaactcaggaagagggaaattttttctcccttccttcctcttaggtgtttcagggaactccacaagtgttcggggagccatcgtggatacggcaggagagcgcctgggagagaggcagacaacccgttgagcaccccagatctaagctttgcggtcagactccctcactccccaccccgcggccgccttgttaactgcaatatccattcccatgacaggag

SEQ ID NO: 916531 - DNA, 4001 bp, Homo sapiens
gctgtattaatcccttcagctgttaaaatcaaacaggtgggaagaaactttatgctttcaactataagcaactctactgtaactccaaaaagggacaggaattgcccttaaataacaaatgaaatttaaaaaaaaccaaaaaggtgagaatgaaaattacagcctgaagatttccttcatttaacgctgcacaactgactcagaaaggctatcattttaagaacttttcattacctcctcctaagttttctacagagatatgttttaaccagaatttaaaattagccttcacagtcgttaatttcgacgctgaggataaaaggatttatttcaatcctgggtttcacacaatgatgcaggaactattccagcacactagaagtatctcagcaccaccaacccataaacaagttatccgacctaggacgactctggggcccagtaggacacatttaccaccagcacacatctcatccagacatgtgataaaggcacaatgccaagctctgctaactaaaaccttgatgcaacttgctggctggagtttcacaaatgctccgggctccttggcctgtgtcatctagttccaataggtaagaatcactgagcccattccctgctgagttttcctatgtgaggtgggggttccacaggagagcttcttttgaggcgacaggcataacatagaaagcaagctagggtacttttaacgtccacgaatcttaaaaatattatttttactccaaatccctaaagaagtatctccaggatagtaattttacggtctatcctccttggtaaagctgcaaccccatcctcctaaaaagtgtatttccccttggtcattttgcccaccaaatggctttagggttaattttaattaatggcaaggagggtagggaaacctacctgtctcagcctggggctgcggcaactcctgctctgtagcagggacggtttctgtggcttcgccgggcatttctgaaggaagggaataaaaaggaggcctaaattgattgggatacattcacttgcccaacccggagataagtattcttaaaaactccgaggagggctgttagaaaaaaatcgtgagggtgtttggtgacaaccttccccaaagcacctgggaataagaggtaaatatgatgtgaccctcacgcctctatcaaggccagcaattcccactgcattctcaacccgagggagaggatcccgggctggctctcgatcatgggagacttcagacgctactgtgaaccccctccactcctaatactcacactggctgggctggggcctcctggactacgtttgccgactttggggtaccaggaggggaaagacggtgttttaagtccaacacttgcttgtcacagggagaacggtgttacaggttctaaggctgtgaccccttacccttttctggatcctgtgaagcagttcccaaaacaagacgcactcctcttccgccctcaacactgcaactgctcccatctctgcaggctcggattctgggcccgccccgcagcccttctaccctgcttttgccaggacaccaaccgcagaccccattttgtccggaggcccaggggcgagtaggaaccctgtggcccagtaaagcctccaactctccttaactctcagtccccggggcggcttagcccgaaagaaaggcggatggctgcggatagacagtagcggcacagaaagtacttactgtgcagggaacgcggaaccaagatggcggcagaaagaccgagcgagagcgtgacccacgcctgttgcagaaggaagcctggagcggagggggtgggactaggatccgattccgggtcaagagctgccggcagccacttcctttgacgagtgactgtcaggccgttcccacggcgggggtggtgacaaggactaaagggtaagaatttagaacgggacgcgcaggcctagcaggagctctctgcgcggacccacgcagtcctcagaactaagcagactccgccctccggtccgcgaagtggcgactgcggtattaagtcgacctcgcgatttctcaaatagtgcaggaagaagacattaaatagcgaatgctagagactgcattcacaacattggagggtggaagtgacttaggctaaccagttatttttggaacacacgatgtgaaaacatttaaaagctgctggaccctctccccccccatcaacaacaacaaaaaaacccattttaaaacttgagagatgtgatgggtcacatataacttcagttcagattataaatttaattcgatttttcttgttctgttcaatgactagagagactcaaacgatgtcaccagatgacagcaactcatgcgtgttaaactcttcgtaaaacaatgttagctgtacccccgccccccccccaaaaaaaacacttcttgtaaccaaattctgtaattatgttccaaccttgtatggataacgtaatccagctaaaaactcctctgtctccctaaataaatgaaatcgtaacttctctacttctgaaggctgactccattctttggaggttttctggttggtccatcctcacactgcccttgaataaactctttaaatagattccggcccttttgattgttttaggttcacgacaatttagccgatgttgaaattataaagctgcagattctccttcccagaaaaaaagaacataggcacatatacaattcctttgcttgctattttgggcacttcttggatttttttttttttttttttgagtcgctctgtcggccaggctagagtgcagtggcacgatctcggctcactgcaatctccgcctccagggctcaagcagttgtcccgcctcagcctcccgagtagctgggattacaggtgtgtgccaccacccccggctaattttttatttttagtagagacgggtttcaccatgttggccaggctggtcttgaactcctgacctcaggtaatccgcctgcctcggcctcccaaactactgggattacaggcgtgagccaccatgcccagcctgtttgttttgtttttgggacagtctcacttttattgcccaggctggggtgcaaaggcacgatctcggctcactgcaacctccccttcccgggtcaagcgattctcctgcctcagcctcccgggtagctgggattacaggcatgcgccaccacgccagtctattttttgtatttttagtagagacgggctttctccatgttggccaggctggtctcctcctgacttcaggtgatccgcctgcctcggcctcccaaagtgctgggattacaggcgtgaactaccgcccctggcacttcttggatattctaagcttatttattctaggtgtctgggaccccaccttaaaccatgctttgtacaactgtatttttgaaaagtagaatgtaaaatcagtgttgtgttaatgaaaagcctcccatatcttcccacagccctacaaaagaactcaacaaatatttgctgtacctgaattagctaaaccagtcaacatttatttattttttgaggcggagtctcgctctgtcgcccaggctggagtgcagtggcgcgatctcggcttactgcaacctcggcctcccgggttcaagcgattctcgtctcagcctccagagtagctgggattataggtacccgcctccccgcccggactcctgaccgtaggttatccgcctgcctcagcctcccaaagtgctgggattacaggtgtgagccactatgcctggcctgatttaatagctttaagacgactgtggccaccttttttttttttttttttttgagacggagtctcgctgtcacccaggctggagtgcagtggcgcgatctcagcttactgcaacctccacctcccggattctggcaattctcctgccacaaaacttctcctgtttcaccgtgttgcccaggctggtctcgaactcctgagctcaggcaatccacccgcttcggcctcccatagtgctagga

SEQ ID NO: 916532 - DNA, 4001 bp, Homo sapiens
aaattataaaggtggccaggcgcggtgcccagccaaggcaggtgaatcacttgaggtcaggagtttgagaccagcctggccaacacaccgaaaccccttctctactaagaactacaaaaattagctaggcgtggtggcatacatctgtaatacctgctactcgagagactgagacaggagaaatcacctgaacctaggaggcggaggttgcagtgagccaagatcacgccactgcactcccgcgtgggcaacagaatgagaccctgtctcaaaaaaaaaaaaagaaagaaagaaagaaagaaattataaaggcaagaacattaatgcatagtttagaaaaactgggtgaatagccatgcagagtgggtcagcgcctgtaatcccagcgacttgggaagctgagggtggaggatcacttgaggtcaggagttcaagaccagcccgagctgcaaagtgagaccctgtctctacaaaaataattttttaattagctgggcatagtgacacacgcctcttgtcctagtagttgggaggctgaggcaagaggatcacttgatctcagggttgaggctgcggtgatccatgatcacaccattgcactccagcctatgtgacaaagtgagtccctgattctaaaaaagaggaaaagcagggtgacattcaaatctgaggctcaaatatagcaatcatgtttacttattccttttccacaacctactctttacaactgtagtcataatgtaaatgcgctttttaagctattttacagcgttcagtgttaccaatggcattcttggtaaagttggttcattctcaagtttttgaaaactactgaaaaattgattttcaaaaaagtggtagcggctttatgagtatcccgagtatcccccaccccttgcagctaccagtcagaagcatgagtactagcacaggttttgaagccaaactggacttctagctacattctgtttgactgtcagtagattaaactttctggaattatctttaccataaagttgggtcaacgcttcccaggacttaggagaattagacatgggaggtgctcccaaactcagagctgcccagtaacatccacaaacccagagaatggagaagagacagccgttactgacatagaaagaattacccaaattatgtattacagaaatctcatcgtgatttgccatgccatttttggcaaaacaaaatcatgctcatccctgagctatgacgttaggtcttctggctaattagcaataaatctgctatttattcacatgtgtccagcactatgtgaagatgtacacatcaccttcatttaactataacgatacatttttgtttccaccatgcctaagcccataggttctcaaacttactgcacactgttcaactgccgaattctgtgtccttcaactcaatgcacactcctgagacctgggacatagttcaaagggcaggtgccaccaagttataatggaaaaaggggtttccagaggattagttgataataacacttctttatagtaatggtccatcattgctcaagagggaaatgatcccttaaccctctctccttctctcttttcccttaaggaacttggcctttcaaggataaatttctttcttaccagtctccgtgtgaggcatctcagcagaagacatttgcaaggatggatagttttcttcaggcccacaaatcacaggcataggtgaagattctttacagtcggatgcttcaaagcaaggcaagctttggggacaagctggatccacactcatgttagtatagaggaagaggaggaaaaaatttaagaggtggactggaaaaaaggttaaggcagctttaagacttttctggaagatgttagagaaataggacctccagaaggaaaagtatcaagaaattgggataaagtgagttgcctgcataataacatgaggcaaccagctcagtccagcagaacgttaaaatcctggagtctctagatttataatgaaggctctatcaccttagacccacccctcctggcgggcacaccccctactgacccacccttgtgaattctcagttaatcccgtctaccagtctcaccaaggccattgtaatgcaaaagtagctgcagagtaacccagactaggtggggaactagaaaaccgagcaacagaacctgaagacaaacccagcaacaaatacttctaggttcaccacgtttccaacttttaaatcaggaatatggttcaacaggaatgggataaaactttaatatttttaaaaattaagaaaaaggccgggcgcggtggcccacccctgtaatcccagtaaattgggaggccgtggcaggcggatcacctgaagtcaggagtttgaaaccagcctggccaacatggcgaaaccccctctctactaaaaatacaaaaattagccacgcatggtggtgggtgtctgtagtcccagctactctggaagctgaggcgggagaatcccttgaacctgggaggcagaggttgtggtgagccgatatcgcgccactgtactccagcctgggcaacagagcgggactacgtctcaaaaaaaaaaggggggggtgggggatgcatgcaccttaaattcctgaggttattgaaattctcattagggtgatttcttgatttgagataacttagtgtctcaaaatctggctagtttaggcagaaatttcaactagctccattttcctctttcattcactctgaggttatagtgaaacacaacatggcattatagcatgaagccaaggcatcagttaatgttgaaaatggtacttgttttcagcacctaccttagtttcctttagtttggtttcttgtctatccctcctcccaggtagtcgacttctggctttttccctctggctctttagcttcttcccaggtctggtgatttgtcatgtctttcaagactactccgtgcccatctcgtgtgggtgtgtgtgtttctgggggaagggaggtgttttccaaaggaacaaagtttttagagtggggttccagcactaacatttatggacaaagtctacagttttcgattttccttcctattcccaaacccaacattcaagaaacctaagatttctttctcttttccagtcttccataccgaaaagtaaactcttagcaaatcccgattatgtaatttttgaagacaaaactctttgactcattctcctctgcactctgctcctgggtctgcacccagagcagctggctttgctcccacacaagctgacttttgttcacaatgcaaagactcgaaaagtattgcttgatgtgaaacaaggaaatgaaattgggcgtaatcttttttcttctcagactaccattccggagaagattaagcataggggcatcagggagccggtgagtggggctagtacatcatgcttcaggcagatagtctatgtctcgtaggaaataggatgatttctttaaaagaagggaaaaacttgccctcctgtctctcttaatcagcacagtttgttaagtgggggctgtcaaggccaccaagactcaccgaggctgagcttgcccgcagctctccaaagggcaggtaccagaagctttgttctttgcagaagggggtctttgcataaaagcctgagctgaattcccccatcccccgctccctgtcccattgtgtctagggtaagagcctccggagtgaaagaccaaagggaaggggctggtggctggaaggccgacttactacattcttcgccaaggaaagcaattggaataaagttgaggtttaggaagctatctgactttagattttttggaacaggctggactaaggatgtgttaaaatgagctaacggctgggcacggtggctcacacctgtaatcccagcactttgcgaggccgagccaggtgcatcatctgagatcaggagttcaagaccagcctgaccaacatggtgaaaccctgtctgtactaaaaatacaaaaattaactgggctgg

SEQ ID NO: 916533 - DNA, 4001 bp, Homo sapiens
ttcacatccacttccacacattcctcttcagagtcagacattaatgaccctgacattgcaaaaaaagtaaaatggctgccaggcacggtggttcccgcctgtaatcccagcattttgggaagccaaggcaggcagatcacctgaggccaggagtttgagaccagcttggccaacatggtgaaaccctgtctctactaaaaatacaaaaattagctaggcttggtggcgcacgcctgtagtcccagctacttgagaagttgaggcaggagaatcgcttgaacccgggaggcaaagattgcagtgagctgagatcgccccactgtgctccagcctgggcaacagagcaaaactcagtctcaaaacaaacaaacaaacaacaacaaaacaaaggccaggcgtggagggtcactcctgtaatcgcagcactttgggaggccgaagtgggtggaccacttgaggtcaggagttcaggaccagcctggccaacatggtgaaaccccgtctctattaaaaatacaaaaaactaatcggacatgtcttttgaaccccgggagggggaggtcgcagttagttgagattgtgccactccagcctgggcaacagaacaagactgtgactcaagaaacaaaaacaaaagaaaagaaatcaaatggccaatttcccatccccattttcttttaagggtatcgtggtggtgagatagtgggtttgttttgttttgtttgtttgctgttttgttttgttgagacggagtctcactctgaagcccagactggagtgcagtggctggatctcagctcaccacaacctctgccttctgggctcgaaggattctcttgcctcagcctcctgagtagctgggactacaggcgtgcctcaccaagcccggctaattgttgtatttttggtggagatggggggtttcatcatcttggccaggatggtcttcaactcctgagctcaagcgatctgccccgcttggcctcccaaagtgctgggatttgaggtgtgagccactgtgcctggcctgtccccatcttacttacttgaatgatcaggggcttctgaagtatcgggatctctctccacattgaaagagtttattctcccacttcctgaacaccatcctttcctggggcttcctcaagtcaatggctgctctttcaaagctttctttgttgctcctctttcccctactgatttctgtccctgtgctttttcaatcacactcaaggttaaatcccttcacctcttatctcctttacatgtagctctaatccaggtcatctaatctcatggtttttaatactgcccaaaagggagattattttcaaatttttatttccagtcttctatgtcaaactcccaattcaatatctctgcttggatgtctaataagttatgtgaattgaacttaaaattcccaaactcagtttatggctcccttcactgaacgctgacccactcaggcctctctatcttagtaaagccaactccatctgcccagtggtttgagtcaaaaagcttggtgctgtctttcacttcttccctttctcatagctcaactcaatctgtcagaaagtcttgcttttctttctttaaaatatatccagacaactgccacttcttttttttttttttttttttgagacggagtctcactctgtcgcccaggctggagtgcagtggcgcgatctcggctcactgcaagctccgcctcccgggttcacgccattctcccgcctcagcctccagagtagctaggactacaggcgcccgccaccacgcccagctaattttttgtatttttagtagaaacggggttttaccttgttagccaagatggtctcgatttcctgacctcgtgatctgcccgcctcggcctcccaaagtgctgggattacaggcgtgagccaccgcgcccggtgcattgaggagttttaaagaccaattagtccttggtagggaggttacagagatgaccgaccagataaggtagatgtcatccatcttttggatgtcagtgggccacaaatatgagcacccagtggcaattcacaaaaggaattccacaaaaagaacacatttcctgacatctatttttggagccatgaagaaaaaaaacttttcaaatagccatatgaaaaatgttcaatttacatgttgcagagtgtcccaaatagtgagatatactgataagaaaatgctttccaaaatacagtggagagacaggaaaaaaaaaatgtagggctgggcgtggtggctcatgcctgtaatcctagcactttgggaggtcaaggcgggcagatcatttaagatcagaagttcaagaccagcctgaccaacatggtaaaactccatctctactaaaaatacaaaacttagcttgtgtagaagtacgtgcttgtgatcccagctacttggaggctgaggcaggagaatcgcttgaacctaagaggcagaggttgcagtgagccaagatactgccactgcactccattcggggacagacagtgagactccatgttaaaaataaataaatacataaatattttatgaaaatgctacttggtcgggtgaggtgtctcacatctgtaatcctagtattttggaaggccaaggcagaagaattgtttgagctcaggagttcaagaacagcttgggcatcacggtgagacccctgattccattattattattattattattattattattattattattattttaatttttgagacgaagtctcctttcttgtcccccaggctggagtgcaatggtgcaatcttggctcactgcaacctccgcctcccaggttcaagcgattctcctgcctcagcttcccgagtagctgggattacaggcacctgccaccacgcccgggtaatttttgtatttttagtggagacagggtttcaccatgttggccaggctggcctcgaattcctgacatgaggtgatcttcctgccttggcctcccaaagtgctgggattacaggtgtgagccaccgctgcccagcccattttatttatttatttatttatttatttatttatttatttatttatttttgagacagagtcttactctgtcaccaggctggagtgcacttgtgtgatctcggctcactgcaacctccacctcccagtttcaagtgattctcctacctcagctccaagtagctgggattacaaccaagtgccactatgcccagctaattttttgtatttttaggagagatgagggtttctccatgttggccaggctggtttggaattcctgacctcaagcgatctgcctgccttggcctcccaaagtactgggatcataggcatgaaccatcgtgcctggcctccgactatactcttacctggtcacacaaccagcctcacactctggtagaagaaaccacttgttaaccacttgttaaccacttcgttaatctcagctaagagaagagaattttattttattttatttcatttcatttatttatttatttatttttgagacggagtcttgctctgtcacccaggctggagtgcagtggcatgatcttggctcactgcaagctccgcctcccgggttcacaccattctcctgcctcatcctcccaagtagctggaactacaggcgcccgccaccacgcccggctaataattttttgtagttttagtagagacggggtttcaccatgttagccaggatggtctcaatctcctgacctcgtgatccgtctgcctcagcctccgaaagtgctgggattacaggcgtgagccaccgcgcccggcagagaagagaattttaaagaatcactgaagaccgagtgcggtggctcatgcttgtaatcccagcactttgggaggctgaggcaggcggatcatttgaggtctggagttcgagaccagcctggccaacatggtggaatcacatctctactaaaaatacaaaaattagcttggcgtggtggcacaccccgtaatcccagctactccag

SEQ ID NO: 916534 - DNA, 4001 bp, Homo sapiens
aattttaaaatgcagcagtgggatatcttcaaatgtagcagtgagatttttaaaatgtagttgtttcaaaactgatcagtgaccgtctaaaatacgggctccttgaggacatcctgcgcctggttcatcctttttgcactctcaaagtctagccttcccagatgggacctcagtcccagcccccctacactgccatcccccagatctttagggcagtagggttcattgacaaggttgcaggctacaaacttggcaaagtttatactaacacctcattccatcccacctcccatcttaaaaaggaaaccgttaagtatcttattctagtgacttcaataaaggaactaatttataagacagccaagaacaattaaagtcataaagggccaaacattttattttcatctaagaaccgtttgcaggggtggtccgatcttttggcttccctgggccacactagaactgtcttgggccacacgtaaaatacattaactagctgatgagcttttttttccaaaaaaaaaaaaaaaaaaaaaacctcatgaatttgtgttgggccacatttaaagccgtcctgggccgcgggttggacaagcttggtttaggggtttagatcgatcaggatcaatactccccaaataaaaaaccctgatcaagacacccatctaacagtacctgggaaacacaataacaaccttttgctaataacagttaatataagcgctatatacgcgttaactttttaaaatactagcagtggaggcccttccttatcatcagctaacatccacaatctctggtaccaataaaaagattaagaccaaagagaagcagggaagagtttgaaacccagggacagggcttactcgcttacccttccttttcacattccaccgtctctacaactttcaaagtaagcacagaccgagggcaagggtctccaaccaggcccagccagtggccatgaagcccattaccacgtgtggagcgaagccgccgggggtttcccctccccgcgcggccgcccccaatgggcggagagcccgggagcgtcgcagcctcccccgccccctccccgcctcggggactcgtccctccacagcccctccctcccgtcggaattcgcagcctccgccgttcttttcatctcccagcggcctccctcctggtattatttttgagggaaaagcaggggggtgtccaagaggcggccggctctgcactcggcccggcccgtacgccgggggcctcccggtcctcgcggcgcagccgagtctcagggcacccgggcgtcaccgcggcctcgctccggtccacgcggaaaagacggtggagctcagagaaccttaggcctccaggccgcgccaacccctacgtcgcctcagccgtccccgataaaagcgctggtcggccccggggcccctctcaggctccggggtccggactccgcggtcctgtccgacctcacaggacgaccccggaggccacgggcggccagcggccccgactcccggctcccagtccctccatccctccggccctcccatctgcgcaggccgcccagccaacaccacgttcccccttcccttccaggcccccatccgttaccggcgactagtatggggagccaggcggccggagctgcgcaggcagtgactcagggcggcagcggcagcagcagcgggaggagcaggaggcggcgccgcgagcagatggcgctaaaaaagacccaagagcccgccgctcgcgctcatatacaattagcgtcagcacgtagggccctttcgccgccctcctcccggccttgtagtctcccagcaacgcgagcgagaggcgggtccaggccgggttgcctagcaactgaaccgtcctccttccccggcgacctccatacccccaccgaggactcctgcagccccgaggcccaggcgccgcgcttgggctcctctggttcccgccggtgtctaacctcctctgttaagcaccccaccatatcttttctccctgctgagccggaaaggaaatttcaaccccatcagttgtggggaaggcctggcccgcgtgcccggcgcccggcccgccccgcccccttcggcgttgtgctgggaacgctcagggctggcgccagtcgcctggtccctcgctcgccgcagcctagacggcggacgctccctgtcaaggcctaattcctgcaactcgccggcccccggtaaccgttttccttccccgcctaagaaaaacagttttttcctctagaccacttcggcggcctcttctgacagttttgcttctcctatgccagcgggtctccgcgcctttagggggtgctcgtcatcctttgccccccaaccccccgccacatcctcgtaactgatgtacagtccgtcagttcggcttcagttcttttgacggatgaaaatggcatatttgtgcattctctggatgcgttataatgaggacactcagtacgtccgttgtttcatctttctgaaaaagtaaatcacattaaatcctcaggcttgtaaaacctcatagctaattttcaagtgatgatgaattgactaatactaactcaaaaagttgttctcagagtatggtctgagggtccccagaccctttcatggggaaggtcaaaactatttccatattaatgtcaagactgccttttgcattctcattctctcacaagtgtacagtggggttttccggaggctacgtgacatgtgataaggaaacagactgaaaatagaagcagataggagaatccagtcatctgcggttaaaccagacgttaaagagatttgcaaaaactcgatttgggggcaagggggagtagttatttttcatataaaaattattttttgttaatatttgattgctttattgtttttaaatgaaatactcttaaaatttctcacttttaatttctgatataaatatcagtatcagtaatgcacataaaagttctttggggtcctcaacttttaaaggagtgtaaaggaatcctaagaccacaaagtttgagaacctcttctctaaatcttgcatttattgaaacttcaaactgcctagaatcccctattgtaatccacacatttagcaactttatcttccgttttaggggatacaatgttttccttggccctccagaacctcattgaaattatttgccttcccactctatactgcagacgactctgtttattcattcattttagtttttcatatacaattcctttgttgttctcatagcctattcctgtacacccttctcaacaatgatgtaatgatacaaggagcataatagcatcaataatggatcttcaggaagaacccactatacataaacaaggtagaccagtgctcagtttgaacataaatttgacacattaatttcaataagaacttcaggaatgttgcattttaatcaaagctgtgcacgatgcaaggtaattagcatattaaaatgaactaaataactttcactttctttccataaatctttatggtagcagaatttctgagacaaaattgagaagttagcttttgtggtggtttttatcccacaccagagagcctcatcaattttcggcacttcgctcatgaaggctctggattttttaggtttcaccacccccccaccaacccctataacttaggtgttatcattaccagtacatatgctctttcccccttttctccagcttcctcttcttttttcagtgtatcctagccaatctaagaaactaaacaataaaatatttctaataatgcatgcctttgtaatatagtcttttgaaccagtttgtaaatctaagtctttgccattaaagttcagggaagggcagacatttatgcattcattcaacaaatatttatgtcaggcacaacttcggactctggaaatacagcatttagtaagaaagacacggttcttgattttattgaagttatggtctagtgaggtgaggcaaatgattagagataaaataattttacta

SEQ ID NO: 916535 - DNA, 4001 bp, Homo sapiens
tatcatgcataaagcattgtacagggagagagctggaacacaggataagatacgagacctgccttctatatgttttcaacttagtggagatacaaataaattatccagataattaaaagaaattatccagataattaaaatacacaagcatttctacagaaaaagaattgggaaggaggaatggtggggaagggatagctagcaaagactttatgaataaagttggatctgggataaagcttaaaggatctgaacaggtgaaggtgggatgggcattgtagaaaaaggagtggctttctttttcacttctagagttgatttttgtataaaggttttttccttaaattattttaaactaacatttggatagcagagtaaaatgaaaatatttcctaagaagccagagacgaggctgtgactttggaaagcttgacatcatagttaatgctgcattaaaaagtgatgctgagtagaatgatggttaccagaggctggaaagggtagtggcgaggggtagggggagtgtggatcgttaatgagtacaaaaatacatttagatagaatgaataagatctagtatttgatagcactataggatgattactgtcaacaataacttattctatatttttaaataactaaaagaatatataatgtttgcaacacaaagacatgataaatgcttaaggcaacagatactccatttaccctgatatgattattacacattgtatgcctgtatcagaatctctcatgaaccacataaatatatacaccaatatgtacccataaatatatacacctaatatgtaccaataaaagtaaaaatgcacaaaacaaaagtgacgcttatcaaggtacaaatgaatccgcatgaagttcagcagcttcagtgccattctagcatgcgtgactggagaaaacggttgtagtatgctttagaaaccaagggctatgagcaactactcacaaaatatcataaattaaatgactgaaaaagatgtcagtaataagtaaaagagtagcgtttcagtttacaagggaaagtccatataaatgtgcagtatcaaggaaaatagtatgtcattttccttcatactgcaatgaattaagcagcctatgatacaaattttcaagcagaaattctttgaaatgcaaatgacatttagagaaaagtgatggtgtctatatgaattattacaaataaatgtctttttgaaagtacctattttcatacattgcagtatggatgacaataggttctctttttctcacatttgtgactgattatgattattagtaatagagcaatatctagaactaactaggcattcatcaataagtagtattaaatgattacaatagatgcatattcagaaaattttgatcatgacttttacaactctaaactaagaatacagtgtttacataagctaaatattcagcttttcagccattataactacttacatccttacactggtattcctctactactccccatttcataacatgttttatagtgcacttaaagagaaatgtgcattttagctacacaagtctgcaggtaacttcagcaactaaccttgctgtcttctttctccttggcttttccttggaggggtttcttctctccaaattcacaggttgattttaacgcaagctgacaagaaagcatggagctctctgtttcagtaagttccaaaggtcttgaagaacagtgctgtgacccagtagtgccaagatttggtatcggaagagcagtatgcacaggctttgacccaacagctggctgcctcagttttgaggcaaccccaagaacaggcatggcttctataaaattatcttcttgctgccaaagaaaatgcttctaacctcagtctggtagactccaactttagtatttccagaacaaatactttaaacaaaactagcagtcatcctgatttttaaaaagctaataatataattttcaggaagaggcaaaacttccctgcatctttagttaagtatcttttctttcttgctggctgggattcatattcattctcattctctctctctctctctttctctctctctctctctctctctgtctctctctctctctctctctctctgtctctctctctctctctgttcagtgactcagtatctaagtaatactaaatactcctttggggagtaaactcttcttcaaggtaactgctacaaagctccttcttaggattaaagagctcttagttttgcttatttttttttctcactaaagcagtctgagtctgaactttgagattgaaaaagaggaaaaaatcaaaaggaaaagcccttcagtccaactgtcagagcagccaaaagaccacaacagtggaaggacaggggttcttcctgatttcagaaatagccagcctgcattctctttttaaagaaaattgtatttcccccagctcagaaaaaataaaaagaatggacatgttaatggccaaaacaaacagctgttggaagaacttttagcccggaaacaatctcagcaataaagttgtttgtctgatttccagctatttttcactactgacagccatgagccacgatgttcattctgttgcatcccatgaaatcaggctaaaatcatgcaatagtgcaactagctaaagcagttaaatcattcatcggaccatagctgcctaggttatgaaaatagagtaaacacaggaagcagggcactaaatatgtagtaatcattgttcccaaatttaataagtcatgattataaaaacattcaaagctaacacttatgtggaatgtattacaaagcagttatggagctaagcattttatgcattatcacatttaatcattggaatgactcaaagtataggcatatttattttcttcactttatagaaagaacagctatgacttggagacactgaaaaaattgactaaaatgatgaagctagaaagggggaaagaatgtatgattttagtttgtaaacctgtcttttaaaatggttgaaaataacactgttattcaagcttatgacgtccaacttaaaatcccaagcttctaaaaactgtccaaacagatactcagtgagaatgaatgatgatgcttccatccatagaattattttaatataatcatagcatgttctatttctggttaaagcatgtcaggaactttaaataaacaaggggtaaacttttaagaaaacatctaatgtaccatgcattattgttctgaaactgattgcactcagaaaatggatacagagagcaattatatacaccaaatataaaaattagtaataatgcaaccaaaggtcttagaaaaatgagtggtggacacttagtatagacacaatgaatcatggaaattattaaatcgtaaccattttttatagaaaatgtctttctttagtgaagaaatggtcatctttggcctactgtttccaggtctttaaatcactacgtacttttatctaagaagcagtaatttatagatgaaagagccaataactaaaagtatatgttctgctgatgcagcatagaagacaggaaatgtaagttagaagtcttgcaggctttaaaaatagtaacccaagtgggctttacacagcggggtaatacaaaacaaatacaacactagtggtatcaaagaaatgaaataatctctctgaggaagtaagttattttgcaatttgcaaaccattcaacacattataactttcagaaactataaggtaatacagagttggagaggttcatgttcgtaaaatgaggtttagttcataataagacatatgcaacttgtaatcctcacaatgcaaaacaaaacagcacctaaataatagaacttgtgggaaaaattgattctaggaagttcactcaaaacatatgcaactttgggagtatattgctagcaaaaataatattggcacctcagaaaataatttggaccactcaaggaagtgactcagaattacataaaaaaataattg

SEQ ID NO: 916536 - DNA, 4001 bp, Homo sapiens
tgagccgatatcgcatcactgcactccagtctgggcaacagagtgagaccctgtctcaaaaaaaaaaaaaaaagaaaaacaaaaagaagttgcaatctagcaaccatgaaagaaaagccaagaggagacaagctaggaccatattgtcgagctgctgcattaaccaacccttcttcttgtaggtgataacaaaggaattggttattatctctatatttacagatgacgaaaccaaggcactgagacaattaagtaacttgtctaaggtcagagtggtagaaccaggattcaaatccaggcagcctggctccagtctttaatctctatacctctccaaagcaagctaactgctacaagaccgctcccaacaagtacaaggacattatgaagtctttctggtaatgcaaaaggtgcttttgatcatttacaggtttcagtaggtgactgcactgtacatatattgctcagtgttgcagtggtacatatatattatgggtttttgtccccataattgcacatccaaaaagactccaaaaaggtattaccaaaaacaggtcgagttaagtccgagacattctgaaaaagcgatccactcctataactcttaaatccaccaggacttaattttgacacacagtaaggggtaaagatggaaaataacttttccccaaagagtaatcacatacaccaagactgtttttgactaatccagaaaaggaagttaatgaatgtactctttgggtcatgcatcccatgcaattttaggataaaacagcaaaataggaaaaacatgtttcttgctcttatgatgcttcctggtgtagtggaacagaaatgacaatgtagcaattccatgtgagatggtcctttgaaagagctaggtacagtgacagctatggactcttacctctaagctgtggtggaagatgtttgatggacagtacctcttgcacaacatactgattcacccctccacttttcaacaactcctctggggataatggcagatggaactcatacatttggggagccattctactcctacaggctcacagggctagaaaccaaacagtgaaaaagtcagggtctatattcaagacctgtcttcgtatctggttctattactttcccatccccaacatatataatggcttttagttttatagcaagctagtaacatcatctggttttgttagttccccacccccaacatatataatggtttttagttttatagcaagctagtaacattatcttacgggatctgagattgaccctggactagaaactaattctagtagtgactttggcacttggtcttgacacttaaacctctgggctttatctgtaaaaacagggttactaaactctgattacttcacaaagttgctctgatgatcaaacaaatcaagcagtacgaaggtgtttaaagaactataaagtggcatattaatgtgcaaagtactattatttccatttttatgtgcaaagctccttaagtatagagagaatggtctgatctcgtctgaggccaaaacagtgccccagcatgggctagtgggcttcctgcaccagaatggtaagagcattaacaatgatgatttatttatcctgtgccaagtctgttaggctgtttgcatgtatcatatctgatctaagtatcctaacctcaatcccatgaggtgcataataatacaaatgagtttacagagcggaaattgaagtaagaaagttaagcgatttgcttaacatcttccgttgcggatctgttaagcgatttgcttaacatcttccgttgcggatctgttaagcgatttgcttaacaacttccgttgcggatctgtcagacttacagtttctcacacatcgcgccccagggatatacttactaggcctattgtattttgcccaagactgggtcacactgccatgtactcgactttcctactcttttacgacctgcaacaccacatcttacctggggatctcacccgcggctctgattccggcagtcaggctgaaatgaaaaggaaaaaacacgcgtgcacaacacgcaccaattagcaaggcagttttcaagtcggcggagaatccggccaatccccggcaggcagaggcaaagggccgcctctgagtctggcaacgcgcgggcaaagccacaaataccgagttcaaatctcaacggctgcaggacggccaatcgcgacgcccgccggagcggccggccaatcacagcgccgcccgggggcgggccaaggctccggctccggcccccgctcccacccccggcccgcctgcgaatccctccttggccgcaaggtccccctttgcccagtcggcggggaggaggccgtatttctgctggccagagacgtcgcgtccctggctgggcattcagtcacccccaggaaaggaggcaagtccacgctgggagttagaaggcatcgcctctaatccaggtttcgccatctcctctgctaagtgacgtccagcaagtcacttcactttcaggacctcaaatctcctccccagtagtaaaataggggtaataaaaacagctacagcggaagactgttgtgaggcacagagaaagggcttggtcattggaagcgggttccaggttctcaaccttcatttccttcacggttgaaggacgccaaagaaagcggaaagggtgaattttcttgaaatctcagttttggggaatcttagcgacgagtcgcggacctcagcttgtccggcgctccaaaacttccggcaggcggaccggaagcactgaggcgggaagggtggtagaggcccctcctgccggaacccggggggcggggctcgtggctgttgcggatggggcgtaggtgggcggtgcgcccacagctgcctgggtaaggcccaagatggctgtcttcgccttagtactcgtgtgaagttggcggggacggttcctgtcatcttcttgggcttatttggtgtgctgttgaaggggggagactagagaaatggcagggaacctcttatccggggcaggtaggcgcctgtgggactgggtgcctctggcgtgcagaagcttctctcttggtaagtggctgatgtaggcaccccgataactgcttcgtagtataataggcggctcagattaattccctcccttccccatccccaggtgtgcctagattgatcggtataaggctcactctcccgccccccaaagtggttgatcgttggaacgagaaaagggccatgttcggagtgtatgacaacatcgggatcctgggtaagacttgaccttcgacgtggtacacaatttcagaatggcaattaggctgtaacgactatcttttcctcctgtgtagagagtggtactgtgctcaatagtaagagcaaacacttatgtagctgtttacattgtgtttggcactgttctgagtcccctcgtataatttttacttcataagtaaaaataaacagtttttccaaagttaataaatggcagcatcagaattttaaccccaagcagtctggctccagagtctgtgctattgttctgtactgtaatgttccttgtctataggtgctgctcagcaagatgcaaccgtgggttgaaagcttagctggtgtaggatgagttctcttgtcttggatctaatgtgttctctcacattacacaggaaactttgaaaagcaccccaaagaactgatcagggggcccatatggcttcgaggttggaaagggaatgaattgcaacgttgtatccgaaagaggaaaatggttggaagtagaatgttcgctgatgacctgcacaaccttaataaacgcatccgctatctctacaaacactttaaccgacatgggaagtttcgatagaagagaaagctgagaacttcggaaaaggctcatctgtcaccctggagaagggaaactgtacttttccctgtgaggaaacggctttgtattttctctgtaataaaatggggcttctttggaatttgatagccacatactt

SEQ ID NO: 916537 - DNA, 4001 bp, Homo sapiens
atttgctttcatttaacaatacaacttagatatccttccatattagtacatctctctcattttttcaagaacttgttttaagcaaatacatgaacatctaaagaaagaatagcctctgaaagaccttgcctacattggaaacggctcaagagagctcacccgaaattccatgacatccacaaatgactggtagtagttggtgaggaatctaattatctcggctttttcacgatgtactggtcctaaatgttgctgagagaaacacaaaacaaaacaataaaaaagtgcaaaataagacaattgatccaaataactcaagaagaacagtggttatacctaaaacattcttaaagagggttgaggccgggcgcagtggctcacacctgtaatcccagcactttgggaggccgaggcaggcggatcacctgaggtcaggggttcaagaccagcctggccaacctggtgaaaccccgtctctattaaaaatacaaaaattagctgggcgtggtggcgggcgcctgtaatgccagctactcgagaggctgagtcagaagaatcacttgaacctgggaagcagaggttgcagtgagccaagattgtgctactgcactccagcctgggtgacagagcaagactccatctcaaaaaaaaaaaaaaagaaaagaaaagaaaaagaaagagagttgaaatatactgacagaggaagttagaaacgcttcagtgctctgaaggtctttaaacaaaggagattgtctatctaggtagaatggttgcatgtgatcctgactagatacagagggctaaatgagaggaaattttaagcaccctttcagatgaacagatatactatttatatcaaagtcaaaagaaacagaattcaaagatgctacaaagatgggtgaaaaatctagggttaacatttaataagggaaaagtagagatatcccattagatgcagaaatctaagacaaacagcaaggaaacagtgagtgggaaacagaaacaataaaatacatgtaccctgctgggttgatagagctgtcttgtacaaaaacaatgttttcccatgaatcttgcaatggaaaaggggtgatgattcgctccagcttatgctggaagaatcccatcttatctcaaaatgctcaagacttaaagctctacaacaacctgaagccctgtggttgagccttggaaaactattaataaaaaaagactactccatcccctgccaagtttgaagagaggcatcaaaagaggagaatttcagccattcaagcagagaattattcagagaaaggagagaaggaccaagttctcaccgtgctgtttcggacatctatgttgggaaatttcttgttgatatacttgagagatggttccatggacttttccagtaagaaaggtggcttagatttggggtctgaacaagtctgcagagagaaaccatatatatttcaaccctttctcctcctcctcagaaacatacctcttcttgcaacattcattctcataatctgtcttaggaaaaggcaacctgggaactaatttaaaaagcatgagaggctgggcgcagcggctcacacctgtaatcccagcacttcgggaggccgaggcaggcagatcacaaggtcagaagttcgagaccagcctggccaacatggtgaaaccccgtctctactaaaaatacaaaaattagctgggcatggtggtgcacaactgtagtcccaggtacttgggaggctgaggcaggagaatcgcttgaacccgggaggcggaggttgcagtgagccaagatcgtgccactgcactccagcctgggcgacagagcgagactccgaaaataaataaataaataaataaataaataaatataaaaataaaaagcataagagtaggtcaagaaaaaattccaagacattaagccaagtatctaagagcgaaataacaacctaggcattttgtcttgatgggtagagtttaatgcctgcttggccccagcacaaagaggaagctgtttccccgcccctcaactgaagccggaaggaacaagaaaagcagctgctcaggagttagactttgtacaagattcagtgtcacaattttgttcactatgtaagtatcttatcccaaagggcatttacaggattcatggtgacagagaaaccgtgttcctggtgatttgttttattacaaaaaacacaaaagctccctcccccaaagtcccctattttctatgccaggaactccccataaacacccctgtctttatctctttacttcctatggtttgcccagcccctagcccacctcttgtcactagcttctttcaattcctcagttcctattctaaacacacacacacacacacacacacacacacacacaaccaccacagcatgaactaccccaggagcagctcagaagacacctaccctttttaatctaaatacctaattatctattttttttccttttagggaagcacttccacagaaaagtttttgccagagacccagcttcagatctcttcagagtgtagaggatcaacaataaataataaaacccagaaggttggaccccagacctttatccaagtcacttggaataccactgttgtttccccatccccaccctcacccccatccccagaggaaagcagatgccatcgttggggcaagaatcatatctagaaaggggaagccttgaaaagaagcctccacttctgccttcctgaactggctggcctgtataatctgagtgattatgtagattatagtcagtggaaaagcagtggaaaaaaaggtgggagtctaactgctgcacctgccgcctcagggttccctgccctattattgttggaataatcagtactagtcccattgttcatgcttaccttcttgatgttatacatacggatgagaaccccctgaccgcgatcattcaggatagtgagcttctctgctaatttatgctggtaagcagatgtcaaagacatgatggccactgagagaggagcaccagacagcaatgtctgatctccccaaacactttcagcttagatggtgacaccctctggcggagggacccagcctggttggtgcactggtcttctgttgcctctgcaattggctcatgggtgaaatcagtcattatggctcacaggccctcagagccttcttgtgcttcctcttgcacactcagcaggggagacttcctctttctggctgtgcagcacttttggtaaggctatgaagtgggtggagctgaggagaaggacaggctttcaaggctcttcacagactgcaccaacctttttggtcttatgcccccataagtgtcctagacaaagctgggcgtggtggctcacacctgtaatcccagcactttgggaggaaaaggtgggaagatccattgagctcaggagttccagaccagcctgggcaacatagcaagaccccatctctataaaaaataaaaattaaaagctgtaagctagataaacaagtatctaccaccccacccctgtacacctctatattttccttcttttatatccaagaatgcctatgaacctttggcctcatcatgttttagtacccagatcaaatcccatcttctcctaaagaccccatcaatgtcaaatattatattgtattatattttatattgtcaaatacatatattccttgttatatgtttatagtgtacgttgtatctcccccaactacagcataagctccttaatgacaggaattgtacctaatacttttttttctttttttttttttttttgaaacagagttccactcttgttgcccaggctggagtgcaatggcatgatctctgctcactacaacctccacctcctgggctcaagcaattctccagcctcagcctctggagtagctgtggttacaggtgcccaccaccacgccttgctaatttttgtatttttagtagacatggggtttcaccgtgttggccaggctgctctcgaactc

SEQ ID NO: 916538 - DNA, 4001 bp, Homo sapiens
ttgcaatggaaaaggggtgatgattcgctccagcttatgctggaagaatcccatcttatctcaaaatgctcaagacttaaagctctacaacaacctgaagccctgtggttgagccttggaaaactattaataaaaaaagactactccatcccctgccaagtttgaagagaggcatcaaaagaggagaatttcagccattcaagcagagaattattcagagaaaggagagaaggaccaagttctcaccgtgctgtttcggacatctatgttgggaaatttcttgttgatatacttgagagatggttccatggacttttccagtaagaaaggtggcttagatttggggtctgaacaagtctgcagagagaaaccatatatatttcaaccctttctcctcctcctcagaaacatacctcttcttgcaacattcattctcataatctgtcttaggaaaaggcaacctgggaactaatttaaaaagcatgagaggctgggcgcagcggctcacacctgtaatcccagcacttcgggaggccgaggcaggcagatcacaaggtcagaagttcgagaccagcctggccaacatggtgaaaccccgtctctactaaaaatacaaaaattagctgggcatggtggtgcacaactgtagtcccaggtacttgggaggctgaggcaggagaatcgcttgaacccgggaggcggaggttgcagtgagccaagatcgtgccactgcactccagcctgggcgacagagcgagactccgaaaataaataaataaataaataaataaataaatataaaaataaaaagcataagagtaggtcaagaaaaaattccaagacattaagccaagtatctaagagcgaaataacaacctaggcattttgtcttgatgggtagagtttaatgcctgcttggccccagcacaaagaggaagctgtttccccgcccctcaactgaagccggaaggaacaagaaaagcagctgctcaggagttagactttgtacaagattcagtgtcacaattttgttcactatgtaagtatcttatcccaaagggcatttacaggattcatggtgacagagaaaccgtgttcctggtgatttgttttattacaaaaaacacaaaagctccctcccccaaagtcccctattttctatgccaggaactccccataaacacccctgtctttatctctttacttcctatggtttgcccagcccctagcccacctcttgtcactagcttctttcaattcctcagttcctattctaaacacacacacacacacacacacacacacacacacaaccaccacagcatgaactaccccaggagcagctcagaagacacctaccctttttaatctaaatacctaattatctattttttttccttttagggaagcacttccacagaaaagtttttgccagagacccagcttcagatctcttcagagtgtagaggatcaacaataaataataaaacccagaaggttggaccccagacctttatccaagtcacttggaataccactgttgtttccccatccccaccctcacccccatccccagaggaaagcagatgccatcgttggggcaagaatcatatctagaaaggggaagccttgaaaagaagcctccacttctgccttcctgaactggctggcctgtataatctgagtgattatgtagattatagtcagtggaaaagcagtggaaaaaaaggtgggagtctaactgctgcacctgccgcctcagggttccctgccctattattgttggaataatcagtactagtcccattgttcatgcttaccttcttgatgttatacatacggatgagaaccccctgaccgcgatcattcaggatagtgagcttctctgctaatttatgctggtaagcagatgtcaaagacatgatggccactgagagaggagcaccagacagcaatgtctgatctccccaaacactttcagcttagatggtgacaccctctggcggagggacccagcctggttggtgcactggtcttctgttgcctctgcaattggctcatgggtgaaatcagtcattatggctcacaggccctcagagccttcttgtgcttcctcttgcacactcagcaggggagacttcctctttctggctgtgcagcacttttggtaaggctatgaagtgggtggagctgaggagaaggacaggctttcaaggctcttcacagactgcaccaacctttttggtcttatgcccccataagtgtcctagacaaagctgggcgtggtggctcacacctgtaatcccagcactttgggaggaaaaggtgggaagatccattgagctcaggagttccagaccagcctgggcaacatagcaagaccccatctctataaaaaataaaaattaaaagctgtaagctagataaacaagtatctaccaccccacccctgtacacctctatattttccttcttttatatccaagaatgcctatgaacctttggcctcatcatgttttagtacccagatcaaatcccatcttctcctaaagaccccatcaatgtcaaatattatattgtattatattttatattgtcaaatacatatattccttgttatatgtttatagtgtacgttgtatctcccccaactacagcataagctccttaatgacaggaattgtacctaatacttttttttctttttttttttttttttgaaacagagttccactcttgttgcccaggctggagtgcaatggcatgatctctgctcactacaacctccacctcctgggctcaagcaattctccagcctcagcctctggagtagctgtggttacaggtgcccaccaccacgccttgctaatttttgtatttttagtagacatggggtttcaccgtgttggccaggctgctctcgaactcctgacctcaggtgatttacccgccacagcctcccaaagtactggaattacaggcatgagccaccacacccggcctctaatacttttttatatttctcacaatgctctactacagtgcattgtacttctacagtacataataattctcaaagtagttctcaagaagtacatagtaattctcaaaatgtgatccagcagcatcagcatcacctggaaacttgttagagatgcaaattcttaggacccgccccagaccactgaatccaaaattctggggtgggtccaggcactctgtgttttaacaaaccctccaggtgattccaatgcacactcaagtttgagaaccagtgctctagtaccatggtatttatggatgcttgagaaacagatcaatccctgtcctctgagattagcattggtaggtaggcgagtctgttgtggggcctagaagtctgtacttatataagcactgttgtaggaggttttggtacaaatattccattctgaaaaacactgatctagaacaatacctcttggacacagtagtcactcaataaatatgctggtttatttgttgaattattaagactaaattaggaaataggccccatgaagaagaaccaaattaatcaagattaaaaagaggaaattagtaatcacccttaaatcttagagacttgaatgaattttagcattaaaatattcttgccattccaatgaggccttaactccgtaactcaagaaaattttcaactctatttcaactttctttcaagacacaaagcaaaaggtcctaggaaaaattataaatcaaaaagagttctcttcatttccaccaccttgccaattccttttctcaggtttttaatcattcccattttccgtatccagagttcccattgtcccaataaattctagggagtgggagaagagagacaaggctgatcagcattattacttaagaagttggggccaggtgaagtggctcatgcttataatcccagcactttgggaggcaaaggtagaaggattgcttgaagccaggagttcaagaccagcctaggcaacattgtg

SEQ ID NO: 916539 - DNA, 4001 bp, Homo sapiens
aggggtgtgtgggacaaggtctactctcaggcttagaataagggaatctgttctctctacccagggttctaatcctaactaattgcaatttaaagcacacccaacactttagctccctctaaatggaaccattctgccagaggacctttctcccctatagattcacccatcagtggaaccattcaatgtcaaaaagtggaagggaatattagagctatctagtccaactactgacatttaaagatggggaaactgagccccagagagcaaactgtcttggccaaggtcatacagcaagctaggaaaagtagggaccagagcttctgactctgtctttattgatacccgcttgctccccaaacacttaggtcttcaccggcctatcatgaagatccttcttccctgccaaccacagcacctgcccctccaggtcctcactctcttcgtgagggccagagctggagaaagatgctggagggacaaagccacctcatgcacagaccatagactttgaaaacaagcttgaacatgggaatatctccccggaaaggaatacacacggtttctttgggataggaaacccactaatcccaggttgtttttaggaagatggggggaccaatttgagaagtgaattttcctatcacacaaggagtctcagagagccagatggcgtaatgtctgcaagggagggtctgcaacaaggcaaatgggctatgttcattttccccgaaagtactgaccacaaaacggtaaggcattgacactctttctactgctccccaggccacccctgcccgggccacttcctctggctgaccattgtgcttaagaaggaggacccatgacagacgcggagaagtgggagggagggattgcctctacagccagagaactccttagcccaagacccccagctcctcagcaaggcaggcctttaagaagtagcagctggacagactaagtggactcagctgatccagccctgggatgcctggaaaaccaggcctgtgggaggtgagggccctctgtgcccttggggccgtgccaggactggagataacgcgggaccttgggcccaggacagggagaggggagctaggatccgggcagccgctttcttagttgggctaagccagggaagcgtcgggcacagatgaattctctgcattcttctggcaccgcagccagcacccagagggccttttctgcagacgctgccctgtccctgctccctgcccaaccaacccttctccctcccttagcttctcttcagcgtgcagcccaccaggtccttcctccttcccgcagcccctcaaagcctttgaaggggctgttctctaggagacccggtctttccgcctctccccgccttccccaggccctaccgccccaggccacggggaatgggaaggagtgcgaaagggagccccaggctcgtctccgcgcctgcgctttggggagagagcccctccccccgcaataacccggcaccgctaagcggcacccggacggtgggatgcgggttgggtggggtgagcagctggggcaaggtcagtgctttcaaagagggaggggagcccggcccccggaacatcccccactcccgaaagtttcccttccggggccacggagtgtgcgcgaggatggcgcggggggcgggagggggtggggtgggggtgcacagagtcgcagccggacccccgaggagggtgcggctggagggagggacggaggggcgggcagcagggtttgggcaggaagccgcgacgccctctccgactctgtactgccacgagagccttaccctccacaccccactccccccggcccggagctacagatcgcccccccgcactcgccgccctttcaatcccaagtagacccagaactcaccgaaatcaggtgttgagctgggccagggcaggccggatccgccaggtccatggccgcggcttgggggcggggggcagagaaaggggggtgccggagccgcctcctgatgtcaaggctttaaaggggccggggagccccgcccctggccctgaccccgcctccctcctccctagcagccaatccacgttcagcctggatgcgcgcccctcccagccccctccagatgttcccaggacgcgagctaagtctgcccggccggcgcgcgccgcttccgctttggtgggaaggacctcccttcccccttatagaaacactttctccaggccgggccgggcttggtaaacctcagccgtgcctgggtagaggacgccgggctgggccgagcgggggtggaatgagggcgtctagaacagagaaaactaagtaggtgcgcgcgggcccacaggcatgcgcgtttgcttctgtggggctgggcgtgcacgtgtatgtgtggttgtgagcgtcggtgtttgtaatttgcttttctgcatacgtgttgggtgtaaatccatgggggaaaggcttgagtgcctctttggccttaaatgctcccgcctctctcttccttctccaggatggggtcgtccccccagtaatctggaaaacagttacagcaacaggctcctctcatcagacggcagtgctggtcgtttcctcactggtttgcggggaaggctgggcagaaaaaggatgcaaccttgttctcaaccacttgctatctcggtgaggatgaggaaaagcaaacagcccatccaggcccctgcagagcctcagagcttcaatatcattcccattagtccttaattaaacacctatttgcccttgcctaaataccgtataaccctcacagcctgcattgtagtgactgccccagaaatgtaggttctcacctgggttctgcagggaaatacgaaggaatccctaggtacagtctccgcctacttcattaaaatttcttttgttgcgagtatacaaaggatgcagcttagagtatcatattagtccaataaaggaacataaaaagtaaggcaagttagggtgctcagattggctaggattaagagttcttttctgaaggaggtttatttaaatacggaatttgaagggcagagagagcttgagtagggtccaggcagggtaaaggccacaaggagattcagataggaaagagcaaattatctgcgtgggaccgtgagcagatcaccgtggtacgttgggaagtgggagaaattaatggaggaggtttcttatggaggagagcagaataaggatatggatgtgacaagacataagataaagaagtcattttgggttcttgagcatagaggtagtttgatgaaaagagtgcccaaggacagctattactggaacctaaaagatgtcttgatgggtacccccaccagctttctcatttttttgcttaaaaaatattttattcttttcttttctctgagatggagtctcactctgtcccaggttggacggagtgcagtggcacaatctctgctcactgcaacctccacctcctgatttcaggtgattctcctgcctcagcctcccaagtagctggtattataagagtgcaccaccacacctggctaatttttgtatttttagtagagacggaggcttcaccatgttggccaggctggtctcgaactcctgacctcaggtgatttgcccacctcggcctcccaaagtgctaggattatagatgtgagccaccatgcccggcccttaaattattcttaacgtgcaataaaatgcacacatcttaggtgctttgtttggtgaatttcaaaatatacacctatgtaattaacacccaaaacaagatactgaaccaccaccctataaagttccctcatgcccctttatagttgatcaccccacacccaccaccaccctcccctggcaacttcctgaattatagcaccatagatttgtctgcatttgtatttcacatatatggagctttacagtatgtacttgtgtctgtatcctttagcttagtaatgtttttgagatccatccatgtgtatcagtaatctgttcttttttattgc

SEQ ID NO: 916540 - DNA, 4001 bp, Homo sapiens
tgggcgggggcacctgcccttctccatcctctccggacaagcagaggggagtgggaaaaggccccctccctcccccagatccccccactgtccacccccagccaaaggtaaggtggccccttttcacagggcttccagaccacgttggattaaaggcccaatcttagaacccaggaataataataccgacacagtagtcatagtaacacatacaagtaccaagggattcttatggccggacggtcagctctcacaaccactctgtgaactcagtaccattttgaccctcattttgcagatgggaaacctgacaggcacagagaagttaagcatctgtccagggtcacactgccaggaaagtggcaaaggtcagagtcaaaccccaggagctgaggtgcagagtgggccatcccacctcactgctgcttgccatttctcggcccctcctcagcacccccaaagaggccacccacgaggtacacagcctgccccgggtcgccctcccggcgcagtctggcccggagagccccttatatcaaagctgccgcaaggacccagatctggctgaaaaggggcaaagtcaaggccaccggtaacacatcccaacgcgcccagaactcccccaccccgcccacagggtcctccccttatcccctcctcccctcttccctccctcacacatccttcctccaaatctgcaaaaagggaaaaataataataatcacaataaaaccagttctcaccaacgggggagaggaggagggggaggaagggaggaggctgagccgacagaacagatccgcccccgctgcctgcaccagaccctcggagagccggagcgcgcgacaggcggcgggaggacactcgcttccaaaaaaataaacctacaatgtaaaaataacgccgggcgccccacgctaattgggcccgggcgacagcagctcccaggtacagcctgtctctccctcccgcccgccgtgccctcccgccctcggcttgctcctcctgcaagtgtctggggcggggagggcgtaccccacgggtgccctcactccccgcaggcctctgaggaagctgccctctagacaagggtctgggtcttcccagtcgtgcccaagtgggatcagctctgaattccaacttcgcaaagtagtggcatcccaagtatccgcacagcccgggggagggactaggaggcggcccaatgaggcgtcaccagccacgggaggcaggcccagacaccaggaacaccggcccgcgggggagggggaccaggggcgactctcccgagggaccccgcccagcgccccgtggccccacgcctaggagggacaaggctggctctccccctcggctggtgagagaccctcatgcgcccctccacaacagccaggccagggagctaggggtaccatctccaagggctttcaaacccgcgctgcccgatggaaaataaggcgcagtgtcgccccgccaggtccggggctacaccgggtacaagggacgcctggcggccaagtccccagagccggcgcacactgtggggggccgctctgtgcatttccagcgcgccccccgcccaccccaacgccacttccctccttcccgccccctcgctagggagctggagttcccctaagttccccggcgcccccgagcacgcgggccgcagtgtcggcggggcgccttgctccccagcaggccaccccccgagagcgccaactcgggagtgcaggggccccgccaactccgccgcgtgcgccgcccgatcctccccggatcccccggaagcgcgctccgcgcctccccccgcccttcgcggggaccctcggccccaactcacctcgcggaggtggcagcggtggcgcccgggcttggggcgcgctcgggccgccggggcgctcaggcaagtggcggtgccgatcgggctgggggcgcgcagcaggcccggcctcgggtcgggacgcgatcctcccgccgccgcctcctagggcgccggccctgggtccccggcccgcaagttggcgcgcatcgcggagcgcagggcgcgggcgcagggctcgggcggggcgccggcggacgcggggctccggtgcggcccggcctgcccgcggctccgcgctccccggcggccgcggcggcggtggcggcggcggcggcggcggcggcggcgggagggggaggagggggcggggcgcgagcccgggaggcggtggctcggcctccctgctcccggctccccgcccgcagcgacgcgccccggcccggccccctctggctccttaaagggcccgcgccttctctccaggccctgcgcgtccccactcgcgcgcgcacgccgccacacacacagacacgcacgcacacacttgggcgcgacgccgagtttctttttggcagctccccgaggaggaaggaggggggaagcgcctcccagccttcccctccctcttctcctgcgggcccgggggccctcctcctcctctccagccccagtacctcactggaatcgcgtttcagctattaaattataactctggagtggccgctggatggggagggggcgcgcagggagggccctacacagggccttttaggagcacgcccagtggggcacttggggacgggagcagacagtagcgcagagccctctccaggcaggaacacgctgggcctccccagacccgagacccagcccgggcgaacacactgcagactcaccacccaccacggaccggagatgtcagatctcacacagacaaatactgggacacccacgcgagttcacagcaccccggaggacacagacgctagaatgccagtttcctgagggcagagatttctattttgttcactgccctatcgcagtagggactcacgaatgtgttgagtgaagtcccacttggggacattcagggacacaaatgcggagacaatgcaacgagcctgtgtcccccccgccccccccacacacacacacagacacacacatcccaaagcgtgaccctgggagccacacacgcccggcctgcacaagcacgcagtcacagacggcacacatgtgctcgctcccccacgcacaggcagacactctccgctccagcaggaacctggcccccctggccgccctgacaacccagtgtcctcatttaccccctcctcccaccccctccaggtttgccctctccaaccagggcagatctctttgaacagcagagggcactgggagccctgggcctggagcctccctccctccctcctcttctgctttctcctaagatgttggagagtttgaattttttttttttttttcagttcaactttccttttttggagtgacgtctcagcagattcagttctgccatctggcaacatctgagaacccccagggagagcggggaatggctgcggtggggaggcagccgcgtggtttccagaggccggcgggcctcccgcctccgccaggatgctgggtttgccgggctcccctgcagccaggtccttctctgccccctcgggcttttaattatgagcttttggggggctggcgggagcctctggggctgacaatgtctggcaaaagggaagtgggtgtggaggggagcagtttgcagactgaaacaggaggggtcataggtcagtgccccccccccacctccttgttttggcccgaccagctccagttctgcccagccagtcggtccgaatccacaggcaaaaagctggagccgcagaaggaaggcctgatcccccacctcccccaccaagggtcttggagagggaagcgggggcgggggagctcctctgccagccccaggccgcctggcagccctcctctgtcacctgaaaaccctctgggaatttgcatttccatgagattcagctctatttgaagctggaggagggacatttggggtgtcttcaggggtctcccagcttctgccctcgagggctccctgcaggcttaggagcggggaaagcagggggtctgtcagctttgt

SEQ ID NO: 916541 - DNA, 4001 bp, Homo sapiens
ttcttttttgagataagagtctcgctctgttgccagactggagtagagtggcgggatctgggctcactgcaacttccgactccctggttcaagcgattctcctgcttcagcctctcaggtagctgggattacaggcacacgccaccacatccagctaatttttgtatttttagtagcgactgggtttcaccacgttgggcaggatgctctcgatctcctgacctcgtgatccgcccgcctccgcctcccaaagtgctgggattacaggcgtgagccaccgcgcccagccgaattaattgttaaaagtggaagtgctgagacaaaggatatgtgcaatgtaaatttttacaaatgttaccaaattatccctccaaaaagactgcattaacctacatatttatatggttttgcccacattgggatttatcagcttgaaaaatactcaaggctggacgcagtggctcacgcctgtaatcccagcactttggggggccaaggcgggtggatcacgaggtcaggagttcaagaccagcctggccaatatggtgaaaccccatctctactaaaaaatacaaaaattagccggccatggtggcgcccgcctgtggtcccaactactcaggcaggctgaggcaggagaatcgctggaacccaggaggtggaggttgcagtgagccgagatcgcgctactgcactccagcctggccgacagagactccatctcaaaaaaaaaaaaaaaaaaaaaaaaaaagaacaaaaacacttcaaaatttgataggtgaaaaatatataacactgtttttaaagttgcatttctgttgttacaagtgagaatgagcatttttccataccttcattggctgtttacttttcttttttctgtaaattatcttttttcattttctattgagtttttcatccttttccaggtgttttgtaaaagctcattgcataatatggaaaatagactcaaatcaaatcccaatcccaatccaattattcatactaaaaaatactgcactcaccaaaaaattgcttgttgtcttcatagtatttgtttccatatttgtcttcccccactaatgtaccaaccttcgcatcatttgtcctgtgaatacccaaaagaaaacagacattttagaatgattcttagttcaaaacataaacggaaataaagtgagagtaacaactttcagacacaagggctgctgcatcaactagcaaaatgaagaagtgctggggatgggaaaagatgaattgacaactgatgtgctcaaattacactaaaaatataaatgtagtctcttcagattacaggactacttgtatctactatccctcagccaggaggcactggaattagcaaaacctttaggaaatcaaaaagccaaagtatttcatcttcttacaatgatacgaaggtctccaggctctttcattccactctgggtctccatttaggtttctgcgaaactatgctgctcgtgggatcagtgaatgtcaggaagagaagggaccatcattattaccttcaacgccttacagacaaggaactgtacggcagtgcagggaaaaaaactttaccagggtcactgagttaatgtcttgtaatcctcattactctccagggcgtgggaaaagaggggagcccagatgcccttgcctccgagtcacagctctgactctacagatagcttcggtcttgtatcggggatatatgggacagagaccagcctgggggtggcaaggcagagattggggcggttgtccttgacaagagctgtggattctccaaggtgacccgagcctgggaccccttccaagaaatcagccagcgaaagtccagccccagaggccaagagcatggctctggccgcctacctgaaaaaaacccgtagatagcctcggagaccgccgtggccggtgatctgctgcagcccgcgtttcaggacctgcactaactccatcttgcctcgctggccccgcctcccgggtgcgccgagcaaaacccaccggatggaagctgccactcagccgcaggaagcccacgcccagaaggttctcacgcgaacgccagacgtggtggctctgcgcgtgcgcagagctaggtcttgcctacgcggtcatgttctggcttcccaagtaggcagaattggtttcccctggaagcaaaggtaccttaaaatttagttttcagaggttaaatctagaaggcgggcatatgctggaaagctcacctacacgaggctttctcacacggggattccccctttgggaatttcagtttcctcatctaaaaataattggctctggtgggcgcggtggctcactgttgtaatcccagcactttgggaggccgggtagggaggatcgtttgagcccaggagttcgagaccagcctcgccaacacagcgagaattctgtctctacaaaaaaaaaaaaaaaattaaaaattagctggatgtggtggcgcgtgcccgtagtcccagctactcggtaggctgaggcttagatgggagcatcgcttgagcctaaaaaatttcaatattacttcatttgttaaccacaattcttctacaaagagaaacctcccttcaactatttggctcctgagatacaattaatgtaggaaaggcagtatgggtgcttgattctcttactttttttttgttttttaattttagagacaggctctctgtcacccaggctgaaatacagtggtgtgatcatagctcactgcagcctcaaactcctgtgctcaagcagtcctcccatttaagtaagtgccaccacccctggctaatttttttttttttagagatgggcatcttgttatgttgcccaggttggttttgaactctggcctcaagtgatcctcctgcctcagcctctcaaaatgctgggattacaggtgtaagccaccacacccagccgattctttcccttatgtgtgttttcaaaataacaatttagttccctagctttttttttttttttttggtagtggtggttaaaaacacaaaatataaaatttaccattttaaccatttttaagtgtacagtagtgttaaccacatgcacattgttgcgcaacagatctctagaacttattcttcttgcaaaacagaaactttatatccatggaacaactttttcctctttctccatcccctgccaaccaccattctacttctgtttctaagagtttaactactttagatacttcatataagtagaatcatgaggtgtttgtcttttaggacctggcttatttcacttagcatgatatccacaaggctcatccatagtgtagtatatgacaggattttcttctttttataaatgttgaataatattccactgtatgtatatgccacccagttacctgtccataaacatttctgctgattccgcctcttggctattgtgaataatgctgcagtgaacacgggtgtgcagatatctctaagatcctgttttcagttcttttggatatatacccagaagtggattgctagatcatatggaaattttattttttatttttataggaatccccatactgttttccatggcagcatcaccattttacattactaacaacaatgcacaaaggttccaatttctccacctcctcaccaacactacatattttctgtgtttgtttgtatgtttgtttgtttgttctgagacggagtctaactctgttgcccaggctggcgtgcagcggtgcgatctcggctcactgcaacctccccttcccaagttcaagcgattctcctgcctcagcttcccgagtagctgggattacaggcgcccaccaccacccccggctaatttttgtatttttagtagagacgaggtttcaccatgttggccaagctggtcttgaactcctgacctcaggtgatccacccgccttggcctcccaaagtgctgggattacaggcgtgaaccaccacgcccaacctgtgttcatttgttttttacagtgggcatcc

SEQ ID NO: 916542 - DNA, 4001 bp, Homo sapiens
tgccctttgttctgagttccggtgaccccggccaggtcccaaattctccgtcgcgctccttttccagagccgccgctgtccctccggccttgggcctccgccccgctcaccgagatgcaacgttacattattgcctccgctccgcctctccgccactctctgacccttctcctgcttctggtccctgtctctgtgaatttatttctaagcccccttccatctttggttcccgtctctggctcgtggcccatggggccgatctggaatacaggactccttgggttccggatcccatctctcctcgctccccacactttcccaccacgaggactcaggccacgctggcccagcggggtgagggaccgcaggagtcattagccgcagattaggcacggcccgggatcccgctgggactggactccaagcgctaacccgcaccaggatcccaatccgcgcgctggctgcacagagggtcaaaggcagcgggactcagcggatcgagcgtgttgcaggggccgtgggctcgggcgccccctggaggccgagcggcccccaagctcggggaagaggccttgggcaccccctgtcgggcagtgtcgaccctgcactcccggcgttcgggccgctaagttggtgcctggagtgtccgtccacgcccagcccgtcactccgccactcccgcctccaagacagtgggtcctgcagcctccactcttctggtgtgagatgggaccggagggcggagaggggacgcggaagctcctatctctccagccacaatcggcacccagggttcaggcgggttcctcttctggggttgggcatcctcagatgcctgggggccggggaggcgggggcttcatctctgcttctgggctgcagattcgagattgccctaagccctctgacccggcctgtcctagcctctggctgcccttctttctgcctcttgttctttctgccttctgtctgcttcctgtctctgggtatgtccatctctctcttccctattctggctgtgtctgtctgctctccctcttgctgccttccctacctggctttgtccctctgcatcggtttttctgtgtctctttgtgtctcgctccctccctccacatctctccatctcactgtgtctctctttactaatgcctctctttgtctctgtctttatctctgtctctccccaaccccactccccagctctattcctattctctgggttgctgcctctggggactgaagcagcccaacagggcagcccggagacgcctcggggcactgcccggggtcctcatcctggtcacctccacatgcccgtcaactccgcgcagcgttgatcttcccgctgcggctgtgggacgtggaggggcgcccggaaaggaagacacagggcccagcatctgctcgggagccccggggcccctgacccccctctgccattattaagggcgcctggtcccgaggcaccgagatgatcatgattgcatcagccagacagaagcggagccgggagctgcgcggtgagcgaacgagtgagacaaagccgcccgcgccatctgtttatgcaaagcgctctccgccggggaccccggcgtcccggctcctggccgggcttggggcaagggtcataagcccattcccacccggcgcccccaccgcgccttggcttcccctctcctcagcacccagagggccgctgggcgagcggaacggaaagggggcgggggtgttgatgtgattggagcggacgcggctgtttcttcaataatggatggagatgatgcggatggcgaagccgagctggccgggagaggagagaggaatagaaatggggaaaggaaggagtgggggcgggagactcaccccggcgcgcgcacacacacactcgcgcgcgcacgtgcgtcacactgtcattcggatacacgccgccgcgcggctcacacccaggcacacgcctacgcactgtcactgagacacacatacctgcaggcggagacgcgatggcaacacacactccccgctggctcttcctgattttcacacatacacagacctgcaggcggagacgcacggaaacgcccccacgcggaggcacacccgggcaaaatcacccagatgggagctggggacggggaagtggacaaacccgacagatatagacacactcaggggcacagacacacacccgggcacagagtcggacacacctggggctcaggtagacacacctcacatacccagggaacaaacggacacacactaaccacacgccggagatacagacgtccataattgccaggggcacggagagcccacccacacccactcagaggctagcacaccttagcatatgcaggagttgccatctgtgccctgcggggtggaatgtggcagggaggtcgtcagggtctccggagcaggccttgttagcctagcagtatgatgaggtcttggtgacaggaggcgcctggggctgtggactaggaggcccgtgcaccagggcttagctgtctgcaagcttccttgactggcccctagggcgggtagcgccgacgttgggctgcccctgagcagcagaccgggcggaccccactgacccaaatcgggcagtttcgtggagggagagcctaaagggaacactggagctgcaccgagagattctcaggatccccaacactgctgctggtggggtttatagaaagggtcactctgtactctgccttttccccccgtgctgcccagtcttccaacttcaaggggcacgtgtgtgtgtgtgtgcgcgcgcgcgcgcgctgagtagagtgggcagtggaggaggttggggtgccggttgtcttgtaccccagtaccggcccttcctcggatctgttttcaattcagtctgctccttggcccagacttatgacctttgcagcatgcggcagtatcatccatcacccaggcgccgtttagggggatggagggcgctgggagctcacatagggtcgctgtcacgcctgccgccctctctggggacctgctctccggcccgcgggccagggcttaagagtcttggtgagtaatgacgggagggtgtgaccgtggggctcgatcgggacactgggtcacatgtccccacccctggtaccctagcacccctccttctagttcagcacagcctgtttccccgcttttcccgccccccttctctcgggccctttgcttaatttcctattaactgctgataaatccaattaaaccgccgctctaattagggacagctgccggctcagtgaggctagggaggggggcgccccccgagtgttgggggagaacagccgctctccctgcttctcggcatccgcacaccagcattgccgcccaatgagccagtaaattggttttgccttagcattggcgggggtctctcgaggatctcggggggctctgattttgagtccctcagaccttgatgaatagagacgacccgagccctcgcggtccctcccctcatacattcctggtaggtggatttcaaggaaggataaggacagaatgcttgatttgcgtgtggttggtgtgtgtgtttgcctgtgatctgttcctattccagctcaatcgcgattaaaggggggggtcttctttaatgactccgcccccaccccctcaggcatccgggaccgtcaagggcaaagggaacagaaaactgaacccggttctgcagagtcttcttgtgtgcttccctacccccatcacacctcagccttctggaaggggggcgcgcccgtcccaggcctcctcttccccagcccagctgagcctctgccctccccccgccagcagcagatggtgcccgggctcccgctgccaaccttgctaggcggtgccaacctcggtcctggcagacaacgggcagacgagaagaggagctcctggctggccaagccgaccctcccccacccggcatcgagctcaagaccccccccacacacgcctgccccactccagcgaccacccca

SEQ ID NO: 916543 - DNA, 4001 bp, Homo sapiens
tataaatcatacattacttagaatagtgtgtggcatacagtttaaactacataagtgttagctattattactatagaaagcaatttttaggagttctaatttatatttccacaacttattaggtcctcttgcacaactccctttggagactaccgatctaaactctgcttggctttcaaaggtctccattgtctgatcccatctaacacattcaacctccttttccactatcccagatattcaggtagtcatttcactgcctcttgaatacctcatgactccattctcacccacttgtctttgccagaggactttccagatcataacagccctaaagagaccagtgggagcactacaattctccactggtcttccaatcatccctcagtacctcaaatgatactaatctttcccttttatgatttcctgtgatacttaatagtcttgccacacttaactatatatagttgtcttacacagttctgtcctatagtgtgtggattatgttacatactagacttgcctctacagaatttactcaaaaacttactttaccagacaataacgcagagtggttaagaacacaagctatggtgtcagtcagaggaaagtaagttaaaagaggaaaattaataaaaatacctagaactggagattgcagatagcaggtactcaataaatagtgattaccattcacaatctacattacgtcatacaattgtaatagtttaacaagaaccagcaaatgtctttgcaaagacattgtgactacaaaaccatccactataagtgatgtgcaccaccaccttcccagtggtatgcaggagttctacccaagatggaaaacaaaaaaaaaaggatcctctaaacactcctaattcttgcctcaggctgaacatcaagcctatctgtggtgcttttaaaaatttaaggtgcaaggagctaatctcacaaattctgactcaatagctctacactcagtcctcatttctaatttttataaagctttacgagtgattctgacatgagccaattttgaaagcaaatgatattctgtaacgactaaaatacactaagaaaaatacaactttgggggtttgattggaatatgtttgtggaagagtagagggtgaaaggacaatgatgaagtgtaaccgtatttctaatttccttgctttttagtgagtggaaggacaaatgtatgttttcagtttgaggagtgggagcagatccaatcagaacagaagagaaactaaataatgctaacaaattctaacatagccttcattcttcactttcctttccaccaagctcctgattcttctctcctcaaacatcactctctcccccagaccccaacgcactttgccgaacacattctacatccgtagagacgcttttgggtaaaaggatgcttttacaaatattagctcatttaatcttatcagagactccctggtattgtaatattatcatttccattgtgctcatatgaattgagacccattaagggtttgcacaaggtcataaaatcaatctaagaaaacctctcgccactagccttttttccctcccttacacatttctccccccgccccatacaaatatttctcataaccctaaacccttacaaccatatcagaattctgattctctcgatccctaacgtgtcccccgcattctcctcttcgcttacagctgcttaagatcttttgtcccctcccaaggtggtgcacaattgaatatgtgagccggggaagcggaaagcgaaaggagaaaccagactgaggcagctccaaacctagagaaaccagagtgtgcctaggaagttggcgtgaccgctgcagcacggtgccacttccaaaaccttaaatccccgtctcggaatcccgaccaggggccgccgttcccggtaacacttacgtgacattgacaggacccggacaacccgggattgtgcggcagccgccatcttttcccacaatcccccacgacagcactcccggctgactacggctgctaagctgggtcaaaacttacctttctcgcctgtctgcgcaagcgctaaccaagaaacgacggtttcgggtagattgttggttaagaagaaagctgggaaagtgaaggagagggggaagaaaggaagtgaaaagactttggctgttggaatctcagatctggaataggctgtataggctatttataatctctaattgccgaggaacctgaagttcagagttaaccagtgactgactcaggacatgcaaaatggcaagacccgaggtagaagagctcacctttcctgactctcagtttcctgttccctgaaaatgtaagctaagctggcagccctggtgagtccggaggaagaaggaggcgtagccctccgcgctcaggagatccagggcccaggagagagaaaaggggggacaagaacgaggggaaaagtggagaagagaaaccaaaatagggtgtgtcccaagtaaataaatgtgcgtcgagcccgccaagcacattctctcatagggacccttgcgcctgctgttcgcgtttcctggaatgcacactcaggtgtctgcaccagctcaagtctctgctcaaaagtgacctcttcggataaaacttctctgaccatcctatccaaggtggtaattattccaccaatttttggtttaagtttatataccaaagcacttatcaccaactagcatatgaatctaggagttcttaaccagaagtgtgattcatgagtgggcttcgggaaatctgtgaacttcctgaaatattatgcaaatttagtggccatgtgtgccatctgaacatctgtctaaggagaaactgcagatggctctctctagcgcaatggcttgtaattttttctttaactgtggtcacctttgagaatctgcattgttctacaaagagccatctagaaactgaggaaattccaggttagactaagcgcttggattttaaaatactttattctggtcaacctctccagattgctgggtaggagatggcaaccagtgatcctgtgaaacataccttaggcttatcagaaaaccacctagtttggggagggcgggttctttctagacttggtaatccttccagtgctttgttttttcaggaaaagtatgtgtttctgggatagacaaaaaggcctgtgatgagtagggatgtagaagttgcttattactaggcttgaaatcttggctgtttccactctatcttgcccctactgtttactgaagtgtcgcctaacaaattgaattggaagagagaaaaaaaccttgaatttcatcggagaagcttagtagtaacgctacactgtcatatttcttggccttatcctatgttcacttaacacaatttgctaatacttgattttgggaccaatatggatactaacatactttccttgttcggatcaacagatcctgactgtcatcagcaacctgcttactcctgtataacactgccaattatataatttaaaatctctaagttaaacactgcctcatgttctcagttctagtttcaaggttgcatggtgtaattaaaagaacactgacttttttttttttcagagatggggtcttactgtattgcccaggcttgtctcaaattcctgggctcaagacctcctctcaccttggcctccaaaagtgctgggattacaggcatgagtcactgtgcccaactgaaagaacaccgatttttaacacctagaatactagatcccatccccagttttgtcattcgttagctgtgacctggacaagtttctacacttgtctaacagggtaaataaaacctaccctggtacctcaaaaggttattatgagaatcgggtggcgtaatggatgcaaagatgctttgtcacccgtaaagtgctatatgtaggtccatgcagtactattcaaataccactgaagtatcaaaatcatagaatgttagagctggaagagattttaggagctcagcaagccccatta

SEQ ID NO: 916544 - DNA, 4001 bp, Homo sapiens
cacaggtcagcaagcataaaaatattgattcatgatgaataaaacgccagtaaggggcaaaataacagacataaggagagggtaacttttcagccaaggtaatgataaatgccaggaggaaaaatcacaatgatgatgtgggtcagagagaagaataagaacagtatcttggccaggtgcagtggcccacacctgtaatttcaacactttgggaggctgtggcaggagaatcacttaaggccaggagttcgagaccagcctgggaaatatatcaagatcctgtctacacaaaaaaatttaaaaattagccaggcattgtgaggcaatgcctgtagccctagcaacttgggaggctgaggtaggaggatcccttgtgcccaggagtacacagctgccgtgagctgtgattgcaccacttgcactccagcctggatgatagaacgagaccctgcctctctaacaaaaaaaaaaaaaaaaaaaaacgacggctgggcgtggtgtcacgcctgtaatcccagtactatgggaggccaaggtgggcagatcacaaggtcaggagttcaagaccagcctggccaacttggtgaaaccccatctctactcaaaatacaaaaattagccaggtgtggtggtgcatgcgtgtaatcccaactattcaggaagctgaagcaggagaatcgcttgaacccaggaggcggaggttgcagtgagctgagattgagccattgcgctccggcctgggcaacaaagtgagactacatctcaaaaaaaaaaaaaaaaaaaaaaaaaagaacaaacaaatagtatttgtaactgctttattgcatttcctacattctttcacatccattatatgatttaattttactctcccaaaaacccttgttaagcacattataagagcgcaggtatcatcactaacaggtttttttttctattttacagatgagaaaattgaggcttggaaagggctcacactcatatggtttaacatgaagcccagtgaactgtctttcaactacataatgtcctatagcatcctcagaacctcacagtcattggattacaaggtaggtagttaggcccaacagagaaaaatgctgcctcaactttggagggaaaaggtgtaggagaggttaagaagggaggtagggaaggaagacagaaaatactatataatcatcaagaaaatacaatgagaagaaacagaatgaacaaccgttgtaaagcttatgatcataacctttgctcactggtaaaactgctgaaggaaaaaccgaatggtggatgatgacagttggtgacgaaattgacaacagtacaaaaaataaatcagataatccagagtggcaagcaacacgattacccataaatgtgcatggggaactggaaaggtgtgtgtgtgtgtgtgtgtgtgtgtgtgtgtgtgtgtgtgtgagagagagagagagagaaaggatgaggatgataagctgaaggacgcagggaagagcgaatgaaaggggactggcaatggagcaagcacgactgaaagtgcatgatggggagcagatgggtgccccaggggattacgggagaggcagagtggaataacgcagagtggtaatttaataaaaaacaaaacaaaaaaaaaaacggcagaaatatggtgatgacagtccagagtggagatggagcaggtggtcagggagatgacaacccaggtagggaggctagcaaggtgacaatacagaggtagtagtggcagggacggacagcgtgctagctgagaaggaagctgtcatctgcgacagagtacgcgtgtgcggcagcgcctcggggttagtacctgtaaccgcggttggaggcccggggcggaatccggtagacgctgacgtctggcttcacacacagcacagactcgtactccaactcggtcgccatcttgggtccgctgtcggcgctgccgggggcgaaacgtaagaccggaggcggagcacgggaggcggagatgcaaagcgcgacaacttctgttgcgtcacttccgcgcgagttcaagttagtttctgagattaaccttttcggtgacgcggggagccatattgaaacctggaaacgatgaggctgcacggctcaccgtcttggataatggcaaagatggcctgcaagtgcgtgactctcgttatggaaatctctgtcctggagaggtgcttacgaaaagcgccatcttactctaggcaggtgcctggagtgtcctacgaggacgaggaccatattgaatcgtgacggattttcttacaggagtcacttcctaactgtagtctcctggcagaaaagaggcaacctccagccggtagtcccagacgaggtacctgcagagaatgatgtatgatctggtcatagacaccgtggatttcaactctccagagtctaaacgctgaaaacacccaacttgatttagtgccttacactctttatctccgatttttcaggacgacacctgttaaaatgttttgccacactttcggcgtgtattccgattatctttttggaaaatttgatcctgttaaatagactatacgtgggatcaacccaattcctgataaaatcggaagcataatgaactatctaatggcctatattagctcccagttctattataatgataaatgctaccgaactctcaccataaatatgctttttctgcgccccaaaggtaaacttaaccacaacaccctgacagtacagatagcaagtggcaaaactgagacagaaactcaagcctgcctcattacaacagcagcagtcttcaccgctgctggagctggcaaggtcaccaagtctgcccagaaagctcagaaggctagatgaatatcatccctaatacctgccaccccactcttaatcagtggtggaagaacggtctcagaactgtttgtttcaactggccatttaagttcagtagtaaaagactggttaatgaaaacaatgcatcgtaaaaccttcagaaggaaaggagaatgttttgtggaccactggttttcttcttcagaaggaaaggagaatgttttgtggaccactggttttcttttttgcgtgtggcagttttaagttattagttttttaaatcagtactttttaatggaaacatccaaaaatttgtcacagaattttgagacccattaaaaaagtttaatgagaaaaaaaaaaaaagcaaacctgcctctaatttgtctgctccaccttggaaagtgatatcttaaatttcaaaaagaattaccacatttatccctggcgaggacgtgaggaacagtctaatctcatacactgttggcaggaatgtaaattggcacggcatttttaaaagggaaattaacagaatttatcaaaatattaattggacgtaatcttcaatttagcagtttcactaataaatattgtagagaaatccttatatgcacaaaaaagtatgtacaataatactacagcattgtttgtaatagtgaaaaaaatggaaacaaaatgaccatctatcaatgggaaatggttaatggtatatctattactatgagatgttttgaactaaagggttagccattgaaagagatccaagattttttaaagccaactgcaaaaaacatacagcattatcaacttttgtcgaaacaccccaaaattatatatgcatgcatgtaaatgcattgagaaggctttcaaaggatataaggctaagtgggggaaagaaacttattttctcctccatatatttctctgttgtttaagatttatatagctattattgtcactgaatacatgttaaaagaaaaataaagacagaaaagtggtttattacttgttgttccttatttctgaccctatgatctcatctgaagcctaggtcatatgactacaccacattgtacctctttttttttctctgttctgtgttatcactggcaatcatttttggaggattctggcttctggttcaccttcttactagtttatactcttcctcttct

SEQ ID NO: 916545 - DNA, 4001 bp, Homo sapiens
gccttctctctgcctcatgcaaaggcaaagtcattctcacctcagtgtcttttcatttgctgctccctgtgcctaagatgttctccccagattcccatggtcatctccttctcatcattcaggtcttagctcaaatgtttcctcctatgaaaggcctttcctgaccaccctggctaacgcagtcccttccttacctggtaagggacttagcagtttaccctatatcccaatacctgatttcatttttttcatagcacttcctaatatctgaattttttttttttttttttgagacggagtttcactcttgttgtccaggctggagtgcaatggtgtgatctcggctcaccacaacctccgccttccaggttcaagtgattctcctgcctcagcctcccgagtagctgggattaccggcatgcaccaccacacccggctaattttgtatttttagtagagacggggtttctccatgttggtcaggctggtctcgaactcctgacctcaggtgatctgcccgcctcagcctcccaaagtgttgggaccacaggcgtgagccaccgtgcccagccactatctgaaatttttatttgttcttataatgtctgtctccccacaccagagtcttgaaacattcctggcacacagcagtttcacaacaaataactactaataagtaacttcctaatttttaaaaaaagtatgataaactagcatttctgcaggtcagaatccagtcacaccagtttttccaaaactctaaaattagcaatatggtcaaatgagacgccactaagtccctataccaatacttggactacgatgccttcaatcatttattcagagcatacagctgaaacacgtaattctaacaaggtgatttcacaaaccaaggaagtctagaaaacagaaggcaaagaagctgctctagacaggcactttaaagagcaacaggtagtaatgaacgataagtgagaaaaaaagatgctcaaaagtacatgggagaaaaggaaagggagagggcacagaattatacctcccacaccttcctagtatggaaagtgcaagactactgcacagcattagtgatgtcacaggcaggtccccgagtcaccaatacaacagcacacctacgtctagtataagccatttcagaggacaagttaaagacagaattatagaaacgtttcattctcgagacaaaaagttaatgtaattcactcatgtgcttccttatgctccattcatccgatacagtgctactaaaagccattaaagtcacctgcagagatgtaacacaatgtttggatttggagccttaaacatgtgtaacacgtgcccccttggttcccaagtcaaggaacaactaatgaattgctggaaaagcgagctctaagccctgtaaaccacaactgcaagctgtgtctaactgcatcgtaaccaggcctggtgagctgcggggtgtagtgggtagatcactgaggcctgggctcagaaaaactgggttcaaacgacctgctccaacttaggaaacacaactcgccgggtgatttaatgtttgttttcggctcttaaagcggggcggggaagaggaccatctgcccacctacctcggtcttctaagaactgagcattaagggagagactttacatgagtccctcaaagacggtcccgtcgaaagctagcagtcaggacacaaggcggtaacgtcggcctgggtttagggacagcggctacaggaaccaattcaactacaccactcagctgaaatgaaagttctccaactttcaatcaccaaaaatacactttacttgcaggacaacagctcaagtgaggctaacctgtaaaatgcatccaagtacctgccaaaagaaaagtacttgaggttgacaaaaaaggagacagacttgtggagacgaggcaaacttttcggaggcagcacaccccacaaggctccgggaggtgcgcgaccccggcccgcgcctccccggacacttcccagcccagcgcgccgccgcgcccccgcccagcaaccgctccgggcgcgcaaagcccaaggaccgccgccccgccctctgagggggacggagcgggtcttaggatcgggagggtgcgcggacgcggcgggcgggggcccgctgacctcagggcctccggaacctcacctctccgcagcaacacaacagggggccgcggccggctccgcgctgggcttccggctcccgcctggactgttaaacttcggcggccggaagtcccgccccgagtgacgtcacggggcgaggcgctgcgtgcggctgtggcttctggccggacagaagtcggggtacagagggtctggtcagggcggcgctgggcagccgcgggggaagttatcccagtgtcagggcgggaactgcgggccggggcggccctctccacgccccagcgacggagctccggccactgccaactgcttgtcattcacttgctgtttactgtgtgccaggcactgtgctagactcttgagtgtacagtgatggtttagcctggggatacaggggtacagtgaattctcgtggtccttggccttgtggagcttacaatgcactataggaagctgacgttattagatgcttaaatggaaagtgaaactatgataatgaaaggtataagatgcacgaagacccataataagggaaactattgtggatgtggatttaggaaaggattcctacatgcgatttacaagccaggaaacgcgctcaggctgagaaataacccaaagagtaggcgtctgcactaacctacttcaaaacccatgatctttctttcgcatcatgctgcgaggtccggaacatcaaacatcatctgtttgggaattcttttgaaggggatacttcaaggtggaaaaggaagttgctgagccgagttttcaagtgccccttccaaaggtccttttatagctctactgacaatttttgctaagaatatttatcataaatatagagcatttcttctgcaaaaagtgttattctttcatcacaactacatggggtgtgtttctgaactaggtacatcagccccagttatctgcattcatattgcagataattggaaaattctaataagtgcattttttcagagcagaaattgaaatcgtagccaagttactgaggttcatgggggagtggcaaaaggagaaagatagcaagcagcaactaccttaattgtacagtctgcagttcttgaggctatgaaatccaatttgggcagggaggaggcccagaaagttgggaactaagaaagtacggtaagggagtgggggcagggagaatgggagcaaatggagaaaagaaaacttcaaacaaaaagggcaattaattaaatctctgaaaattgaagccagcaggaaaattgagactagactatatgaaaatatatataataatacatgtaatataatatatacatattatatgatataatactagttatacatataaaaatagatatttattgaacactttactaagcactgtatttgtgtatatagacgtaatgtgtatgtatgcaatatatatataatttcatctttctaaaaacacatgaagtatgtgctattatttgtccccattttacatatgaggaaatagaggttaagtaacttgtccaaggttacaagtttaataaatggtagattcagaagttaaacctgggaccatgagactgcaaagactgtcccagacctttatgctatacagtcaagagccataacacagcgtatagggccaaatggaaacctccattcctctgtcctcactgatgctgcggcctcatcaaatcttactggccctgaaacagtcctgtcatttttgtccgtgcctctgtgcctatgtatacactgtttcctcagttctgtataatagtttaacgaacaatagatgccaaatgttagaagccttgctaatatatgaattatataaacatatacagatttccaaaagtagccatcacaaca

SEQ ID NO: 916546 - DNA, 4001 bp, Homo sapiens
ttttttcatagcacttcctaatatctgaattttttttttttttttttgagacggagtttcactcttgttgtccaggctggagtgcaatggtgtgatctcggctcaccacaacctccgccttccaggttcaagtgattctcctgcctcagcctcccgagtagctgggattaccggcatgcaccaccacacccggctaattttgtatttttagtagagacggggtttctccatgttggtcaggctggtctcgaactcctgacctcaggtgatctgcccgcctcagcctcccaaagtgttgggaccacaggcgtgagccaccgtgcccagccactatctgaaatttttatttgttcttataatgtctgtctccccacaccagagtcttgaaacattcctggcacacagcagtttcacaacaaataactactaataagtaacttcctaatttttaaaaaaagtatgataaactagcatttctgcaggtcagaatccagtcacaccagtttttccaaaactctaaaattagcaatatggtcaaatgagacgccactaagtccctataccaatacttggactacgatgccttcaatcatttattcagagcatacagctgaaacacgtaattctaacaaggtgatttcacaaaccaaggaagtctagaaaacagaaggcaaagaagctgctctagacaggcactttaaagagcaacaggtagtaatgaacgataagtgagaaaaaaagatgctcaaaagtacatgggagaaaaggaaagggagagggcacagaattatacctcccacaccttcctagtatggaaagtgcaagactactgcacagcattagtgatgtcacaggcaggtccccgagtcaccaatacaacagcacacctacgtctagtataagccatttcagaggacaagttaaagacagaattatagaaacgtttcattctcgagacaaaaagttaatgtaattcactcatgtgcttccttatgctccattcatccgatacagtgctactaaaagccattaaagtcacctgcagagatgtaacacaatgtttggatttggagccttaaacatgtgtaacacgtgcccccttggttcccaagtcaaggaacaactaatgaattgctggaaaagcgagctctaagccctgtaaaccacaactgcaagctgtgtctaactgcatcgtaaccaggcctggtgagctgcggggtgtagtgggtagatcactgaggcctgggctcagaaaaactgggttcaaacgacctgctccaacttaggaaacacaactcgccgggtgatttaatgtttgttttcggctcttaaagcggggcggggaagaggaccatctgcccacctacctcggtcttctaagaactgagcattaagggagagactttacatgagtccctcaaagacggtcccgtcgaaagctagcagtcaggacacaaggcggtaacgtcggcctgggtttagggacagcggctacaggaaccaattcaactacaccactcagctgaaatgaaagttctccaactttcaatcaccaaaaatacactttacttgcaggacaacagctcaagtgaggctaacctgtaaaatgcatccaagtacctgccaaaagaaaagtacttgaggttgacaaaaaaggagacagacttgtggagacgaggcaaacttttcggaggcagcacaccccacaaggctccgggaggtgcgcgaccccggcccgcgcctccccggacacttcccagcccagcgcgccgccgcgcccccgcccagcaaccgctccgggcgcgcaaagcccaaggaccgccgccccgccctctgagggggacggagcgggtcttaggatcgggagggtgcgcggacgcggcgggcgggggcccgctgacctcagggcctccggaacctcacctctccgcagcaacacaacagggggccgcggccggctccgcgctgggcttccggctcccgcctggactgttaaacttcggcggccggaagtcccgccccgagtgacgtcacggggcgaggcgctgcgtgcggctgtggcttctggccggacagaagtcggggtacagagggtctggtcagggcggcgctgggcagccgcgggggaagttatcccagtgtcagggcgggaactgcgggccggggcggccctctccacgccccagcgacggagctccggccactgccaactgcttgtcattcacttgctgtttactgtgtgccaggcactgtgctagactcttgagtgtacagtgatggtttagcctggggatacaggggtacagtgaattctcgtggtccttggccttgtggagcttacaatgcactataggaagctgacgttattagatgcttaaatggaaagtgaaactatgataatgaaaggtataagatgcacgaagacccataataagggaaactattgtggatgtggatttaggaaaggattcctacatgcgatttacaagccaggaaacgcgctcaggctgagaaataacccaaagagtaggcgtctgcactaacctacttcaaaacccatgatctttctttcgcatcatgctgcgaggtccggaacatcaaacatcatctgtttgggaattcttttgaaggggatacttcaaggtggaaaaggaagttgctgagccgagttttcaagtgccccttccaaaggtccttttatagctctactgacaatttttgctaagaatatttatcataaatatagagcatttcttctgcaaaaagtgttattctttcatcacaactacatggggtgtgtttctgaactaggtacatcagccccagttatctgcattcatattgcagataattggaaaattctaataagtgcattttttcagagcagaaattgaaatcgtagccaagttactgaggttcatgggggagtggcaaaaggagaaagatagcaagcagcaactaccttaattgtacagtctgcagttcttgaggctatgaaatccaatttgggcagggaggaggcccagaaagttgggaactaagaaagtacggtaagggagtgggggcagggagaatgggagcaaatggagaaaagaaaacttcaaacaaaaagggcaattaattaaatctctgaaaattgaagccagcaggaaaattgagactagactatatgaaaatatatataataatacatgtaatataatatatacatattatatgatataatactagttatacatataaaaatagatatttattgaacactttactaagcactgtatttgtgtatatagacgtaatgtgtatgtatgcaatatatatataatttcatctttctaaaaacacatgaagtatgtgctattatttgtccccattttacatatgaggaaatagaggttaagtaacttgtccaaggttacaagtttaataaatggtagattcagaagttaaacctgggaccatgagactgcaaagactgtcccagacctttatgctatacagtcaagagccataacacagcgtatagggccaaatggaaacctccattcctctgtcctcactgatgctgcggcctcatcaaatcttactggccctgaaacagtcctgtcatttttgtccgtgcctctgtgcctatgtatacactgtttcctcagttctgtataatagtttaacgaacaatagatgccaaatgttagaagccttgctaatatatgaattatataaacatatacagatttccaaaagtagccatcacaacaaagaatatttctagagacaaagagaaatatttcataatgataaaatggtaaataaccacaagccattatcaattttaagtgtataggtgaacgtaagagaattttgaaatatatgaagaataagtatcaaagctaaaggaggaaaaaagcatacccatagtcattgttggagactgacagaattttctcagtaattcatagaacatccagataagaaaaacaaatcagaaaagatgtggaaga

SEQ ID NO: 916547 - DNA, 4001 bp, Homo sapiens
tcagtgtcttaactaagattaagctatcctttttcctacctaaatcaatttcacccaaacgaggcgtttgtgttataattcattgttccccagattctaaaatcaaccatctgccataggagtttctgctcagtaattaagggactatccattagaactggcaagagtacaaagtacgaaggagaagggtgaggcaggggagaaaaaaccacttaaaagagatagggatatgtgtctcacactggcccttctacacctcagctaaagtactgtcatccatgaggcaatacaaagttaggacaagcggcaagagcaactcctgccggggttatcggaactgaaatcacagtggggatgcagcacgccgggcataccttgaaagagaaaggctttcgtcccattatgcagccccgggacctgacgcactccggtcgtggactccccaagttctaactctgttaagacgtcaatctgtagggaagggtccacaccaagcccccaaactggtgaggggtatgaggtgggagagagaaaaaggaaaagctccatcaaaatgcaagtctcttcctccagggcagcaaagaaccgcgttttcgcgacaatattgggaactgaagatgagaggcgactgcctcctcctccgccgagagccttacctgagatcagcagccaagctttaaatagcggagcacccagtcccgtttccatgacctcctttaaacccttctctctgcaaagttccccctcagccctccgaccctggactaggggcgtgatccgcctcgcggtctccaaggcaagcacagaaaaaaaaaaaatccatatccaaacccgcccccttactccaagcttcccactccagacctactttgggtccgggaaaagcgaggcttccccagccagcccatgctgccccgaggcgggagccatccctttccccagccccagctctgcggccactcacctgctccgagaccgaagatcaaacagaatgttctcagtaagacccgagactccatggtgcggatcagctcagtccatcgtctccctctttaaaaataaaaataaaaatcgaagaggttcttggaatcaagcgggaaaataacgtttgtctctcctgctgctgcctcggatttactgatcagtaggattaatacgctttggttgcctaagaaagaaaagggaggcctccccaggcgcgtgaagaacttagaccctccaatgcgcacatcattcccacacgcagggccgaggcggcagcgcggcccggagggggcccggagggaggggtcggactcgccccggcgcggctccgtcggggaattagctcccgagccgaataaaagcagccaaagactcgcacacccggtagaaggggggcggccccaagaaagcccgggctggggcggccccgcacccccccgtcttccccgccgcccgaacctgttgtaaaggcagagacaatggagaaagctccgggagacgcgcggagagactgctcctccggggagggaggggcgggccgggggaggcggggtaaggaggagggaggggccgccgagggcgaggccggcgctcagcgtcggtctcccgcacggtctcctggatgccaaacccggtctagggagcccaggagccgttgcagcctcagctcttctccctccctctctcgatgacccgggcaatgccaacctcctttcgggattgaaagctctaaatccaaggtgctaagttgatgggcggtctttgctctcacccctcgatttcgggcgcgtgtcttgaaagacaggagagaaaaaagaccacccagctgcaggaggcaaggctggagcgagtagcgctcgcctgccctttaagcaaaggagggaagcccatgtgcactcgtgcactgggctccggagcagccccggggtgcagggcactccccctccagggcgtgcggaggaaggccaccaaaacacgctgcactgccgaggtggagctgggcaaagtaggtagagactggtggggacggatggcgagcctgggaagccccgggtgtcctggtggagaggttccctgccgggggcggggcgctggagagcttccccggcgcggagagcttcccgggcgcggagagcgcagagaacttggccaggaggtgctggacagctccggaacccgcgcgccccctgccaaataaagcgtggagacccggactcgggctctctgggaccagcatacagcagaaggcaaggggaactgagccagggcgtctgttcacgccgaaatatctacctacatagaggagatggttagagagagagagagagagagaaataaataaatacgtaaataagcagagggaggagatggagcccaggcgagagagaagagccatcccactgttgaccacactcatgcaggctctacctgcccttcaccacatatgtccgggaccataaaagtggtgtcctttgagatccatttttcagcaggcacatgtatgttcaagatcaatggtacataatattttttgaacatagccctaaaatttttaggtaaattttgaggaatggcattccactttcattttggaaaagttaagagtttaaaaaaccattatggtattaatctgtacaaagatcaattgggtttcttaaccttccatgcaaacatgtgggtactgaattctccaactggatactaacagctacagttaccaaaatgcctactgggtagtctgagccccctgcaaggcaggagtataatatacattttatctatagatatatagttatagatattatcatatagtggaatacatatactatattatactatagggaaagaggtatttttagatctgcccttagaatttttaagacaaaagattcagaattcgggagctcttttaaattaatttttaattctctcttatcgaatttcccatttaattctatttgtaactttgtaaagtttgagaaatatttcagtacttacaagtgataaaggattgtcatatgcaatttcccaaatttgaaaaactatgccaaataaataatacaatttaattaatcaatgaaaagaaattaatcatcagagaattaaagacctttctacagctgtgcatctaaaatattcaattgtaataagtatctacagaagctacacgaaataaattttaaataacgtagcatttaaaatgctatcattagagaaaagaataaaacataaatatacatatgcacatatatatttccacataaaagtcctcctaaccaacctgtgttcaaccaactcatgaaagtagggatactctcgagtttctctgactctcatccatatgctgaaagctggtggttaatgggcttatctccagtaccatacacactgaggctccctccagaacagtggtatttggtacccaaaataattctagttgaacctgctactgtaattatttgacctaattaaatagtatggaaatcattaaaatatgagtatggggaggtgtgaagagttgtttctctaaaactaaggtataaggtttggaaacccatagtaaaggtgagccattgtattagctagggcagagtttctcaacctgggcaggagttttcaacattataactactaacattttggggctggataattctttattggggctgtcctgtgccttgtaggatgttagttgaattcttggtctctatccactgaatgccagtattttcagtattccattttatctatgtgttcttttgactatatctctttgtgaagcttttaaaattggtattctagggaatacaatatacatacttaacttttcaccttctacctagagtccatacattaccacttcagttcgaatacagaagctttactaccacatcaaatccctttatcctcaactctttaggttgtagttgtcttatgtattatatctacatacactcaaactccttttagacaatgttaaaattttgcttgcaatcattgttgtaggcataataata

SEQ ID NO: 916548 - DNA, 4001 bp, Homo sapiens
tgctgcattggaatttgcttctgactgcacaacacatttaaatataatttgagatgtagacatttgtgcccagccaatatccattgacttcaaaaaaaagttgtaaaatcgtaagtacacaattaatgataatatgagatacacttctagattaacatttacttgaaatctttccaaaatacttttgagaccattattccctttctcttgttattggtggatgaaggaagaatgagggtctttcaaagataaattttgcctcaaatatactgcgactgtgatatgcagtaagtaaaaatattcagaggcattaatttttccagaaagctacccccataaaacaattcctccaagcagggcaccatcgtacctgaaactttcagagatcagtgtcttaactaagattaagctatcctttttcctacctaaatcaatttcacccaaacgaggcgtttgtgttataattcattgttccccagattctaaaatcaaccatctgccataggagtttctgctcagtaattaagggactatccattagaactggcaagagtacaaagtacgaaggagaagggtgaggcaggggagaaaaaaccacttaaaagagatagggatatgtgtctcacactggcccttctacacctcagctaaagtactgtcatccatgaggcaatacaaagttaggacaagcggcaagagcaactcctgccggggttatcggaactgaaatcacagtggggatgcagcacgccgggcataccttgaaagagaaaggctttcgtcccattatgcagccccgggacctgacgcactccggtcgtggactccccaagttctaactctgttaagacgtcaatctgtagggaagggtccacaccaagcccccaaactggtgaggggtatgaggtgggagagagaaaaaggaaaagctccatcaaaatgcaagtctcttcctccagggcagcaaagaaccgcgttttcgcgacaatattgggaactgaagatgagaggcgactgcctcctcctccgccgagagccttacctgagatcagcagccaagctttaaatagcggagcacccagtcccgtttccatgacctcctttaaacccttctctctgcaaagttccccctcagccctccgaccctggactaggggcgtgatccgcctcgcggtctccaaggcaagcacagaaaaaaaaaaaatccatatccaaacccgcccccttactccaagcttcccactccagacctactttgggtccgggaaaagcgaggcttccccagccagcccatgctgccccgaggcgggagccatccctttccccagccccagctctgcggccactcacctgctccgagaccgaagatcaaacagaatgttctcagtaagacccgagactccatggtgcggatcagctcagtccatcgtctccctctttaaaaataaaaataaaaatcgaagaggttcttggaatcaagcgggaaaataacgtttgtctctcctgctgctgcctcggatttactgatcagtaggattaatacgctttggttgcctaagaaagaaaagggaggcctccccaggcgcgtgaagaacttagaccctccaatgcgcacatcattcccacacgcagggccgaggcggcagcgcggcccggagggggcccggagggaggggtcggactcgccccggcgcggctccgtcggggaattagctcccgagccgaataaaagcagccaaagactcgcacacccggtagaaggggggcggccccaagaaagcccgggctggggcggccccgcacccccccgtcttccccgccgcccgaacctgttgtaaaggcagagacaatggagaaagctccgggagacgcgcggagagactgctcctccggggagggaggggcgggccgggggaggcggggtaaggaggagggaggggccgccgagggcgaggccggcgctcagcgtcggtctcccgcacggtctcctggatgccaaacccggtctagggagcccaggagccgttgcagcctcagctcttctccctccctctctcgatgacccgggcaatgccaacctcctttcgggattgaaagctctaaatccaaggtgctaagttgatgggcggtctttgctctcacccctcgatttcgggcgcgtgtcttgaaagacaggagagaaaaaagaccacccagctgcaggaggcaaggctggagcgagtagcgctcgcctgccctttaagcaaaggagggaagcccatgtgcactcgtgcactgggctccggagcagccccggggtgcagggcactccccctccagggcgtgcggaggaaggccaccaaaacacgctgcactgccgaggtggagctgggcaaagtaggtagagactggtggggacggatggcgagcctgggaagccccgggtgtcctggtggagaggttccctgccgggggcggggcgctggagagcttccccggcgcggagagcttcccgggcgcggagagcgcagagaacttggccaggaggtgctggacagctccggaacccgcgcgccccctgccaaataaagcgtggagacccggactcgggctctctgggaccagcatacagcagaaggcaaggggaactgagccagggcgtctgttcacgccgaaatatctacctacatagaggagatggttagagagagagagagagagagaaataaataaatacgtaaataagcagagggaggagatggagcccaggcgagagagaagagccatcccactgttgaccacactcatgcaggctctacctgcccttcaccacatatgtccgggaccataaaagtggtgtcctttgagatccatttttcagcaggcacatgtatgttcaagatcaatggtacataatattttttgaacatagccctaaaatttttaggtaaattttgaggaatggcattccactttcattttggaaaagttaagagtttaaaaaaccattatggtattaatctgtacaaagatcaattgggtttcttaaccttccatgcaaacatgtgggtactgaattctccaactggatactaacagctacagttaccaaaatgcctactgggtagtctgagccccctgcaaggcaggagtataatatacattttatctatagatatatagttatagatattatcatatagtggaatacatatactatattatactatagggaaagaggtatttttagatctgcccttagaatttttaagacaaaagattcagaattcgggagctcttttaaattaatttttaattctctcttatcgaatttcccatttaattctatttgtaactttgtaaagtttgagaaatatttcagtacttacaagtgataaaggattgtcatatgcaatttcccaaatttgaaaaactatgccaaataaataatacaatttaattaatcaatgaaaagaaattaatcatcagagaattaaagacctttctacagctgtgcatctaaaatattcaattgtaataagtatctacagaagctacacgaaataaattttaaataacgtagcatttaaaatgctatcattagagaaaagaataaaacataaatatacatatgcacatatatatttccacataaaagtcctcctaaccaacctgtgttcaaccaactcatgaaagtagggatactctcgagtttctctgactctcatccatatgctgaaagctggtggttaatgggcttatctccagtaccatacacactgaggctccctccagaacagtggtatttggtacccaaaataattctagttgaacctgctactgtaattatttgacctaattaaatagtatggaaatcattaaaatatgagtatggggaggtgtgaagagttgtttctctaaaactaaggtataaggtttggaaacccatagtaaaggtgagccattgtattagctagggcagagtttctcaacctgggcaggagttttcaacattataacta

SEQ ID NO: 916549 - DNA, 4001 bp, Homo sapiens
ggcagtcctgaaataactttgtttccagttcatagggattaaaaatcagagataaaaacaacacaatacaaaacaacaacaacaaaaaaaaaaaaacagaaggttaaccctactgacacttctattcaactgtgtgaaattctgctgacaatgtagccttatcttctttattatatttggtcattgtttttaaaggattcaatatccaagccccaccctcttataaaagacccttaagtgaataaaacattaccataaatatttgttacaataaaaaattaacttaaacataaaatttaaacaataatttttaagccagaaaattgcattttaattttttataagagcaaacttgttttaagtaaatgtaacacatgtgaatttcctcctttcccaactctaagctttggttttagtgtccatggtgacacatactggctatatcaggcaacaacaccactacagaaacactcaagttttattttatttctatttcttggtagcatattttccgaagtggtttccttttgcatatccaactctttagtaattatgaattgcactttcaaagccatggcaccaaaataacaacaacaacaacaaaaatctgggtgaggtagggcaagaagctttagtccattagatatgttaaaccaaactccattctcttttgccttcatgtattcttcaccatacatgaatctagtctgtctgtacacgtttagctaccttttagaagctcttattacggcaactttccacaaacaagcaatcctcaaaagctctaatcaaagttgaaggtttgctgcattggaatttgcttctgactgcacaacacatttaaatataatttgagatgtagacatttgtgcccagccaatatccattgacttcaaaaaaaagttgtaaaatcgtaagtacacaattaatgataatatgagatacacttctagattaacatttacttgaaatctttccaaaatacttttgagaccattattccctttctcttgttattggtggatgaaggaagaatgagggtctttcaaagataaattttgcctcaaatatactgcgactgtgatatgcagtaagtaaaaatattcagaggcattaatttttccagaaagctacccccataaaacaattcctccaagcagggcaccatcgtacctgaaactttcagagatcagtgtcttaactaagattaagctatcctttttcctacctaaatcaatttcacccaaacgaggcgtttgtgttataattcattgttccccagattctaaaatcaaccatctgccataggagtttctgctcagtaattaagggactatccattagaactggcaagagtacaaagtacgaaggagaagggtgaggcaggggagaaaaaaccacttaaaagagatagggatatgtgtctcacactggcccttctacacctcagctaaagtactgtcatccatgaggcaatacaaagttaggacaagcggcaagagcaactcctgccggggttatcggaactgaaatcacagtggggatgcagcacgccgggcataccttgaaagagaaaggctttcgtcccattatgcagccccgggacctgacgcactccggtcgtggactccccaagttctaactctgttaagacgtcaatctgtagggaagggtccacaccaagcccccaaactggtgaggggtatgaggtgggagagagaaaaaggaaaagctccatcaaaatgcaagtctcttcctccagggcagcaaagaaccgcgttttcgcgacaatattgggaactgaagatgagaggcgactgcctcctcctccgccgagagccttacctgagatcagcagccaagctttaaatagcggagcacccagtcccgtttccatgacctcctttaaacccttctctctgcaaagttccccctcagccctccgaccctggactaggggcgtgatccgcctcgcggtctccaaggcaagcacagaaaaaaaaaaaatccatatccaaacccgcccccttactccaagcttcccactccagacctactttgggtccgggaaaagcgaggcttccccagccagcccatgctgccccgaggcgggagccatccctttccccagccccagctctgcggccactcacctgctccgagaccgaagatcaaacagaatgttctcagtaagacccgagactccatggtgcggatcagctcagtccatcgtctccctctttaaaaataaaaataaaaatcgaagaggttcttggaatcaagcgggaaaataacgtttgtctctcctgctgctgcctcggatttactgatcagtaggattaatacgctttggttgcctaagaaagaaaagggaggcctccccaggcgcgtgaagaacttagaccctccaatgcgcacatcattcccacacgcagggccgaggcggcagcgcggcccggagggggcccggagggaggggtcggactcgccccggcgcggctccgtcggggaattagctcccgagccgaataaaagcagccaaagactcgcacacccggtagaaggggggcggccccaagaaagcccgggctggggcggccccgcacccccccgtcttccccgccgcccgaacctgttgtaaaggcagagacaatggagaaagctccgggagacgcgcggagagactgctcctccggggagggaggggcgggccgggggaggcggggtaaggaggagggaggggccgccgagggcgaggccggcgctcagcgtcggtctcccgcacggtctcctggatgccaaacccggtctagggagcccaggagccgttgcagcctcagctcttctccctccctctctcgatgacccgggcaatgccaacctcctttcgggattgaaagctctaaatccaaggtgctaagttgatgggcggtctttgctctcacccctcgatttcgggcgcgtgtcttgaaagacaggagagaaaaaagaccacccagctgcaggaggcaaggctggagcgagtagcgctcgcctgccctttaagcaaaggagggaagcccatgtgcactcgtgcactgggctccggagcagccccggggtgcagggcactccccctccagggcgtgcggaggaaggccaccaaaacacgctgcactgccgaggtggagctgggcaaagtaggtagagactggtggggacggatggcgagcctgggaagccccgggtgtcctggtggagaggttccctgccgggggcggggcgctggagagcttccccggcgcggagagcttcccgggcgcggagagcgcagagaacttggccaggaggtgctggacagctccggaacccgcgcgccccctgccaaataaagcgtggagacccggactcgggctctctgggaccagcatacagcagaaggcaaggggaactgagccagggcgtctgttcacgccgaaatatctacctacatagaggagatggttagagagagagagagagagagaaataaataaatacgtaaataagcagagggaggagatggagcccaggcgagagagaagagccatcccactgttgaccacactcatgcaggctctacctgcccttcaccacatatgtccgggaccataaaagtggtgtcctttgagatccatttttcagcaggcacatgtatgttcaagatcaatggtacataatattttttgaacatagccctaaaatttttaggtaaattttgaggaatggcattccactttcattttggaaaagttaagagtttaaaaaaccattatggtattaatctgtacaaagatcaattgggtttcttaaccttccatgcaaacatgtgggtactgaattctccaactggatactaacagctacagttaccaaaatgcctactgggtagtctgagccccctgcaaggcaggagtataatatacattttatctatagatatatagttatagatattatcatatagtggaatacatatacta

SEQ ID NO: 916550 - DNA, 4001 bp, Homo sapiens
ctgcacgttgtgcacatgtaccctaaaacttaaagtataataataataaaatttaaaaaaataaataaataaaaataaaaataaataaagtgcccctgaggattgagttggagctcaggttgaaggtctctgtctatgtgttgggggagggtagtactgagaatggaaaagcccacacagagagaaaaaaatcagcagaatctaaaagaatgaaaatgcatggaacatttagttacttgtgaagaaagagatgtagtttatgaggagagacaatggatgatgaatttgtaaatgaaattggaaaagcacccttgtaaataatttatttttaaggctttagacctcatcctataaagtagttacttgccaaagcatattccacagactactagttctatgggatgttgaaagattatcacaagaaaaaggaggcatctctgatcaaacagagttaaacaaaatttaaaggatgtatttactctaggacttctctgcacctcttaatatactaatacacactgaaaatctcaaaaagctaatagaatatgcagttttccaaactaatttcacaatagaatctttttttaaaggagaaaatcagagaactaatgttctgtgggaatgtattctggaaaatgctactggagtaatggggaaatcactgcaacttaattaaattggcttcccaccacatgacatcatttatttattcttccacctaataaacttttatttagtaccttctacatgctaagcctaatagtgcataaaagtccacgagccttataaattcgaattgtttatgtgaataaaaataatagtagtttcctactaagttaatgtggccaaaacaaaatgaacttggattctgactatacaggattcaagttcatcacagtgcagcagtagtggttaggcatggacacttggtagccaacctgcctgggtttaaatcctagctattccacttactagctatatgaccttgggcaaattacttaacctctctgtgccactattaagtgggaattgtgacagtccctaactcagttgttctgatgattaagttgaatgagcaaatatttataaagtccttagaaaagtgcttggcatacagtaagcataatgtgtatttctgttaaataaatcaaataaatatgctggggtcatagggagtgtttttctttcctttcttaaactagtttattgcacacttactctgggaaatttttgtaataaatcagtagcctgtttagatataggtgaaaatgagataacacaaggccatttgggttcttcccttgagtaggaagctttattgaaacatcaatctttaccctagatagtgagccacagtctcctagctctcattattttctccatacagctgattgaaaaagtcaggatataaaaatgtaacagcaggatgcagaaataaagttgatttctagttttttctttatacttcttcctagttttcagattttccatgatggcatatctaagttctttattaagaaaaaagttatctaaaaaatcagctctcaaactagggttaaaaacaaagataaatataatataggaattttctccttcccagtcctaaaatagttgccagagataattgggaggtcaaggtaggattcagcattatgtttcaagtttgaatagttgtgaatttagcaaagaaattcccaaactcttaacatactataaaattcgtaaacgttaatatattttaaagaaaaacaatatgattcacatcaaaaccacagctgtttgaaaattcaggtcactataccctccttaaagaatttttaaaatggtgttcagagttaccttaaaattaaaatgataagaaagaactcacattttgaggattaaaatgagaagtcttcttatagacattttataataataatgtctaaaaggttcttttttcacttttagattgaataaagcatcttccttatttcagtaaatgttagatggatccttctgattgctcaggccaaaaaccttggagtcatttctctcacatcccacatccaattgctcagtacatcctgcctgctacttctcaatatatagacagaatctggcagttaccatctccacccacaactgccatggtctaagtcatcatcctaactggtctccctgctatcatcattcccttcagtctatcctcaaaatagcatccaaagaagtgatccttttaaaacataaatcaggttgtgtcactcctctgcctaaaaccctcagtggttttccatctcacttgaagtaaaagctgaagtccttgccaagccatccatgatcttgtccaccttacccctctgatatcgctctccttcccttgttccatttcagtctcccccgtatccttactgtcaatatttctaaaacaagcagccagacctttacagttgctgttctttctgcctggaatgctcttcctgcaggtgtcctcttagctcactcccttaccttctttgtactttgcccaaatgtcaccttatcataaggttttccttgactacctcttttaaaattgcaaaccaccccactcacattttctagtgcctcttccagatttttttctacatagcaattaaaaccatctaacatcccatgtttcatatttatctcattgtgtctcttcaatagaatgaaaattcatgagcacaagatttttctctgttttattctctgatatattcccacaacctagaagagtgcttaacacagagtagctgctcggtaaatatttagtggatgttaaataaaagtggaggtgttgggaaagctattggatatatactcctggagtgtagagaaaggtctcggctagagatataattgtattagtcatcagtaaaaatggcattaaaattaaagaggctggattcagtaaaaaagaaattttttttttttttgagacagagtctccatctgtcgcccaggctggagtgcagtggcgtgatctcggctcactgtaagctcggtctcctgggttcacgccattctcctgcctcagcctcctgagtagctgggactacaggcactcgccaccacgcccggctaattttttgtatttttttagtagaaacagggtttcaccgtgttagccaggattgtctcaatctcctgacctcgtgatccgcccacctcggcctcccaaagtgctgggattactggcgtgagccaccgcgcctggccaaaaagaaacttttaagagaactcatttttaaaatattcgttggaaaagcataaagacaaaaagaatgcactttgctggaaacacatagtgataaaaataatgtactttttgtaaatttcaaattagcaaaatttacaaaactgaaggctatttaaaagatatacaatatgcaactaattgcaaaacactgaatcagtaatttttcattgctttctaattgaattttgctttatttcatgttcaaggttatcttctcttctcagtaaatgaagcaaattgtatgccttttcatccttctgtttaccatcagatcttagacaaccatgaaacacaaataaggaactgagatgcatgcaatatattgtttctaaagaattcccctctcgagtcttcatcttctgtgaccatttaattgtgctggtgactggcaagacatgtgggaattgaaagtaatatacttggaagtaaatggagattaaaattctcttcccaataatttgaaacttattttgaagcttattcaaaaaaataaatgaagagcccaaggtccggcaacactttactgacaatcagccattagaatgcagaacagtgccctcaaagactgccatctgcattttgtaggaagagatgcaaaaaaaaatggggaaaatattgtaaaataaccaccactattgctcagtaatttgtgttaattgtatgaatgaagttgtcgacccactgtacttcttaaatgacatcactcatcagtccctgcaatttgtttcaacatgatgaa

SEQ ID NO: 916551 - DNA, 4001 bp, Homo sapiens
gaaagaaattagctcacaaattacataggaaataggctcgaacatgacaaaaatcaatgaatactggctcaaggggcagaatctggcccttccctacacatacacataaacacattctggtcttataaagtccatttttagccatttggtatttggattttcttttatacctacacaatataacagaattttcctcgttctatagggtctttcagtgaaatttcaagtttggccaattctctttaattcaaaatatttctcatatttttaaaaattttaaatctgttctagcaaagtgtttgcttaggcaatgattgttactactgaatatttttactactagggccaaagtcgttaagcattactactatgtgaagctatcctggaattctttctacacttttacaaattttttatttattgtggagatatttcaactaattaataggtaaggggaactcacatgtggatttgtggtagttagatggtgtctttcctcttaaaagctggtgataatctctttacctcctgatccgatgactaaatacaacagaaagggggctgtccagcccagtttctaggaaatctaagaactaaatagactaaattcttttcccagagttgcacagtcttggcactaaaaagacagaatccaaatcaggatgttcacaagttgtactgcttggaaaaagccagtagtttgctctatgctcttcttttctactctactattttcccctttattaatatatgtgcacatgtatgtacatgcatgcacatacacacacattttgtccagcaaagccatgtaatacttcaggtgccattgcctcagatcttaatagttaacagaagttattcagtcccttatttttccctgcatgttcttcagcatttcacctctgcttcctctgtcaaaaaaatgggggtgggtattttacatttaattagtattttctgagtatactttttttgcgggcaaatgatgagtgtgaagcagagaaaggaaaaatatacttggacaatctttttcttctaatttcccatctgaaagagctgaggaaaaggaaatttcccccaccctgtgccaactattcaagcatttttagtaaacaaaatagttaatggtgagaatctaccccgaggattttccacaatcttctctgattcctcattctgttttcctttccctgcctccccctccgtccttgcatagccctaaaatgctgtgagcagagtggtggattgggtcaattcttccaacctacttgctgggccaccttggaaaagcagttaaacttttcgacattttcaccactaacaaaatgaaagagtggctttgacaggaattgggggagatcatctgtattcttcactttattaaaatgattgtgagtgtctatgtgtttcactttgggtggcaagtgctataaaatttaataaaattatttaaaatgtttatatttgtccctaagtgttccaactcactagcttctacattccaagtttcctaaatctcacttcctcctgccttacccagaagagactttcctcaccccaactgctcctctaggtgagtgggaacttcccacagaaactttagcccccttaccaccccaaccactggctcacctcggtcactggccgttcctggagtgaactctgtgaatctgcgtcttagaggacagtcagagaagccaagtctccctgaccatccagatggtagaagagacgctttcagcgatccatgtcaaacccggttgttacctcttagagattccaccgggtctggtttctctgcctgctccttattctactccttccttggagttccgtatgctcctcaaggacgccttcgggctgatctctccgctgcagccagtttagtcgctcttcagtacctcctctccctggttagctccccggagaggagctttcaggaccacaagcctctgggcagctcctgctctctggccggagcctctgacttgctgcagttttgattgctctcccagctgaccagggaggagtgatgttgcccagagtctaactcctcccttttccccagccgaaagacacgcccacttgaaaggctcctccggccaggtccagttttgccgcccgtttgtttgtttaaatagagatgggggttggtggaaggggagcaggggaggagagttgctgaagttaaggagtaaagaaaaagaggactggaaacctttgtgattaaaaagataagaaatgggagcggagtagtgtggacagaatggagaaagaaaattggggatagacttggagagagagctaaaaagggcagatgacgctgctgacccacgtctgaaaagaatcaaaaggtgagaaagatgcgtgtcaaggacacagcatcagtggctgcttccttacacatgtggactggggtctttggcttataaacttcagcgttctaaaagtagaaggaagaagtatgtctctcccaccttttcagcacgtcaaagctactctcattaaaacttttaatttgtgaatttaggtgaagctatatttgttgtgctattctttcaactttctgatcactttaaatttataaaaacaaaaaggaaattaataaaatccttcattttaagggcagttagttccttgagttacaaactgagatctactattgtttttcaaaaatacatcattaagcattcacgtagaaaaagtccacctgagtagtaataagcttagaagaagagaaggctcataataattcctaaaactcctttggtattaggaggttgaattaaattgctagaagacagaaagaaaactacatctggaataatttaagtatatagatattcatactatcttatttaaaactacaccaaggaaaaataaatgattgtgaacttaagataccaaagattttctaatcatcttgtgtttccaagaaggaaaaagaaaggtgctcagattaagcaattggctgaatgatcttgaataagtcaacttcactctgggcatcagttttcatatctgtaaaatgagtttttccatcagtagcctgatagagttacgaatccaagttcaacttcttttagaaattgacttgaaggataattcctcaggcgttttggcaaaaggcaaaacatttatacaatctgaaaagaaaccagagtatccccagctttttgagaatcgcgtggtctaacaacataactagcacatgcgtcaaacagaaatgaaaaactattaatatgcctgtgtgcaaggaaaactgtagagggctgaaacaaaagatagtttcactgctcataaagttgaaaagagtatcttaagtttgaaaatagttatttttaattctgatatgtgtcatatgactcttgtttttcacagaaaacaagaaaataaaaattaacacttttttcagttttcatgggaagttatttattttcagcagctctttaatctcttacttatctttatttgtatccctatccagaaaaatatctgctcaggaaaataaacttcattttcagaataattaaacaacacatgatgggaatagcagatctctaaaaaacaaatcagaattcactcctcggccacaggaaatttatctatgaggtaatttatgtctaggatagaggtgcttaatcattgttcaatgagcgcttactgaatgaattgatctcctgctttgtgtcttcaaagccctgtccatggatatttagaagttgatggcactgatgcctgtgaaattttcaggggcagggagtaatagcagattagcagaaaggtgaacatattgagacaaagatgagggtggggataaaacattctgcaggattccttgctttctctgacagatgtaagggactggacacaataggattagccttcaaaatacattcgtgtgtgtgtgtgtatgtgagtgcacacacacacatacacaagcgtacatgaacgtgcacacccctgaagaatggggagggagttgtgaatgccaaattttc

SEQ ID NO: 916552 - DNA, 4001 bp, Homo sapiens
aagactctgtctcaaaaaaaaaaaaaaagaaggggagcaaggggaggcaggagtttgggggagagagagttgaggagaacctctggatccattccaaccagctcttgggtgcagtagcaagtttgtaccaggtggcaggtggagcaggatgcttttccctagacgctcaaggatggatggtgttctatacaccaggcatagggtccctctgggtttccagagcctacctttcagaggacagcagagctggcaggcagtgggatagatcagggagatagatagaattggatcaaatagaacaccatagagggtatagaaactggggagatactgggaaagtgaagtgggcttccctgtgttccctttcttttacaataagaagctcccactttacagtttagcttttgcattttggggtcacaccaccatcttactcccactgggttgtctgttccttctcttactccccaacattatggattaggtagaaatggggttgtcaccagggactaaagtccatcctccttactcttagcctggtggtcctacccagaaagatttttatcataatccctaagtactcacagaatgatacggagcttcatgattaggaatacagagtgaggactattcggagagggatgatggagagaggaatacatttggccttagctgctgccccagggctcttaacttccttaacgagggggaacgatgagagggggcttgcctcaggatcccttttctgaggcttatttgaccacctcacctctccaggtgtcaataggtgcagtgaaaggatgaggagggattagtaaaacttggggtattggttaaccggtaagcaacctatttagaaagattagggagaactcccgaagagagagagacacacagagatgagacagaatgaaggggaaaaaaaggagggagagagatttaagcatagtgagctcagtgccctagggacatgcatgactcaaacaaatgtgtgagaacaaagaagagggggacgagtttctgctattgtgtcacttcatccctggaccccaaactccagtcctttggtaccgatgtctaggggatcccagccccagcagttctgatacctcctctcttctcttccactgcttcccaagcccctatttcccaagcagccaagagttccagttagaagcaactatgctggggttgggatgtcttccttctccctccaggtccagctgatctctactgcccctgggcacagagaagagaaagggcaaaggagccaacaacccagaggcaatctcccatccaacccccgcaccttgcaacacttctcagaggttcagatatccagtgtttccaattcctcagctttccctaaaccttctcagctgcctagacagggcagagtaatggaatggagttggggaaagggtagtctattggttccctcagggtagcccaccagttgaaggattcctcctggctactccccagcccctcagcggtgccttgcctctggagacccctctctgatccccattcacagcctccaccccaaggatcccagagcacccaagaaaccacttaggtcttctcctagaggagttcccaaatatgtcagattcctaaaccaggggcaatctagaaagtctgaggtctcctaggataccgaaagttggttattttcccccctcacctccttcaccccccagcctgcccctcggatctcactggaatccgccccccccacacacaccctgcctttcaggcacctgtggtggagtcacagcagggtgaggagagagatgaggctcccggtgttgtctctggggaggctgagcctgagctgacactgctggacgaggatcccggctacctttgagaatctgcgaggaccgcgccccgcccccgggccattgctgagcgctgagtgtggaagctcaggctgagctgagcacaggagccccaagcaggcgcaccagcgtctgaagccctcggcctgagttctcagtccttcctccaaccctcccctttccccgtggctctcctctcctcctgcccctttcggccaagagaggaaacttgagcccgatgtggtttctgcccacaccccgcccccaccttgctcctggccagcgggggcacacatggctccaagcctctcccagccctccttttcagcccaggagtccagccaggtctgcgtttctcccatgcatttgacgaattccaacctgatggtccactcgaatgtgacctttaaactttatacaggttgtcgtcgccttgtgtccccacggctctcctagggacagggaaactgagtcatatcaaggtggaaggcagctgaaggtaaggaccaggtgtctagcttcccagctgtctaggcagttggacgtttagggtatagccttcatttacagaaaacctgggctctgggaacaagggcaggggaactatttggaggaggaggggcaactgactgctttgatgtgtcctttcacctgtagccttctcccctcccccctcagcctcagaagtcccaggacaaaggattctttcttggccaggtttttgtcagtgtgtgaagggagttaggtggggggccacccagcagggagattattcacctcccgtaaaggggaccccaggtgtcctttgtcctcctttctcccaggcaaagcaccccagccacatggcacccaactctgttaggccagtaagtacccttattcatctttttttttttttttttccagagaggggctcactctgtctcccaggctggagtgcagtggtgtgaacatgtttcactacagtctcaaactcccaggcttaagcaatcctcccacctcagcctcccaagtagctggttctatgggtcagtgcaaccatgcccagctaatttttttttttttttttttttttggtagaagtggtgtctcactatattgccttggctggtattgaattcttgggctcaagcaatcctcccctcttggcctcccaaagtgctgggattacaggcatgagccacctcacccagcccacttattcatctttttgcctgcaagctacaccaccaaagccccaggtcaaacatctttctccacagactgtgagaaaagagcctttcttcctcctaatttgtaatggctttcagctctatatgtctagcttcaatcctgacatctgcagcttacattttttcttcttacaatgttcaagttaaattagaaacatctgaagactggggaagcagataggtgccactctggagtaggactggcattcaaccagcatgctctgatgggattgtatttgctgttaaaataatgaaaatgttcagtcctagttgataaaaggcagctgctgtgagccctctaagtgtcccccacgactccaccaatagcctagttctcctctaagatccccaacaacccagcaacacaaccatggaagtaaagaggcaatgctggtaccataaggagcctcctgtgctgcctgcttctgctggaattggccaatgcccatgccaaacctatggttaaatgctttgaattccatcccttttccagtagatcatgactgcacatgcatgatcaaggtaagacaggaggcaatccaatgccttcattacatgttacatgtgggttcagaatctcttcagacttgggcatgaatctgggtcacatatgtaggctctcagatataattctctcatttgcatatttatttgggccactcagaggggatgaagaatggtaacagtcacacttgtggctgactatataatgatatcaggttatagatagtcaacaaacatttattgaataagaattatcagttcaggatactggtgttgcatagacaattatgggtaacacaaggctcatcattcattcattcaacaaatatttattgagtgtctactatgttttacatcccaggaacacaaagatgagcaagacagtctgtatcttcagtcaagtctagtcagggaattacat

SEQ ID NO: 916553 - DNA, 4001 bp, Homo sapiens
tggaggttgaagtgagccaagatagtgccactatccagcctgggcgacagagcaagactccctctcaaaaaaagaaaaaatgaaaaatgcagctttagcaagaatggaagtcactgaggttggactgcagaaaagactacctaacattggaacaattatgaactctccttggagaagctcttactgggttgaaatggctcatgttcggccaggcatggtggctcaggcctgtaatcccagcactttgggaggccaaggcgggcggatcacaggatcagatcaagaacgtcctggctaacacggtgaaaccccctgtctactaaaaatacaaaaaattagctggggtggtggcaggcgcctgtagtcccagctacttgggaggctgaggcaggagaatgatgtgaaccaagattgcaccactgcactccagcctgggcgccagagcgagacaccgtctcaaaaaaaaaaaaaaaagaaatggctcatgttcctttatttccttcaggaagtcaaagcctttttatccaagatgacccctcagaaccctttcctgctgcagttatctagggtcaaagggtcaagttcagatcctggccatgccccagatgcccagcagagggagccgctgtgtgggaagagggcctagggcagatcctgagggtgctaagcatggtagcagggtagtaaaaggggggtggctgggggctaagaagcaccttggggagccagcacaagctctgccttctcctcttcagtccctctgtccctgcccaggtgcagcgagaagtagagaacatgctagaaacaaggcccccaacctacatcagggagccaccctgctccagcccagctggggacaaaggcatcattgtcaagccaacagacacccctttgtccaagtagcaggaggagaggaccctggcatagtccgactccccttcctgaggcccctgaactactgctctgttacctggggtaaacgggcccagttgccaagggcaggcggaggtaatgagggaagaagatggcaggatcagagaggcaggtcagaagagaagaaggtgagcacgggagggagagcaggaggtggggtagagagagatgtgagtcaagtggctgctgagagagcctacactcccaatcagatcattccctccccaccactgctcctccactcctcctcctcaacgttcctcagtgtcttccatccggatctttcccttcctttcccagtgcctggagcattaccagccctgagccctgcttgctcctgccctctgcctcagtcctggccaactccctgcttctctcttctccgacacacggcctcccctgccctatccccccttactcacctgcagctcggtgatggacatgatctcctgccaagtcagttccatctctcctagctctgaagtggacagctgtatcaccctgttcctgctctgctggggaggacacggggacatcctactgggccagagtctggtccaggttcccggaaagcccagatggctctagaaacctgtgtcaaaggaaaagaggtgttagagctacacctgctagggtcagcaagtttgcactacctccttggaggggctccctccagcttcccctgagggaaggagagaccgcctcctccccatcctcactcatgctggattcatcaatcccttaagatggaaagtcttttcctgtgttgtgatctccacctcgccaactatggccacagtcagttcctttggtagcacaggaggtctttaccttttttccaggcaaaatgcccactcttttccctaatactttttactcccccaaactgttttcctggctaaaggcagagtcagatcttctgtttttctgttttgctgtgttttgttttccattttctagggcaacatcaggggtcaccctgctttcctcctctgtcctcagttttacgttctcagccttttctttccaagatgatgacagtatatgcttgaggatccccaagaacaagttgtggaaagaggcaagcagacagcccctcctcctctccaagatatggcccaggcctggtggttgatagcagctctgccctctcctcctatcctggccctgggctcccctgcctgggccagataagaggtttatcagttgcaggcagcagaggcacagaaggaatgggctctggagacactggacctctgtcctgtgtcctcacagggtcatttgggccataccttaacccatacaatcagaagtctttcctcttctgaggtaatataaccttagtaaagacttagtaagcacttgttaagaactgtgctggtattgcaagcttagtttataagattggttttcatcgggcgcggtggctcaggcctgtaatcccagcactttgggaggccaaggcaggtggatcacctgaggtcaggagttcgagaccagcctggccaacatggaaaccccgtctctactaaaaatacaaaaattagctgggcgtggtggggtggcacatgtctgtagtcccagctactcgggaagctgaggcaggagaatcacttgaacccaggaggtggaggctgcagagagccgagatcgcgccactgcactccagcctggctgacagagttagactatgtctcaaaaaaaaaaaaaaaaaaaagactggttttcacaaagattctaaaggtacatcagaaactgagactgaagctgataaataatagcaggatgaggtccagaacctgactctacctgactataatgtcttctaggcaccttcccctcctgcccctgtatcttcatactccaaacctctactggaagtctacattcatcagttctttctgtggagtgtcagtctctctttctccttctgggcaatgtctctttagagccttgaatatacactgccctccagtcccttttcttttgacctgggttctagttgcagctctgccacaaagcagcagtgtgatgttgggcaagccatctcacttctctgggcctctgtttcctcatttgtaaaaccagggagttggacaaattgaccttggaggtccctttctgcttggatagcttagaattctcagcaaaccctcacccgtgtctttatcttcttctgtcagtccctctcctcatgctacctccctattccctgacacccaccttccttgcatctgttttccctgccgtcagcaagagattccaagtagatttggcaaggtcttcctgatctctacggtcagacattgtgtctatgtgcacgcacacagacataccgtgccatatcagtatagggaagcaggctaggatgaaggaaacatgggagaggggaagcactttgggaggccaaggtggaaggattgcttgagcccaggagtttgagatcagcctgagaaacacggtgaaaacccatctccactaaaaatgcagaaattagctaggcataatggcacacatctgtggtcccagctactcaggaggctgaggtgggaggatcacttgaacctgaaaggtcacggctgcagtgagccatgattgtgccaccgcactcgagagcctgggtgacagagcaagaccctgtctcaaaaaaaaaaaaaaaaaaaaaaaacggccaggtgcagtggctcacacctgtaatcctaggactttgggaggctgaggcaggtggatcacctgaggtcaggagttcgaaaccagcctggccaacatggtgaaacccccatctctactaaaaatacaagtaatagccaggcttggtggtgggcgcctgtaatcccagctactcaggaggctgaggcagggagaattgcttgaacccgggaggcggaggttgcagtgagctaagatcgcaccactgcactccagcctgggcgacagagtgagactctgtttcggaaaaaaaaaaaaaaaaaaaaaaaaagaaaagaaagaaaaagaaggacagaggataggattgtatgacctcaaattgcatgaccttagaccactcaccacaaggatggcccatc

SEQ ID NO: 916554 - DNA, 4001 bp, Homo sapiens
tttctcaaaggaaacaattaaatgggggaggggtaggatgccaaaacaaaaacacatcctttcagtgttaattttaaagggagaagatatactgatacgcatccaagcatgaaatctagcaaatagcagaaaaaattgtagccactgaattgaaagtttttaatgccactaaaaaggtccaggtagcaaaaactgcttgacgtttgctataatattaaaagtaatttataatttcttttcaaatattaatagtatcctctaaccccaaaactgctcagaaaagtccttccttgtaacgagaaatgttattttttaaagagtgtctttgaaaaaataagccctcagaacacttaaaacatgggagctatatttatgtattttgcttggaatgggagaggggggtgtgggcagggagtcataccacaccacactcactcacccaaatagttgattcagtatatatttagactcagtacattaaagaaaaacactgtcacctcatatggtgtatattttcttaagggcaggttgatatatgtaaaagctcaagggaatgcatacatctgtttaatgttttaagaaatgcaaatttgtatccaagaaaagcagtagtcccttcctccaccctccattctttggcatcaacaaccagagttttgcatcaatatacagtaatccttaaattaagatacaagagcaatgcagggaaggaataatttgccttttaaggaattttggttaaactttcaatactttacaaataaaccccccactgattagtgccactgatattgatccgtttgctttcatcactttatgttgctgattagtttccatactaagagagatgaaaccaccccagtgatttgtagcacgaaccacgcaactatggggtccatgcgggttagtgggatgccatttttttaaaggtcgcaggctacctaaccttgtttaaattatcctgttagagtgctttgggcgagattacgatttgtgggtgctctgtaattctttgttctctaagactaccgttctttaaggccctgcatatcctcccgcctcccaccactaatgattaaaaccttagtccaatccgaagggcttccttcccaccttcggggcaagtacagggaccgcaaaccgccagatggctgcattctttacgcgcaaaccaggctgcggggaagctaaagccatgccttcctccccacgcaggtgcctgggtggccccggccccacggcctggtcccggcgacctgtcagccctgcgagtgccaggaggccgcccccagagcgcatcccctgactcgcccggccgccccggccccgcgcccaacgcctgcctcccacccgccgcgcggcccccgggatgtgcgggcagacaaagcgccgggccccgccacagccccgcgggcgggaggagggcgcccccggggactcgcgccgccgccggggctacggggccagggcccgggccgcgtctcccgcccctcggccggctccccgcacaaaatggagccggcccgggacgccgtcgagagcggggccccgacgcagccccgcggcccctcctcggccccgggcccggagctcaacggcggcgagggtgaggtggcctggcccgcgtcccgccgctcctcagcccggcgcacaaagagccgcgccgcggccccgcgcccgctccccggcccggcccgctgcgggagcggcctcgcaggcgcggggcccggcctcggcccgcgcgggagggcgggaggctagtgcccccggccgcggcggcgttggcggcggggacggcgccgggaggagacggacatttcattcgagctaaagtggagtcggtttaggagcgatcattggccgaagcgagacacaaacctccaatgcagccctggttggctcccgtctccaatcggctgtttggttggacagaaaatggctgcgaaggaaccagtcccagcgcggagctccgcttccaggactcggcctcccctccctccgccgcgggccgcttccctcggcgcgacaccctccctccgcgccgcccgcgcgcccgcccgccgcggccccgccccgccccgccccgcccccggccccgccccgcccccggcccagtcccgcgttcctgtgaggcctccgcgccgctccggatgccgctcctctaggcgcgaggtcttccagggccctgcccgggcgcgccgttcgggtctaggcgggcctccttcccggtgctgacccgggcctgtgcgaagcgggatctctcgggcgtccctctctttgtcaccccttcccccgccacgtggaggtgcctcagccgcctgagctcagcctgcctgcgcctggatttttaagaaggggaaaccaaggacagaagccgccccctaggacgacgcgcccgagccaccgggagggtctgaacggcgggggcctcctggagcgccttcagcgcctcgtgttttctttccttgggtccctgttagcgtcgccgcatgcacagcgctccctgtcatttggtccctgagcttgggtgtttttcacatttcatctaaagatgcagacccctgctaagtctagccagccttcaccctgaatcttgaacttaagatgctgcattttccacccacccccacccctctagtagctgcagattgacaagcggcttttcccaaccagatgacattttggctgcaagaatccgtggcccgttcttgcctctgtgcagccaagctccttcgctgtctttctcaaactgcagtcctgagttcagcttcgcttagcagtgaccatcccagaggtgggtaatccaacactggatccactcactgcaaccggagctggggatggcatgccctctgcttccactaaccgagtggcctgcaccacattaaactctccagctttgattatgtaaaaatacagagatcttttatttatagagttcctactgtttctcagagtatttaaacatttctgcggcaagtatggaagaaaagacaaatgaaagccccaaattgtgacaagaggagtaagtagcaatgccactgtcatcagacaacctgacttgaattccaactccccttcttacaggcttgtgatcttggccaaatgtctgcttctcagggttgtttgggataatgtatacatagaaagccctttaaaaaaaaaaagttatcccagcactttgggaggccgaagcaggccgatcacctgaggtcaggagttcgagaccagcctgaccaacatggcgaaaccccgtctctactaaaaatacaaaaattagccgggcgtggtggtgggcgcctgtaatcccaactactcaggaggctgaggcaggagaatcgcttgaacccgggaggcagaggttgcagtgagccgagatcacaccattgcactccagcctaggcgacagagcaagactccatctcaaaaaaaaaaaaaaaaaaagttatcctaagatctttatatagcatgaatttcttcaatctccatcaaacatttaaaaggtgttatttgcttagaaaaaaaaaaggaaaaattggcctgagtttaatttctccctttctctatgcttacccataaagtggagattaaggagtgaaatgatgtgttcaaaggttcaaaggcaggaaatataaagtaatagaattgggagaaggggctgggcatggtggctcacgcctgtaatcccagcactttgggaagccaaggcaggccgatcacctgaggtcaggaattcgagaccagcctgaccaacatggagaaaccccgtctgtactaaaaaatacaaaattagccgggcgtggtggcgcatgcctgtaatcccagctactcgagaggctgagacaggagaatcacttgaacccaggaggcggaggttgcggtgagctgagatcgcgccattgcactccagcctgggcgacaagaatgaaactctgtctcaaaaaaggaaaaaaaaaaaaaaaaaagaattgggagaaagatgactaatccttctcccaatt

SEQ ID NO: 916555 - DNA, 4001 bp, Homo sapiens
agtacatattttaattcatctacttctcacagcaacttcatgaggtcaaatacaattgcagtcctcattttacagatgagaaagctgagacataaatgagacattaaatgagattacacaactagcaaatggcagaactgggagtcaaacccaggcaatctggctccagagctcctgccctttagccgctgtacccaagccgtgacacagggacagcctggtgggcaagggtcagccacagtcctcctgctagctaatcccatctcagccctcactagctagctggcttcagctaaatatgaataactcagcaatgtggtgaggtgcaagagctgaggtgtcagaggaaaagatctggattctacgtcctgatgctgccacctggaaaagaaggacactgatgctgactgaatgcagagcacgtatcaggtccatgtttaatcttcccagctagcctgtgtgacctgaggcaagtcactgtccctctctgggtctctgttttctaatgtggaaagtggaccaggtgctttctgggttgttgttgtttaattcaatctaggcaacactcgctcacagaagaattcatgcacatacacggcgccacgctaggggctgtacgcacgcacggcgccacgcgctaggggctgaacgcacacgcacggcgccacgctaggggctgaacgcacgcacggcgccacgcgctaggtgctgaacgcgcacgcacggcgccacgctaggggctgtacgcgcacgcacggcgccacgcgctaggtgctgaacgcacacgcacggcgccacgcgctaggggctgaacgcgcacgcacggcgccacgctaggggctgtacgcacgcacggcgccacgcgctaggtgctgaacgcacacgcacggcgccacgcgctaggtgctgaacgcacacgcacggcgccacgctaggtgctgaaggggccgcaaagatgagtaaaatgcagagcgggccttcgcaaggctcacagcccaattctcttttccattttgtagtccttgtgagctgagcaaggcattatcatccttttatttaaaacaataggggaaacaccgggcgcggtggctcacgcctgtaatcccagcactttgggaggctgaggcgggtggatcacgaggtcaggagatcgagaccatcctggttaacatggtgaaaccccgtctctactaaaaatacaaaaaaaattagccgggcgtggtggcgggcgcctgtagtcccagctactcaggagggtgaggcaggagaatggcgtgaacccgggaggcggagcttgcagtgagctgagattgcaccactgcactccagcctgggcaacagagtgagactctgcctcaaaaaaaaaaaaaaaaatagggaaaacaacaacagcagcaataggggacttgtcccagctactgaggaggctcaggcaggaggattgtttgagcctaggaggtctaggctgcagtgagtcatgatggcaccactgcactccagcctgggcgacagagtggcaagaccctgtcttaaaaaaaaaaaaaaaaaaagacgaaggagagaaataatgtttgaccatggaaggtcacacatttttgttgtagctagagcatgatccaagtcgattctgagtctgggcctctttccactcccagctgtcctactagcctaattcatctggcatcactggggccaaaagctacaaagtccattttgagctctaactttgcagagtcatttccatcctcctgccttccccatcctgacaagtgcacatgcacacacacattgccagacacccagcagacacagaatcaatgcttttgcgtgagtgaaacagcccctctggcagccctcttcacctgcccagtccccagtgcccagcacccagtgctgagctggtgaagatcccgtggccagaggcacacttaccatatacatcatgactcagatcccatttgctgacttggaactgaagcctcttgccccaccaagcaattactggagaacaggaagtctcaacggaaaatgaggtcagcctggtggctgagaggaaaagggtcagcgagcacagccttctgcccccgtgggtccccacagcggccagcccagggccctgcatgcagcagatgcccaccacagcttcactggtgggttagctgctctgagcgactctgttcagcccagccacaggagggggttaccaggcagggacttaatatgtggctctagagtctgaaggagacaacttcaactcaaccttgtttagcagaactgggctatgacaaggacaaccacagcactggaaatctattctttttttttttttttttttttgagacggagtttcgctcttgttgcccaggctggagtgcaatggtgcaatctcggctcactgcaacctctgccctccaggttccagtgattctcctgcctcagcctcccaagtagctgggattacaggcacccaccaccatacctggctaattttttgtctttttagtagagacggggtttcaccatgttggccaggctggtctcaaactcctgacctcaggtgatccacttgcctcaacctcccaaaatgctgggattacaggcataagccacggcacctaggctggacatctattctttaaagaactctgtgttaccaaattcagttctgcaatctgtcccaagaacttccttttctgtgccctaagttacgatagaggaagaggcacatcaaccccaggcctgcctgcctttctttctttccttcttttctttcctccttttctttctttttctttccctctttctttctttctttttctttctttctttctttctctctctctctttctttctttctttctctctctctttctttctcttccttccttcctttctttctctctctctctctttctttcttttcttctttctttcttccttctttctttttgtcttgctctgtcacccaggctggagtgcagtggcacgatcttggctcattacaaccaccacctcctgggtttacgcaattctcctgcttcagcctcctgcatagctcagattgcaagggcacaccaccacacccagctaatttttgtatttttagtagagacagggtttcaccatgttggccaggctggtctcgaactcctgacctcaagtgatctgcctgcctcagcctcccaaagttgggattataggcatgagccactgtgcccggctcccagggctttcttgaagtggcataaaagtaagaaaggattttagaaatcatttagtctaaactcctcctggttacacctttggaagcatttccctgtagatattcttcccatacccaccatacctctttcttggcaataaataacctgctagaagtcagaagagagaaaaacttccatgagtttccaggaagcgaggccattattacttgttgtaggaggttgccccccaatatctatttgaccttcttgcaggatagtagaatatttgacgggatgcatgaccacttagctaaagtcagcatttcccaatccgtcttgcagcagcagggctgtatgaccaaggtctggctaatgagaacttagcaagaagaattgtggccctaaaaggaaggcacctgtcttctctatcccctccctccctttttcccaggctggaatgtggagattgtggtgagcatcttcaatcatgtgtataaggtacatatcccaggagcagagcaacaagctagaaggagcttgggtcccaaacaccgtggagctactgtattatccctggactgtctgcacgcagactattacacacaggcgagaaataaacttccattttggtctaagctgttattatttggcgtcttgcgtcagtgaaacctgcatcctaacacaacactctgtggggtgtcggggcagtcgcaacctcccgttctctgagaaacccccaattccacacacctaggaggtagcctggtgacattatatccggtccaggaatatctggct

SEQ ID NO: 916556 - DNA, 4001 bp, Homo sapiens
atacaaaaaatgagccgggcgtggtggcgggcgcctgtagtcccatctactcgggaggctgagggaggagaattgcttgaacccgggaggtggaggttgcagtgagccgagatggcgccactgcactccagcctgggcgacagagcgagactccgtctcaaaaaaaaaaaaaaaaaagcaggctgtaagggaagtctcttctaacactgccctggagctaggacatttcctagactggctcagaaaagacctgtctttgaggacaatgccgctttagggtagaatctagcggaacaccacctttcgacatggtcccggcatggcctccccttggggcgtggaaggcgggaaagggcccgtatttcggtttgacagcctgagatgtgaatcccggttgagccattgactagctgtgaccttgagcacattcactttcctgaacttcaagttttctcatctgtgagtcgcggttaataatacttacacagtggccctaaaaaatcagagaggaaaaaaaagtctatgcaaaatgcctgcttcgtacaaagggcccagaagtggtagtttgtttgtttgtttttgtttttgaggctggagcgcaatggtgcgatctcggctcactgcaccctccgcctcccgagttcaagcgatcctcctgcctcagcctccagggtagctgggactacaggcgcccgccaccacgcccggctaatttttgtatttttagtagagacggggtttcgccatgctggccaggatggtcttgaactcctgacctcaggtccccccgcctcggcctgccaaagtgctggaattaccggcgtgagccaccgcgcccggcgctattattattaataactaagggaagcccagggaaaactcagcagaaatcaaggactctcgtgagaaaaaaggaaccgaaatagcccagactggcgctccccggactctgcagcgggcggcgctgcccacggaggggggcgggctgggagtgggggatccgggggagacgaaggtgaaggagctgcggggctagttctgagccgggaaaaggtgagggcggccctgggcctcccgcgggggaaggaagagatgaagccacgtgacagggcccaaagccgggccccgagcgcgccgcagaccggatgcgggaagtgggctcggggccccgctcccctgcccggctcgcccgcccgcgtcagctgacctggcttccgcgggccctgcgccctcgcgctcccgggccccggccgcccccacgccccacgccgcgcccgccggcccggccctccctccccagctggcccggccgccgcggcctcttccgcccggcgcccgcgcattcctgccattcccccgagtcggcccgcgggctacggccgcctgcggagcgcaggaaccttcacctcccgaggacaggcgccttcccctcgggacccggctcccctgctgcctgcgccgctctgtccccctgccgctgcccaagcctccagcaggggccaccgagggctccaggagcaccccaggcccgttcttctggcccacagcgcccctcctgtgaccctcagcgaccctcctgtcctgccctccggcggcgcggctgtctggagactctgcaccgtcgcggcctcgcagcctcgcagccccgcgccgggtggggaggggagggtggcgttcctgagtccgcggaggaaagggtcgcagctgcagtcgcgccagccctcgggcctacatccgctccgccgcgacgcggctcacaaactagggaggggagaagggaagaaagacccgattcgggaacacggctttgtccctggaactgtacctcatgtcccctcacttaatcctcccaagacctgtggggcgtgtcgtcattttagggctggagatgaggaaaccgaggctcggagagatgaagcgttgtacggccaccgagcggctgctttgcaacgaagccaaagccaacgttttgttcttagcggcggtcgtttgagccacgcctcaccgcaacgagtctgccatcagccaagaggtcacatcttttctggaactcgctcccccctcacatcatgggagcagtcagtctactcttccagtagaaactgttttgccacttttggggggaatcttgagctaccagctcatcgctcaggtcttagatgacactttccttgaccccaccgggtgctccagcgcctctgcttccggttttcatagcccttataatatcacctattgcaattgcccatttccttgtctgtctccctctgcagatggagtgaaggtacctgagcgcaggaaccatggtcttcattgctgcctcagcattagcggaagtgccacgggccggctcccagggggccagagtttcccaggaacaccattgagtaccactgaactagagtctgcaagttaaagtaaggcaagaaggaaaaccggaaacaactgtaaaaacctgacctttcgtcaccttaatactggccatcatttatcgagtgcttattatgtaacagacattgttctcagtgtgtgagtgcagtgttcctcaaacctaaatgtgggcctgaatcgcagcggatcttggtaaaatgcagtttctcattcagtacctctggggtgcggcctgagattctgcatttccaacaagctcccaggatactttgtatagaaaggctttggtgtattaactaactcgatcttcttaataatcctatgaaatactactgctattcccattttacagatgaggaaacagaggttaagcatatatgaacttacatcaaaataaatagactgcagggcaaggagggaggggagaatagtgtgggcagtgtacagtgcagaaacaaagttctaggcagaggaaaaaggatttacagaaagcctggcatacagggcagggggacggggcctgcacacggggctgtttcaccgttagacgttataagcacagtacttggggctatgggcttcctgaaggtcccaagtatttgagacctgaaaaaaatttattgacacctacataggaaaagtgaacttttaaattaataattccaaaattcaaatcacgaattgtttcaaaaattttacatgatagaattcatatttagtaagcgatacgggtatattttaatgcatttgattttaaaaacggggtagggcctactaagaacaggccaagccctggccccagtgggtttggatataatcctgagggcagctgggaaccactgagagaagcaggagaatgttctctgtggctacagtgaggagaatggattggagggaggccagactggaggcccagtggctagagaccagataggcagttacagtcttccagactgcgagacaatctctctttagtgccaagattagcataaaatcatagcattatataacccaattattctttgattcctgcatccccaatctgactcagcattctaaatttacttaagatctggggacaagggtttttggcaaatccttgaaggcaaatgatgttacagtcaatcagtatatgccttgagccagacagacatgggtacgggcctcagttctgctgcttgctagctatgtgactttgcacaagtgatttaacttctctgggccttggattccttactggtaacacgagcataatcgattcctcacagaattaagtgagaaaactatgtatgtaggacttcttatggagtgggtacttagaaataaatggtagccgttatcatttatgtgcctttgttctgaaatctgcttaagttttctctaggaagtaacagagggtagaataaattatttagtattttcatcaatcttctgagataaaaattattatcctcattttgcagataaggaaaagggctcagagattagatcacagctctgtgaagtaggggcacaaagtggtcaacctggaagagctggactttattttgcttgcacttctgtccatgcactctctccagcagttgacatttgccctctttgatggctcc

SEQ ID NO: 916557 - DNA, 4001 bp, Homo sapiens
aagaagaaaacacatactagggacagaagacatggactggaggtcttgggccaattaggtgaccttattcctatctcagagcctctccaactcatggcttcctcaactcattcatttaacaaatgttttctaaagcaatgaccgtgtaccaagagttgcctcatgcactcgggctgcagcagtgaataaaacaggagaggccctgccctcagagatcttgtgtcctagtgagagtgacaggcaatacatactaaataaataagcagtgtaactttaggtggtgagcagtgctatgaaagaaattaaacaaatgataaagacaaattggggaggaggcatcctgtgaagaggttggtcaggggagggctcctgggggaagtaacatttgagctgagacctgaatgtactaggaagggccagccaggagataagccagggaaagaaggttccagacagagggacaagcaagccttgcggtgggaccgctctcggggctggctgccaatccaggaaaacagcactgggtatgcagttgtactaggtgaatggttttgacacagcacaccaagcagtcctacagttccctggtggtgtctcaagggcggaggggccaaggacagagactctgccagactcacgccaccctgcccaaaacacacacagagaacgagagagagagagagagagagagacgcgtgcacatactctgcttcaacaaaacagctcttctttaatccgaagtgtatattgggtggctgcttaagattttgttcgaggaccaggttcagggatcagaaattcttgatctcaaaagtccttttccacactttgtttgattctctgcaatgttacacagcctcagcagtggtcatagaagggttcgttctattctatccattggcaaggagtcacagagtgcagctcccagcaatctggctctcctctcaccgtaacatcccaccctttcccctccagcagtggactggaacctctgatgccttccaagcccatcccagctacagagggacacacatctctgcctcttcctaggagattagactgatttcctttccttgcactgtccaaatgagacgctttctgtcctacacagtagagctttgtgaagacagccgagaaacggctcaagttttttccaacctgtaaaatgcaaagttggccagctgcctctcttcctagcctcaaaactcatatatttcctgtctccccggcagctctaagagaagtctctactgtcctggggtttggggaaagcactgctcagaatgtgaaatcattttctggtaatacggatctaattagctctttgactgacaagaggaagcagaggccaaaagggagttaaccaatctgtttttcagatatttcaaaacaagtgaagaaccagatagggaaacagagagaaagagaaaataaagagacaaagcctagggagcatttggagaagggagtgagtaagaagagaacggggagggagaatatcaagtgactaaagtatcaatcctctgttcttccagcttcacctctactcccggtctcccctctgctctcttccagagagaacttacttgaaggtcgatgttttctcttgctgattccatctcgctgccctcaagtcccttcacacgcaccgggtgccgggaacagactgcgtgggctcctccaggctccgccgtctgagtctctgctgctttcttcgggtgggagagagcacacagctggcgggacagacctgccattcatccctctgatgtgggatgcccgtcttggctgcagcctctgggggaggtgtgcacctgcacacacgtgtgagtgtatgtgtgtgcacatgtgtgtgctccaggaggtggcacatggcacactgataggtgaccttttgagttggtagtgacagcatcattttcaccagtggctccagtgaccttccagtcccagcggagccatctgaggtcacccagcctgctttgagctagtagctttatgactggcaaagaaatcctgcatgtttatcaagcaaattgaaaaacagcctgaggacaacgctatctgacttcaccgctgggtccagtccccagtcgccacgggtggagtgacctccagcacagtctcaatactgaggcagagggatttccgttgttctttgctttgttccctatatccctaaaagtttttaaaaaaattgtagtttacctaataggctccaaagcataggctttgttctgcaaagtgagtgaacaatacgtttttactgacggattgtttgattccttcaactcctcccttgattagccatagagggagcagggagtagttgtaccttcgaagcttgtttatgcaaacagtggtattctccctacttttaaaataaaattaccaggagggagtctttttttagaaagttttttttttcctctcctgtttaccttagagcccaaaactcttctggcttgttcctgaagcaaggtttagacacaagcttgtgcaggtgtgggtgtgggtatgtctgtagacgtgcatggcagggtgttaacctgtaatccaattcagggcttgaagaggtgcgggcaggaggaagacaggcagagtcaacacgtttaccctcaccacattcaaatgtaaaaaaaaaaaaaggcgatttcttcagttctatgaaatgcctttataagttcccatccctctggacagtggtgcgagggagggttggatgattggatgggggccatattttagtctaatctatgaagcatagttggatttaatcatttaaatggtaaacagtccactttagacacaatgctcagtctttcggatttgcagaagatggcacctaggtgcacaggagggcggggtggggacggttcttgcatctatcctgtggcctctccatctcggctcctttctgttctggagctgctgggcccacgggcccgcccgaattgctgactgctgaggagacacaggtcctgctcctgggtcttctgctggccttggtggctgatgtctgatattaggccagagtcactcatgggtgattctctttctgcctttgagatccagtgttctcccttgctgtctgcgctaccttggctcgtggcaatgtggaccatcctgagacctggctttgacttgtatgtgcccccatcccactgtatccgctcagtggcccacatctctaagataagcccctcgaaattttcctgtgagatgcttgaccagtgctcctgagcccccttaggcacatggggactgagggctgctgacgaagggcaggggaaaggcaagctcagccccacttccagcagagtttgctctgatgtggctgctccaactgacacagggcagtctgcgaggtgatctccttccacattcctgaatggaaatgagacctggaacccactcttctcagcactccttaaaaagtctaccagtaatatctatcaccccaccgctcataataataccactatgtatcaagcactattctaagcacttttttttttttgagatggagtctcgctctgttgcacaagctggagtgcagtggcgccatctcggctcactgcaacttctgcctcctgggttcaaacgattctcctgcctcagcctcccgagtagctgagattacttcttcccatagtccccttaatctagaatcagaaaatgtacgctttgtcttctttttttttttttttttcctgtttggctgggatgtatctgatgtagaactctatgacaacaattcaaagggaaatgaagaaatttagaaaatcctctctctcaagaaaacctggttgtcaaaaatattgtcttggctgggcagcatggctcatacctgtgatcccagcacttcgggaggccaaagccggaggatctcttgagcccaggagttcaagaccagcttgagcaacatagtgagatcccatctgtagaagaactttttggctggacatggtggctcacacctgtaatcccagcattgtggg

SEQ ID NO: 916558 - DNA, 4001 bp, Homo sapiens
cacaagagtttgtacgcgaacgttcacagtccgctgttcgtaacagccaaaggtggaaacgacgcaaatgcccagcaacctacgagcggctgaacgatacgtgctgtgctatacgacgcgctgctactcagccacaaagagaacgaacttcgaacacgccgatgagtggaagaagccacataccgtatgatcccccttatgaggagcgtctaaaaaaagcaaacccattgatccaggaagtaaccactgatccaggagtggctgcctggggctgggggtggaaaggggcgggatatggaagcgatggtaactggtacaggatttcttttcggggcgataaagatgttctgggatagcggcaaccactgcacaacacagtaacagatgctaacttctcagctttaaacggtaaactgtgcctcagttattcctcactacagattttaagaaagctcataatgcattcccatggctgcagaccacagtgtgatctgagcaaacacatctgtggactggcacgaggcttggtgtgcgtgctctatgcaaacacagagatccccgtggatgccactggaaatgaacacggattctgcgtcttcaatattcactacaggactcgatagccatgtttctgaatgggactgaacacccacagggtgatgctcccatgaaggaagcagctttgcctggacaattgtgggagccccagacctctgctttgtggataacctgggagttggggtgcaggggatggacaaggatgaggccagcccaatgacccaccttgacctgaaaggaggggtggcccaggagctctcccaagcgattgcagcagctgtgatagcggtgtctcatccacaccttgtacttccgtgtggctccctgggaccctgcagacaggttagggtggtcagcccacgtgaggcccacatacgccaccctgggcccagcccaaaatctcaggcctggctccaccctcccattgtcttctactcagcctccgcaggtggaaacaggtcgctaaggcccccagacctgtgctgagaccagcacattccctgagccctgcaaacaggaagagcacctcctaccccaggactgccccagccaagctgccaggagcaggatccacatcccctctctttactccaagacctgacgtccccaggatggggacataaaggaagctccgagtttaagcgaccgtgtcaggatcagtcaacatcaaattacaaaaggggtgcaaagcacacaaaaagtcgtaccttgtccagtgttcatctacactcagctgcagggcacccatgtcacccctgccccaacgccaccatccatcttccacggtgggcttggtgcgtcctcccaccagcctgcacggcctgtgccagggttgggggcgctcatcccatggtgacaaagcctccctccgacccacggaaagagaagagcagccccggggccctccagggctcacctgtcatgaccatctcctcagagggcagctggcccacaaacagctctccccgctccagcaaggccccgaaaagacggctgcacgtgcggactgcttcctggatctcctcctggtcctcagactgcaggagaggcggcggcagggtgcccggccgccaactgtcaccttcgcccctgcctaggctgcccccaacccgttcccttccccctcgggacgccagccccgtcacccccgacccgtgacccacacgcctcccaccctgaccccccaacgccgtctcggaacctcctggggacctgccgccgcagccccccattcaagtcccgctcccgtgccgcgactccggccctgcgacgccgccaggcccacctgcagcacggccaggatgtcgaacacggcgttggcctcactgcggctcgccagcaccgcctccagccggcggcccagagcccggcgaactcccgcggcgcccggctcccgctccatgccgcccccaacacggaacaacgcggattctcagccgccggcgctcccgtgacgtcaccactgcgcgtagaacccgacgtcatctctacgcgccgtaccccaaccccatcttttgcgcggagcccgagtcgcaggcgtgccgccgacgtcatcgcagcgcgccacgcccgagtcccaggcgtgcggctggccatggcgctgttctacgtcgcgcggtacccgggccccgatgcggcagctgcggcggggccggagggcgcggaggccggggcgcacggcagggcccgcgcgctgctcgagcggctgcagagccgggcccgcgaacggcagcagcagcgggagcccgcgcagaccgaggcggctgcatcgaccgagccggcgaccaggaggcgacggcggccccggcggcggcggcgggtgaacgacgcggagccggggagcccggaggcgccgcagggaaagcgacggaaggcggacggcgaggacgcgggcgcaggtgggccgcggggcgagcgggctccctctggggcgccggcgactcggtgctgacgcgctgccgggtgggtgtctgcctcgcagaaagcaacgaggaggcgccaggggagcccagcgcagggagcagcgaggaggcgccaggggagcccagcgcagggagcagcgaggaggcgccgggggagcgcagcaccagcgccagcgccgaggcggccccagatggaccggccctggaggaggcggccggacccctggtccccggcctggtgctgggggggttcgggaagaggaaggcgccgaaggtgagcctcggcgggcgggagggtggtcggcgtgagagggtaggctgcgcggattcttaagtgcggcggtcgccccggaagatttcgttcagcgaatgttcccgggtcacagccgcgcctcgctgccaggtctgcagtttcatcgcctaggggtctggatcctgcacgtgcagagctcccgtttcctctgctaggcttgcccctgtcctcccgccgcgccgcgccagttctgcaagatgtgtttgcgtgaacgtgcggggtttcctgctgtgcgctcaccgcctcaggagtaagtcagaggccgttctgcaagctcctgaccgttggtgtttttgcttagcacgtgtggttttcggtaaagagatttccggcgagacaggtgaagaaagcgagaagtttgacagagtgctcgggcaccttaggtagggcaggtggaggaggttctctttgagttgggatgcaaagacttgaagccaggtcaaggttgggggttgggggtgccaggcagaggcctcgaggcagggacgccggcgtggctggggcaggcgagcgccaggtcacaggacctcctggctgcgggagggtgggtgccactgtgggttgatgggaggctacagagtgagtttgctcagggagtggcatctgcttttactgtttaacttctgaaggctgtatggaaagcgcatcctggggctgagaaggagctgaagacgacagaggtttccccagcctccctcccctagctttttccaccgtgggcttctgcgcgagagcctggaaagcgctcacctggcctctctttctttttgatggcaggtccagcctttcctgccaaggtggctggctgagcctaactgtgtcagaaggaatgtcaccgaagacctggttcctatcgaggacatccctgacgtccatcctgacctgcagaagcagctgcgggcacacggcatctcgtcctactttccaggtgccccagccccgggcaggcagctgagggaacacctccctgggcacccacacacaaggctgtgagtggccgtgggtcaggcgtccctgccacatcggtgccaagtgtggtctcagcactctcaagctcatggttcccacttgggtctcctgaggctggcgttcctctgggccttggtgccatccctctggggagcggttcccaggcctccagcagagcagcccagcccagaggtcacaggcagggaagcggcaggcctaggcctaggcgtaaacacgac

SEQ ID NO: 916559 - DNA, 4001 bp, Homo sapiens
atccctaagggtttgaagagtcctggactaatggcagccacacattccctggccccacaccctgggagcctgtactttctacccctcagaatgtcctttggctgttcctttcactccggaaatgtttagcgagttcttccctacccaggacccaaagggactcctcatgtagcatccagctcttagtttcacggaccttttggtagctttccaggcaatggtttggcctcaggagacttatttgtcttaggggcttcaacagagcccaatctcctcttggctgccctgaaaagacacaagagattcaaggagtgaagaaatgggaagatacttccaggctctgccatttccaccatagggaaatgtgagagtctagaattaactctgtggtcaaagatgagcagtaccaatttaacctacttaagttttgacacccacacttacctctttcgagcacgactagacagcctcttggaattttcgtcacttactgtttaaaaaagaaaaacgaggcagaacaagttacaggggacattaaaaataaatgggaacggaaataaacatggtaagagaattagtacactaattaaaaggagtccatttaaatctcagccctgttattatttaataactgtatacaagtttcttttttttttttgaaatggagtttcactcttgtcttccaggctggagtgcaatggcgtgatctcaactcactgcaacctccttctcccagattcaagcgattctattgcctcagcctcccatcaccacacccagctaattgttgtatttttagtaaagacagggtttcaccatgttggccaggctggtctcgaacactggacctcaggtgatccacctgcctcggcctcccaaagtgtttccttaatagtgcctctctcacaggactctaagatgattaagcgatataacatgaccaacaagtttaatacagtgcccaggacttcctactatctcaataaactgcatcctttatccaatgcccaacacaaactcccggtccagtgttacctcccaccagtcttccacacagtatactactactcggcatgaagcagccagatccgtgcttttccatttccaccccttccaaaaggcaaatcagtgactgacccctccccttcactacttcctcttgctacaatgttacccatttttcaaaacccagcttaacaaaaacttttacagttctgcatgggctcccccttcctctgaactcacaattgttttaaatcacacttttcccttgcatgaataatagttgtgtccgtgtcttcacatctctacgacctaaacagttccctacaatctaaacggctgtttcattcatacctcctagtaactcatacagagaagattccacttaaatataaaatgaacagaaactaaaaaagagaagaggttataatacagaatactgcaaaagctgagggatcaggaggccacaactaatccttacctgcaggcaagaatctgacgagttctgtctcggcacccttctgcttccgggcctttcggcctggcccccgcttctccttcgtagggtccaacttgcgccccatggtactgtggcaggcagaaatgggagaaggtggcgtcgcgcgtgtcggagggaacggcagaacgcacgcttggcgtattatagtgggaaagggcacagcctcaactcagcacccgcaactcactcagcactcccgactcagcacccgcgactcaagcacccccgctatccccctggaggcccgaccgaacgccctcccacctgaaacccaggtagcgcacccttctccccacgtcccagaccaggtcagtgctgccactcttcgtcccccaatttcctctagacccaccagaatgcgggttaatgtccgagagtgcccttcgggcggccctccacgtgcaatccggacctagctttcggccggcactcgccacagaatcgttccacgcaggcgcacgggtagcgctagcctcgcggccccgcctcttcctgttgcgcctagtcggccgccgcacccggaacttacgctcgccctgggaacgccagcggagccggcggcggcgagtagggggcaattcgaaggagacgcgcagcttacacccgcggcgggtggagggagcaatgtgacgaaaccattgagcttgaccgaccttccctcatggagttggcttttagcctcacggccggtttctgttgggtgaaagccgcaccttctcctcgaaccagggcccgacattggagccctctccctcgcatccactgccctagtccagcgtcaagatcacggaattccaggctgggcgcagtggctcacgcctgtaatcccagcactttgggaggctgaggtgggtggatcacttgaggtcaggagttcgagaccagcctggccaatatggtgaaaccctgcttctactaaaaatacaaaattagccgggcgtggtggcgggcgcctataatcccagctactcgagaggctgaggcagaattgcttgagcccgggaggcggaggttgcagtaagccgagatcgtgccacttaagcctcaccaagagcgaaactccacctcaaaaaaaaaaaacaaaaaaaccagccgggctcggtggctcacgcctgtaatcccagcactttgggaggtcgaggcgggcggatcacgaggtcaagaaatccgagaccatcttggccaaccttgtctctattaaaaatacaaaaattagttgggcatggtggctggcgcacgcgtgtagtcccagctactcgggaggctgaggcaggagaatcgcttgaacccgggagggggaggttgcagtgagctgagatcgcgccactgtactccagcctggcaacaaagcgagactccatctcaaaacaaacaaacaaaaaaaaccgtggaattccatgccacttacctcctcctctttgccccttttttaaaaatctttttatagagacgggttgtagggggtggcgtctcactatattgccagggctggtctagaactcctgggcttaagcgatcctcctgcccccacctttgtgctgagattacaggctgtgagccaccgtgccccgccctcccagcaccttccttgatgctgacccctgctcagcccctcaattaaggtgctgcactgcacctcattcgcagggggcctcttcgccggaactcgctttcaggtgggtctacaattagttgggaaacaacgggttgcaaggctgacctggtctgggacatgagaaggggtgaactacaagggtttcaaggttggaggacgttaggtcgggcctccgggggtgtgggattgaggctgtgttcttccacaaattgcatcccaattttgcacaacttagcaagaaaacccccctcagccttcctagaaactaacattaaggtagtggttaggtgttaaaaccgttccatgtacttcactggtttaacttgacaaccgtatgaggtatacatgagatatctgcatcccaccaaagttaaacaacttgctcaaggtcacagagccattaagcggcggtgcccgcagttttgcagcctctcattttccacaggtggaagtcaacgttggcaaggcacatactgcacccacacacagaacccagttactcagtggggtatcaggacaccacgtagcccttaattttcaactatacaggtgccaggctcctgccgcacacactcatccacctgcacctacacccacactgaaccagagcactaaaatacaaggaaacttttattttcaattttcatcaagaaatttgctgtggttttttatgcttttggttttttcctttttttttttttccactttatttcatttagccgctcagtggctagagccgctgggttcctggtattaaaaagatgccaacagaggtagctgtgtctcgcccaggggcccagcccactctgaataccccccaaaaaggagaaaagaaaacacaaaataaaccaacaaaataaaacc

SEQ ID NO: 916560 - DNA, 4001 bp, Homo sapiens
cctactggtggggaaaccctagacctgcgtgcgagtctcccagatccggtcccagagcattacaataatggttttatatatatatatatatatatatatatatatatatatatatatatatatatatatatatcagcaacacttcctgcgttatgaacgcttaccctgacttcatattcacatttatgattttttaaggtcctcatgacagccccacgaaaaaggtagtttctccattttacagatgagaaactgaggctgggaaagatgaagagacttaccgaaggtcacgcaacaagtaaagggtcgatctaggaccagaacccaggggagtcactggaaaggttcctgccctcctcggctgccttctccgtgagagcctctcctctctagatgtctaccccagacagcctgatgcggagcttggagagccatgagctctctggtcacagtgccctgggggtgggggcgagcgtctggcgtcctctggggcgcagtcccgagagagccccttccgggacctcggacgcaaggcccctgagtggccctggaagttggatcccccggggaccctgctccgaaccctggccacctggaagcaacctcatcgagcgctccttccactgcccagccccgaaccgtggcggaacgcgcccctcggcctccctagagcctcctttgcgggagaagcacaactttcccaggttttggagacggcgctcttacaccccaatctcgcccagacggaagaagtgagaggtgcgggcggccccgccatgaccgcgggaggagagcgcaaggaggctcctcgcaaagttggaggccaggccggagcgatgttccgggagcggagccctcccagcctcgggcccccagccgcggacagctggcagtgccaaagactccgccattacctgcggctcgcagttgcgattcggccgcagagtcgggcaccgaggaaggcgtaaagttgagcttgggcaggtacaacggtccccagggactggcatcccccagcccgggctgcccgcgggagggtagcgagctgtgccaagggctccgccattaccgccagcgcacagctcggagccaagcgcgcggctgaggaacgactagggtcttgcaaagttggagcctgggcgcgtagacccccggaccggagcccccggcctgaggccgcccgctaggaggaaaatgaggccgcccgaaccaagttgggacgcgcagcaaagcccgagccttccgcgcacaccaggggctcgggcgggagcggggagccctggggacggagaaggggcgcgggacgcctggatcaggaactcacctgacgccgagccgggcagcgccgaggctgcctcttcgcgctgcgcacccgcccgcccgcctcgtactcctcctcttcctcccgggcgcccgcggccgccgcgctccgggttctgaatcctccgagtccgccgccccgcgcggctggagggcgccggttgcacccactcgcctcctggtaggagccgcgcgcgtccctccccttcccctccgctttgtgcctccaagatccctccccaccccctctcccctagcccccactcctcccttctcttcttccctccccttgcgtcccctccctcagcctcagcgaacccaagttcgggacggaggctgcgggcttccccggcgcagtgctgggcgccccgcgcgcgcccctggctcaccccgtccgctcggccgctgctcgctgcccggccgcccctcggaggagccgcggcgctaagtagctcctcacccagcggctggaaacgcggcataaatatgtagggactgagccgtgagctcagcgagggtcgtgagggggaatttatttcttaatgtccctcctttatcctatcatcactgaaacgaattagcagtgacgtccaacccgactggtttatgggtgtggggagggagacgtcgcaaccctcattaaaagagccgctctgggctccaaagcatacatcttttatataacctaatttccatttttttttttctatcaggaaacacacacacacacacacacacacacatacacacacacacacacacacacacacacacacaatgacaatttctgggagcctggatagggctgaatgtagtagccacgcagggcagggcaggtctatttgggcagagaaggccccatgggaggcagggatggttatttctgcctctacatcagtgttgggatagcattccttaatgggacagtggaacacacagcctcccaggctgggcagtgctgggagcccctcccaggagcccgcagaggttgcagcctgggttctggccttggctctcgggtggacagacggagaaaagcagcctgttcaggaaatgttgcctggttctggtcttttctggagccacactcaggcctggcatctggggagagtgaaggatggagggcacatgttcatctgtggcctgggagccccacaggtgtggagaggccaaggtctgggctggaggagggaagacacagagaacgcagcttcccttcctttcttaggggccctaacatatgggtaaccatataaacccgactcaaaatctgtcttttcctgggcagattgcaaaggattttgcatctccccgttgctgttgctgctgctcacacagtcttgggaaaacgggggaaaatcaaggaaagagaggacacacacacgcgcacgcgcacacgcgcacatacacacacacaaacacacacacacacacacttggcacctggctctgggtgatttgatcttttcctcctccccagccttgccaagcggagcaaacccactcaggcttcgagttgcgcagagaagaggcaaagaggaaaaccaccaccccctttgtcactaataaatgcttttcagatcgtcttgcacatccagcaggggagggggtgtgtgactttgggggcaggaagaagggtgtgggggatgaggaggggaggaaggaataaagaataagctgacgagggtgcctggaggtctatgctgtcttccacatgctggaaggaggcctggagaaatgccaccagccccagggctctgccacttcctggctgccacaagggcaagtttcagagcctgtttcctgagccatggatgggcctggggatgtcgtgaggatatacacaatgagatgatgctggtgaagcccttgacatggtgctagacatatagtaaatgctcaggaaacagttgccaacaataatggtgattttgatgatgatgagaataatccagcatacaggctggatggggggtgggtcccagaaaattgaggctggagctgagtccttgcagtctggtcccctcctgttttgggtccagcgtcccttgcccgaaccatttcaaagttgagcgctgggtttcagtggtgtcattctcagaacactgctccctcaattaccatggcaactggggaaaatcaggaagctaggggaagggaagctgctcttccactgggctggcggttcacctgctcaaaacagagtccacgtctgcctatgtgtgggtcaaggccaaaagaagctcagagtaggggcacttcctctctgggagcacaagcttttttgaaattggggagaagggtggttgggaggggatgcacggccacgagatggtggagatagtggggtcgggccaaggctggctgtgcctgcagaaggcagagttggcttgggtttggggagagggggacagaaaccccactcccctcagttctctcctcacttccaggtgccctggtgcgattaaaagcaaagccttagaatgtagctcttgagacagagatctgggaagacagagcctcagagcccacgggtggagccagggaccatgaggtgccctctgtgtgtgtgtgtagatgagagacgaagacagacagacagacacacacacacacacacaaacagagagagtcagagaagagagagaggcagagagatttatagacaaagagagagacag

SEQ ID NO: 916561 - DNA, 4001 bp, Homo sapiens
ctgttatttttatcctgacatcattaccgtaaggctgatttagaaggcttcctggtgagcatgctaggttgtctccaagaggcagagcattttactggtttgccttcattcagacccaggctggctggggctggctacacccttttggttttcagcaaggccagcagtagcaggccagttggtgtcatcctggtgaccttggatcccctaaagattgggaaagaaacggcccgcaagcctgtcccccacctttctcataatttagagctctctagagaagctggggggtgctgtcatttacctggaaatagggaaaatcttctcaacagattttgacattttgaaagcagctagcaagccctgcgtccccaggggtgagaaaatgccttgatcctcaggtggctgagcttggggagtgggatttcgatataacagtgatctctctatctgatcacctttaccagctagaggctggagggaggggcaagggcaatgggaaggatggaaaagaggagagaaccccaaatgaaaacaccacttcccaggtccggccccgtccccactcgaacctcgtactaagggtttgactgatgcttaattggtatctgaaaatagatgttccatccccaaacagggcacagttctaccccttctctcttaggaaggcaaaccagacaggcaagggaaacgatgcttaataagaaaggaaggcaagaagggcttgatttgaatcctgagtttgtgcagggaggatggcccaacagcaggtcctcatgttgtttatctggggtagctttttacttaagacgattattataacagcctttaggatgatgtcaaaactcaacatgtgttcacgcctgtaattccagcactttgggaggctgaggcgggtggatcacaaggtcaggagattgagaccatcctggctaactcagtgaaaccccgtctctgccaaaaatacaaaaaattagccgggcgtggcggcgtgcgcctgtagtcccagctgctggggaggctgaggcaggagaatggcgtgaacctgggaggtggagcttgcagtgagccgagatcaggccactgcactccagcctgggcgacagagcgagactccatctcaaaaaaaaaaccacaaaaacacaacatgtgtctcaggtggtgttagcaccaaaggcaacctcagagaactaataatgatccttagcgaaaaaaataaaaagcaacatatcagccacaaccattcccttgcctataatgcctttttccattttcttttaggcaaacttctacctgagcttcaaaacccagaccaggtgtcacttcttggggtaaaccttccctggtatctacttgctgaggtaattatgttcccaaagcattttgtgctcctctttatttcagcactaattgaatcttatgtgagtctctccccacacacatccgtgagggtctcaagggcagggaagcctgtgtttgctcagctttgcttctaccccagaactacgcacacggcaggttatcaagtgaatggtgacagatgaactgatttgttctatctactatcccaggccagatgcaatttgcaagggggtggtgaagatgagggtcacaaagtcatacacacaacgcactctgtgactggggactcgtctcactggccccacccacagtgacccagactgttggcaagagaaatgactgctagataaagattaatgcctcagcctcctgagatggacttaaaagaagatgcctctagggctgattttctttgaatctagacaaacaagagcatcgaagagggtggggatcccttctgggattcccaaggggtcagacctcactatttcctccaggaacttatagtctcctgtgttaggaagttcttcctcatgtctaacctgcattcgtcctgcttcaattgcattctattgccttttgcccagtccttggcagttgctttgctgccctgcccagccatttctcaacccccacctatcccttcctgactcaggattgcaggtagtggctgggttcctctttgtgacattaacaatgctaggccccctgtggatgcttaaacaagccataaatgtgggttacaactggaaggatagaagctgattccggctgggagcggtggctcacgcctgtaatctcagcactttgggaggccgaggcgggtggatcacaaggtcaggagatcgagaccatccttgctaacacggtgaaaccccgtctctactaaaaatacaaaaaaaattagccggacgtggtggtgggcgcctgtagtcccagctactcgggaggctgaggcagaagaatggcgtgaacctgggaggcggagcttgcagtgagcggagatcgcgtcattgcactcttgcctgggcgactgagtgagactccatctcaaaaaaaaaaaaaaagaagctgattccaggagctccaggtacagtggctttgagcaggtagaggcgaggttaggagatcatctttcaggatggaaaaaagaacattgtgttttctattaatttgctcaccctgggaagcatttctgaagcctgtgcctatggagatgtctagcaggcggtaatagggctgtttcctttgcgctggagctgggactcaaatatatctgagcgctagggtctctgcctcctgacagctctatttctgagaggcatttggaaaattgaatctcagacaacagagccaggatgatttcgcaggcccgtgacttttttttttttttttcctgaggcggagtctcactctcttgcctaggctggagtgcagtggtgcagtctcggctcactgaaacctccaactcccaggctcaagcaattcttgtgcctcagcctcccgagtagctaggagtacaggtgtgtgcctcacgcctgggctcattctcgtatttttagtagagacggagtttcaccatgttggccacactggtttcgaactcccgacctcaggtgatctgcccacctcagcctcccaaagtgctgggattacagtcgagaaccaccttgcctggcctggcccgtggttttaaatctttttgggtcaaatcctacattaaggatttgatggtgggcaaagacgaacgtaaatcccaagctctgctggtctatcagtcatgctcccaggaactctctaggctaaaactgctcggcacacttacttcaccttggaagattcagtcttaccccctttctccagcaccctcaaagtccttcccttctccaagcaaacggaatttctatattagcagaggccttaaggcaagctctccatatatcttcctgtcctttcattgtcacatcctgcaaaggctagcggtccttcttccagcgctgagtttgtagggagaatggcccaacagcaggtaggtcctcatgttatttatctagggtagcttttcacttaagatgatgattacgataacagcctttgatgatgtcaaaactcagcaagtgtctcaggtgttgtgagcaccaaagacaacctcagagaactaataatgatcctcagcaagaaaaaaaagcaatgttatccgccacaaccactcctttttttttttttcagatggagtctcgctctgtcgcccaggctggagtgcagtggtgtgatctgagctcactgcaacctccacctcccaggttcaagcaattctcccacctcagcctcctgagtagctgagattacaggtgcctaccatcatgcccggctaatttttgtatttttagtagagatggagtttcgccatgttggccaggctggtctcaaactcctgacctcaggggatcttcccaccctggcctcccaaagtgctgggattacaggcgtgagccaccgcgcctggccccgcattccttttactataatgcctgtttcctttttgttttaggcaaacacttatctgatcttcaaaaccctgaggtcctgttctcaatgttgagctccactcctcaggcttgaagaccaaagttatgctttgc

SEQ ID NO: 916562 - DNA, 4001 bp, Homo sapiens
agtgcagtggcactaacagggctcactgtagcctcaacttccctggctcaagcgatactcccgcctcaacctcccaagtagctgggactacaggtgcacgccaccaggcccagttaatagtttatactctcttttttgtagagacggggttttgctatgttgcccaggctggtcttaaattcctaggctcaagcgatccacctgccttggcttcctagagtgctgggattacaggtgtgagccactgtgcccagccaaaaaaatctttcttaaaacatgaacctcttggtccatctctacctgccacttataaaaatgacatgggcccaggtgcagtgactcatacctgtaatccgagcactttgggaggctgaggcaggtggatcacctgaggccaggagttcgagaccagcctggccaagatggtgaaaccccatctccaaaaaatgtaaaaattacccgagtgtggtggcacacacctgtaattccagctactcaggaggctgaggggggaggattgcttgaacccaggaggcggaggttgcagtgagcagagacagcaccagagactctgtctcacaataaataataataataataataataatagagacatgggtacaaaaggatttaactttcctcctagtataagaaatcaaaagcactaatgctattataaatgacaatggacactggccttaataagagggagacaatagggagtggtgaggtttgtggccaactagaaagccacatcctgtctagagggggcagctgctattcagtctatgcagattgttgccccataagaatatggttggctgcagtgactcacacctataatcccagcactttgggaggctgagaagggaggattgcttgaactaggagttcgagaccagcctgggcaacatagcaagatcccgtttctacaaaaaaatataaaaagttagccaggtctagtggcaccagcctgtagtcctagttactcgggatgctgcagtgggaggatctcttaagtctaggagattgaggttgcagtgagtaagctatgatggtgccactgtaccttggcctggatggtgccactgtaccttggactggaagacagagcaagacctgtctctaaaaaacaacaaacaaacaaaaaaaaaacagcgtataggcgcaatgtggtcagattatataatttttttttttttttgagacagagtcttgctctgtcgcccaggctggagtgcagtagcatgatcttggctgactgcaacctctgcctcctgggttcaagcgattctcctgcctcagcctcctgagtagctgggattacaggcacccgccaccatgcccagctaatttttgtatttttagtagagacggagtttcaccatgttggtcaggctggtcttgaactcttgacctcgtgatttgcctccctcggcctcccaaagtgctgggattacaggtgtgagccaccgtgcctggccatagattatgtaaattttaaagagaagctgtagatatatttatgtaaaaatttgaaacattggcaatacatttaaaacataactataaattatctcttaatacaatacggggtagacctaacaaatcaggtctgcaggctagatctggcccgaggctgcctcttgctgtctttctttctcttgtgagggctcatatgatggccatacctctttgttttgaattaagaaagaaaatatagaagagctttaaaccatatttgttcatttaatcatgaatggagaatagtttcctaatgcttcagtgtggtcttgacttttgaggacaacataataaaagtctacagttgtgcttttccaccaaacatttccagatatcactgctagagggacattcagctagtgggaccatgggtctgacctaccacagaatccctgatgtccttatcttcctggccagccatcagcggctaaggaaagcagttaccaccaaggctctagaatgtctcatcctccccgctgaagctgtgtagagaactttgaggccttgtttaggtgcgctggcagtgaaagctgccatctgtaggccaagcatcaggaaaatgaagccggtcatcacttgctgagtcacctaggccacccccatgtttcgacctcccaccggtcacgccaacttcactgcaatgcagaggatgggtttgaaattcacacgattccctagggttgccctggcctggcccatcagcttactggacaggtaagacaaaggtgctgctgatctccagccaaacctagccactctttggaaatgatattgacttagctgtcaaaacacatctgaacagattggcagagactaaaaagttggataacagatggagttggcgaggctgtgaagaaacagtctcctagttagccggtaagattgatccaaccactatggcaagtaccacaaaaatcacaaatgtacgtgaattttggcccaacaatcccacttctaggaatttattctattttgtttttttgagacagggtctcgctctgttgcccaggctagagtgcagtggtgcagtaatacaatcacagctcactgcagccttgaccttccaggctcaggtgattctcccacctcggtctccagggtggctgggacaacgggcatgtgccaccatacccagctaatttttgttattttttttagagatagggttttgccatgttgcccaggctggtctcaaattcctgggctcaagtgatcctcctgcctcggccttccaaagtgttggattacaggcgtgagccgccatgcctggcctttaggaacttattctattgataagcctgcccatgtgccaaataaggtatgggcacaaggtcactcattacggcactgtcatagcaaaatattgacagtggctcattatgaaggactgatacaataaattacaggatgatcacagaatgaaatattatatggctataaaaaaggaaccaagatcctctttacccactaatggggactaatctataagatatgttaataagtgaaaaagcaagatataaaacaacatgtgtaatgtgctcttacttgtgtaaaaatattcaaaattaatgtgtgtgtttgtcaatgcataaaacacggctaaaagaacacacaaaaaccattaatattgcttgattctggggaggaaaactatgtgactaggattaggaacagatagagcttttcatcatgtatctttttgcttatttatttcaatatttttttagagacagggtctcactctgtcactcaggctagagtgcagaggtgctatatcacagctcactgcagccttgaactcctgtcctcaagtgatcctcctgcctcagtcgcctgagtagctaggaactacaggtatatgccattatgctccactaattaaaaaaaaattttttttttaaaagagatagggtctcgctatgtagcccaggctggttgtcttttttttcgagatggagtcttgcactgtcacccaggctggagtgcagtggtgcaatctcggctcactgcaagttccgcctcccaggttcacaccattctcctgcctcagcctcctgagtagctgggactacaggcgcccgccaccatgccaggctaatttttgtattttttgtagagatggggtttcaccatgttggtcaggctggtcttgaactctggacctcaagctatcctccgccttggcctcccaaaatgctggggttacaggcatgaggcactatgaccagctaccatgtatcttttatatcttttaaatttggaatcatgtgaatgcctttcccagaagaaacagaattaaaatgtgaaaaacggcatctcacaaacaataccaaaccacacaaaaacaaagtcgagatccacatccgaggataagcactcctgacctcggcctcccaagctctccagccacggcggctgatttccatcatgacacagtttaggatttagcttccctcccctcagcttcccacctggga

SEQ ID NO: 916563 - DNA, 4001 bp, Homo sapiens
atcttgacagggtgtgggctcccgcctggatggtcttcgaaaccggggcccaggttgcacctgggattctctacgaaattcagtaggagagaagatcctgtccctccgcagttgctccctgggctccctgggtgccctgggccctgcctgctgccgtgtcctcagtgagctctctgaggagcaggcctttcacgtcagctacctggatattggtatggctagctggggagcgagccaggggatggtgggggctggaccggagcaagtagaagggggtgatgataacgtgaacgcacccctccccagggctacctcccccaacattgcctccctcctctctcttgctctccagaggagctgagcctgagtggactctgccagtgcctggtggaactgtccacccagccggccactgtgtgtcatggctctgcaaccaccagggaggcagcccgtggtgaggctgcccgccgtgccctgcagtacctcaagatcatggcaggcagcaagtgaagccccagctggactcatggatgtgcaccctttgctccctgctctttctgcctctgggctcatgtatctgcgcagctctggtaccctctgtgggtgccatctctacctctgacacagactgcctgccttgaagctgagaaggcacagggcaaggagccaaggaccacagagcctcagccagcccaggatccgtcctcattttattggtgatgatgaatgggaatgaaatcagggggctgtctactagagcctggaataaatatgctgctttgtggatttttaagcccttctcttctgtttccttgagcagtgtggatagcagaggaggtcaccacattacttttgtgtgccttccctgagctcctgttccagccattctcctgttttcctttctggtgggaggaggctgggcacagtggcctcgtggaatgttgtcggctgccttgctggagggctgggtttggtggaggggaagggcagtggttcttgcccttgggcttccacccagccctgtaaagtctcacacagacacacatggattcagaagccagacaattttatttggggggcaaacattgacacttttgggtgtggaccttgcatgcagacatatcaagggatgacatgtcacttcttcccaaagcgttgaggggcagccaggctccagaactgggaattcagcccctctccagcccggggactcagccattcattcctccaggatccctgggtatttctgccaaaccttaggaaagatttgtcctcaggtccccgcagtctcccttctctagcccccttccttctcctcttcctctgcctcctgccctttccacccccagcccctgccatgcttgtgtccctttcagactcacctctggggctgaaacaggaaggcttggctccggccaggtctctccattgcctggagcaggtagtgcaacagtgacccagaggtctgggcatcctgtggtgggaggggttcgctgtcttcctcctgtgccaagggggtatcagggaaggaagatgggcaaataccctggacacgtaagtcacaaggggaagggactggcttccaggggcaagtggtaggaggctgcggaaccatttcctcagatgtgaggacctaatgacaaccttggcagccagagaaagtatcagaacctagagcacaagtctcaaccgaagtagaggcaatggtgatatggggatgggacacacactcaccgcggagagctggtcttcctgctggcctcctggcccttcagcacagcccccgtctattaacagcagcagcaccagcagtgcagcagcctgcctagaatccatgctgccacctaccctcctacagccaccccaacctcttatacctgctgttcccccacccccagcctcacagtagccttaggggaatctagagcaggcaaatggaaatgcagggctcattaggagccacctgggatctcctcccatggcgcccccaggacttcatgctctcagcctcctgcccccggcccctaagcctggagttacagactttattagatgcataaatcctgtctccagagctcaagaagcatcattagttgcagacgctttgtcagagccaggccctggggagccttagacgaacccctaatccctcaacaggttggagagcttgtttatcacttcccctctttcctaacctgtagactaaagcacaagaaactcatgtcaggaggggttaagtaggatgtcctggagtggaagaggagtgggaagagccagggtcagagtctgtgaggatgaccaggcctggtcctctgtgcctggggctggcagtcagggcaacacagcccatcctctgcttgtgtgcctcttggaggctactcagatttgcctgtggatagaaaaaatatattcaacttcatgatgatggagagaatttaactttttttctttttgagatggagtttcgctctttttgcccaggctggagtgcagtggcgcgatctcggctcactgcaacctctggctcctgggttcaagtgattctcctgcctcagcctcccaagtagctgggactacaggcgtcaaccaccatgcccagcctgtatcttttttttttttaattaaaaaccattttttttttggccgggtgcagtgcctcacacctgtaaccccagcactttgggagaccaaggcgggtggatcacctgagggcaggagttcgagaccagcctggccaacatggtgaaaccctgtctactaaaaatacgaaaattagctgggcgtggtggtaggcacctgtaatcccagctactcaggaggctgaggcaggagaatcgcttgaatcggggaggcagaggttgcagtgagctgagatggcaccactacactccagccttggcaaaaagagaaactctgtctcaaaaaaaaaaaattattaagatatagagggaggctacaggattttggagcccactgaatgagtgtggcttccaatctttgcagacagacccccatcctcactagagagcactgcttccgacctgcctcatcgcccttcctatagtcactctccacagctgaagcactgctgccaccctgtggtcacagctcctcattgccagctccggccatttccttttcctagaatagacctctgcagaggaagtgaggagggtgaggctgagtggaggtgctagggtccagtctccagggagtcccagaaggacaggagcaggctactgtggggctggactatcattctgaccccgactctggtctccacagcctctgcctggccctggctctcatatagagtagcctagaatcctgtcttaagaaaaatcagaatcactaatcctcagggagaggccttcaaagccatatggtgcaggttccttctaatcctcgagtcccttttggagcatccccaccagtgtgggtctctagcttgtgctgaggaagagccatgacgtaaaggccttggcctctgcttgagcaagctgtctcccgctctgagcttcagtttcctcacctgaaacatgggcccattttacaaggaacgccttcctagggtgtgcattacttaacatactttttgtaatccattcaataaaacagcttgcatagaacaggtatcctcaaaacgttagctgtgattgcctcatgtgccccagtcggggaacttaccatctcctcagacagtcttcggacatatttatccttgtgccgagggggctttgggcttcctgtgacttctactcggggtcttagtttgctccattaagtctcaacagaacatctcatctctttcatgtgtaaaagctcttcatatttttgaagagagagttcattcttacactccagcttttttttttttttttttacgatggagtctggctctgtcacccaggctggagtgcagtggtgcgatctcggctcaccgcaacccctctgcctcccgggttcaggcgattctcctgcctcagcctcccaagtagctg

SEQ ID NO: 916564 - DNA, 4001 bp, Homo sapiens
acagagcgagactttgtctcaaaaaaataataataaaaagtaaagaaaaactcccatacagggtttttgtgagaaggaaacaggcgaatgaagtaaaggctaggacatgttagtagacattgtagaaaagttagctccatcacacactcatacatacacacatttcttttcttttccttgcagagtacaaaggcctcacaaccaatggatattccattgcaattggcccaatcttgaagaggtggaaacaagaggaaggacaaggattccatgactttccctctccagctgtgaggagagggcagaggtacgtggtgggaaattgctgcaaatcttgaggaagggtctcaggacaagagagctttgtccctggccagtactttatcagttaaccaggagttgcatcagtatttgttgcaacatcctcagaaaacagaaaagtccacggtacaaatggcacagatccataatttggaggactgggggtaggaacgtaacacaaagataaaagtgtctatcattttataaaatcacagctagaaacaaaatggtagctccctgaacatcttttcctctcttctcccttcctttttttaggaacagaaaaaaaaatttagatagatagatagatagatagatagatagataggtaaaccactttactgaggtgtgactgacatataaaagctttacatattccatgtatacactttgatgagtctggggataggcatacactcattaaatcatcaccacaatctataccataaacctatccatcacctccaaaagtttcttcctgccttcttatttatcactaatattatttctaagggttcctacccctcttgtcaatactcctgaagtgattctaagacagcaccagaaacagcatcagatttctttatagctcaaagctcaggtgtgagtttcttagaggaagaattcaaggtgagtcacttgtcattccctcctgcccctcccttctgaataaaaacccaattaaaagaagtaagtcaggctccacagttgccccattcactctgtcaataaggagacaaagaggtatcttatctataaatttagtccttggacaattttattactaaagttcttcgtcatactcacatttctatcttttaaaaatatttccatctgatatttcctgtcatattaatattcaaaatggaaagcaatagaagagtttacaactgaagtcaagaaagaagactttttccacctactcttcttctagggaaaaatttcatttcaattaagcataggttaaatgtcttattcttagttcccaagtcatctgacattagcaatactcccaaactcacatcaagatttgataaatcaccaaaatatagcacactatacaagtcaaattgtttatggaatcagaacggagacatttctgaaatgcactatctccagtgatttactcaggtgaccacaatgttaaaagagtatttctaaataagttttcaataggtaagcaactgttaagactcattaacttttgcttctgcttctttttgttttttagtttctctcttttttaattttcaggactttacatcaaactctactaacttagaattcatttattgacatacattacagatgtcaaagagaaacttttaagtgactattttttctctgttgctgtgagatacacaacccactcccaaaggaattaggtacttacttggattgttttgggtcagagatggactttcaaggccctgggaggattctggactgagtcttcctctccagatcccagcgattttgctacaaatgctcagaatccaatttcgcattaggataagtcggggagacaatgaggtgaggaggaggagagagttccagtgtactgtgcatgatcacaggcggccttctgggctagcagcagcatctcttccttggctctgtgcctcatggacacagattagtcattaacaatccttccctgctaaatgatataaacatagaaaggaaccttgggagagcctcgagattcccaagacaaaaccgcaaagccccagaatgaggaatgtgacaaaaccaaggagccctgcagcttgcctttgaaagcatttctcctctggccgttttgtgggctcctgggcacccgtatttctgtacacatcaactaaaaccaaactgtcatcttccctctctctcactacaacttctttgaatagctctatcacttccccgggactgaactagaagctgggagcctttttgacccttccctctgcccagccacccatatcaaataataacagatttgggttgattgcatctttggaatgtctcttatttccaacccacattgttcttctcctactttgggcctatcatagcttcctttctggatgacattggtcccacaacccctttttcttctctccccttcttctgttttccaaattgcacagcagtgtggaagcacaggctctggttagatgcccactctttagtcacagccttgagcaagacacttagcctctctgagtctcagtttcctcatctgtagaatggatatggagaaaccatctcatgggctgtggtgagaattacatgagtagtgaaaatgtttagaaaagtgtgtggcagatagcaatcacccaataatttgtggcaattattatttctctccttcattagttgaaccatcattgattgattatcagcctactatgtacccagcaacttgctaggcactcccctcatcgaaaatccccaatgcactctctatgcctaaaaaacgaacacaaaatgcttgacatttagaaccccttccacacctgaagatctagccctaatgtctctaggattttctcacattctgtcccttcagacatcccaacctctgccaacctgtaccaagctctcccgcctccacacttttgcacaagctcttccttctacctcagttactttcttttcacacccacacatcttccaggcgtggaacagaagcagagttctccctgaagccagccccattcctcatctgcccctattctccccacccaactcccttgatcttttatttgtagtttccttgctgtcccttaaatcctctgaccttatatattatagttttctacttgttttatctcttttacaaaaaccaggcatggtagcagacttgtctttgtatctaccctttgtcttagcacagtgcctctcacagaaaaagcattgtgtaactctttgttaacgcaatcaatgagtgagctgagaaacaacttcccaaagcagcatggctgcacatgcacctgtgtgtgtgtgtgtgtgtgtgtgtgtatgtgatgtgtgcatttcccatctgtgatgtgtgtcatttgtttcccgtcacaaggtcagctagtagaagatctacattcaaacctgttagaaatgttatattttgcttctcttataaaatagcatttttgtaggtcctacaggctcctacttcctacctacttctgggggttcccaatgtactatggtgcatcctccagccccttcggcacaaggaagagggtcaccccaggcctgtacattttcttttgaagagagtttgcactgacacttactgcactctgcagctctgggctgcctgagggactcctgtgtgacttctatgtgacaccaagcccatttcttcttggatgataagagcctgtactgtgatttcattctctccagcagagatggagacaatgactgaagacacagactgtggcgctggaccggctgggttcaaatcccagctctgccacttacaagctgtgtgaccttagaccttaggcttttccttaacatctgtctcagtttccccatctgtaaaataaagatataattactatgtatttcatgaggttattgcaaggatttaatgaattaatctatgcaaagcgctggtacctgacacacagaaagtgctgtgtaggggttagctgttattattttctctgggccttcacactgacaat

SEQ ID NO: 916565 - DNA, 4001 bp, Homo sapiens
gttgaatagccacatgtggcatattagccagtgcagctctaaggagtttgggaccagaaccactgtacccccaaatgggaaatcaggtttgcataaaaacaatggcactcccccataatctcacagtgagtttctgatgctcctaagaaagggtccagtttatatccagtttttcattcctggcacaatgctgaccatagtaaatgtttaatgaatgtctgttgaattgcagtgcctagaaaagtcactttttttttttgccttcctttatttcttaatccatggtttcttcactaaatggcagggctttactgcaaagttgtttgctgttcctggcatcaggcctttgtgatgtcagtgcctctccctgccttgtcagctgatcacctacttctggtcacctactctgggaggtctgccccagttcccccaggtggaattcacctctcctacctctgtacacacttctattatggcacttattggaagcacatacaatcatttcttttgtttacaggcttatcttccacgctgaacttgagatggtatgagatactacctaagagtgccctctgagcagacaaatctggattcatttcacccacaacttgttaggtatatgaacctgggaaagacatggaacttctttaagcttctgttccttcctttacaaagctgaaagaatgtagtgcctgcatgagaggctgtaataaagatgaactaagacaaagaatggaaactgcatagtgcctgacaccacatacacatgtatacttttgtgattgttgtgattagtctgtgaactctttgagggaaaatattagactatattcttttctttatattcctggcatctaactcaatggctgacacatagtaaatgtttattaaatgttggttaaattgaagtaaatagaaaatttgcttccccggccttccaactcatttccatttctaaatacagtgtcggtcacttttaaacatcgcatttaaacaaaatggtatgctaccaagtctatgaccaaaaacatgttcacaattatcattattataaaaatgactcgagttttttcttgctggaaatttaaaagatgaatttctgttttaaaaaatattaaaatatgatttacattatactgtgttttaattataatcgatgttttaattcagagaaaaccaagagcctgggcctaaagctcaactctgtgcttatctgatttttcatggactattgggagaaacctgctgtgaaactacttcattaattcgtgtttcccaaactcttttcatttttttttttaccacaacctacggttttagatacattttatctcatatccctcgtacatacttatacacatgtaactgaaacaaaatttcatgaaataccacttgtctttactccttgagggacactaatatttctattctattatattctaatccagtttttaatgctggtcacgagacactaaataaattttgtgatcccctgggaactgagacttgccattttaggagcactgcattaaataatgtctgttaaaatgttttttcaagtgtccattgatattaatattagaattgtctaatgtttggtttggaagaatagtgataatttgacataagagtctatgaagaatattaggggaaacatccttggatttcatccccataagatattcgtctgtttagaaccctataaaaatcaccccaacccaaactctcattccagtcttctgggtctgactgagccactatctttgacagacatctgttactgtcatctccaaccaaagtccccagatttcctcagtccagttgcaagagctcgacctgaaagcacctgtgaacagtgtcctacctttcgcgggcttcatactcatcatttccatgaaaaatcctgacggcgtacagctgcagtgaggactaatttgaattggattttctaacccctgaaactgcattaccattcttagcttattcacagccactgaaaatgagactaggtaaggagtgagagaggacagaggttgtgtggtttactgattaacttcattacggagcagaatatttgtaaatgtttatgaggaaagttcttaatgccaaattgcctagtaagctggaaaccagtctcttagataaacattttgggggagtacttttccagtttaagaacttttagagggtgggtttctgttcactggctctaaaactggacttggaggtcaagtgccatgctccgggtcctgacatttgtccccatcaaaaggtggcagaatggtatgatttaaaatggaatggtatgatttaaaatggaagaatttaaagcataatgcttgatatggtttggctgtgtcccaacccaaatctcatcttgaattgtagctcccataatccccacgtgttgtgggacggatcctgtaggagataattgaatcatggggttggtttcccccacactgttctcgtggtagtgagtaagtctcacaagatctgatggttttataaggggtttccccttttgcttggctctcattctgtcttccctaccaccatgtaagacatgcctaccaccatgtaagacaaaatcatctagcacaaagccttttttgtaataaagaactgaatatctcatgcaatttattgaaaactatgctaaaagtgtctatttcacaccattgtaaagtctaaacatagtaggttgaaccattgtaagatgaggatgtatatatgttgaagccttaaaccccagtacctcagaatgtgaccttaattgttgatagggtcattacagagaaaatcaaattaaaatgaagatccaatatgacttgtatccttataaaaactggaaatttggttacagagacagaaacacagagagggaagttgatgtgaacacacagagaggagacggagatggccatctgtgggccaaggagagagccctggagcacatcctccacccacagccttcaggaagagctaaccctgctgacaccttgattttggacttccagcctccagaactatgggataatttctgtggtttaagctacccagtctatgttactttgttacagcagacccagcaaactaatacatccaggctgtcttggcacttattagctctgtggacaatggacaaattcctgaaccattttctgcctttatttccttggttgtaaaatggggttgataactatacaacctcaaagaattatacgtgattattaactaaaatagtatttataaaatgcttagcacaacaggtggctacccatcatcactacattgatgttatgattgctcagctttggactcatgttgtaccttgggttgcttattgaataggaataattctatattttatccttcagcataacttttgtacatcaagcttaagtctattggttgttttttagaaatgagggctttagaaggggactcagttgatccagggtggagcccaggcataatgtagcgagatgcactgtgtaaccttagatgagtctctcagcttctgtgggccccatttgtccacatcaatagatggtaaaacatagataataattcatgccctatttaggcctgttctgaagataaaatgagatagtaaatatgaaagcaattttgaaaggcaaaggtgagctatacaagtggaataatcattgctaagacatttctatagccttcacaagtttccaaagcggttccatatgcattatctcatcagatcttcacttgcacccttggagggaggtattatttctaacttccactatctttaagcctatttttaaactcagtgagtttcagtgatttgtctatagtcatcccattagtaaggaatgaagctgggactttaacccaggtcttctgactcaaaatcccgtggtggaaaaactaaggtacacttgccctaattgccaagaaagaggaaaagagtggtggtctatgggtatatttcagtttgaattgcttgatcggggtcaccatct

SEQ ID NO: 916566 - DNA, 4001 bp, Homo sapiens
tgtctggataacaaaatgaggccccccaccatttctataaaacaaaacaaaaaaacctttcctagaagaaactaacatgccccttgaaaaactaagattagcaacatttcataaaacccacttttttttttttttttgagacggagtttcgctcttcttgcccaggctggagtgcaatggcgcgatctcagctcactgcaacctccgcctcccgggttcaagcaattctcctgcctcggcctccggagttgctgggattacaggtgtgcgccaccacgcccgactaattttgtatttttagtagaaacggggtttctccatgttggtcaggctggtctcgaactcccgacttcagatgatccgcccacctcagcctcccaaagtgctgggattacaggtgtgagccaccgcgcccagccgcgacccacttttaatgatagaaatacacatcgctttttcagatatactaactggacttaaagcaaagtttaaaaacaatcatcggccgggcgcggtggctcacgcctgtaatcccagtactttgggaggccgaggcgggtggatcagaggcgggtacatcacgaggtcagagtatcaagaccatcctggccaacatagtgaaaccccacctctactaaaaatacaaaaaacaaaaacaaaaacaaaaacaaaaaaactagctgggtgtggtggctcgtgtctgtaatcccagctactcgggaggctgagacaggagaatcgcttgaacctggaggcggaggttgcagtgagccgagatcgcgccaccgcactccagcttggcgacagtgagactccctctccctctcaaaaaaaaaaaaaaaaaaagaaaaaaaaatcgagtatcaccaaccacacagcagaaatggttcaaaaaagctcaaaatcgaaggtccatttacaaattctagcggtactaaaccctaaaggccgtaattttaggtctttctgcttttgctttccggttacttttttaaaggctgacctacttactgaagattatgggacaacctggcaacattcgtactgcacaaaaatggtatctgcccgagttggaagaattatttcttaacaaaagagctatctatcggaagcttggacatgccccctgcagtgagaaccctggggccgttccatttcttctgaaaagatccaggcccacaggcagcgacgaccctggccagatttgccgtgagagaaaagtgaaagtggggggagtcattctgtccgtcccgtgaaagcacgggagttagtgacgggatgcaggccgggacttgcggccactagccgagggtcggcctctcccacgtctcactcgtgccggcgttagccgtgcgccctggaagccccggcgctgcgcgcggctctcccgggcggggaaagctgcagcgccgcggaagctttccctgcaggttaaaggtcagaggcgctgcggtaagcgcagctggaaagggggttgtgtgctccaagccgctcgccgtccggccccgcgtcccgccgcccctgtcgcccccgcctctcccggggccccgcgcatttggcgccgcagctccgcgctcccagccgaagtcgagcagccccaagcggcgctcccaaactgaacggctccgctggccgcaggacgccggccgggggatgcgctgggaccgcgtccgttggcggttggggtgaagggcaccccctggcccccgcccccgacgcggtcgctggtgtccccacccagcgtttcttaccggcgcttttgcgccctgctgactccggcgtcgggcgccgacgcgacagtcccgcggctgccactcgtggattggggggcgctccgggaagagaggttgaagaaagccgacgggatgtgggatcgagattcacggcggagagagctttctgtgtttgggtatttctggggggtcagagttcgtgacctctttctcggctcggcggcgcgctatcccgccagcgcctgcgcattagcaacggggagaagcggcgagaggaggtcgtgacgttcccagggtggggtggagggatcggagggccgagcagcggctctgtgagtccactgcccccttttggcttggaggcagagtgccccgccagagctacgcgttcccagccaggtaatttttgaagccacgtgcaaaggtttaagcatcgtttgccaaaggtgggcattaggggaggttttgagtcaacgttttagatttgagtaataaataaccctctgggtcttaggcatatctgtttctaatttctggaaaactgggctctggggtagagtccaatcatatttaaacttttttttttttgtattacactttaagttctagagtacatgtacacaacgtgcaggttcgttacatatgtatacatgtgccatgttggtgtgctgcacccattaactcgtcatttacattagtaagctttatatataatgacaagctgaggccgactcatgcaaatggtaaggcaaagtttcacttataaactgttgtgagtaaagagacataatggctaaacagggcaagaatataatcactagagactgggcacggtagctcacgcctgtaatcccagcaagttgggaggccgaggcggacggatcacttgagcccggttgtttgaggccagcctggccaacatggcgaaaacccgtctctacaaaaaaattagccagtcctggtggcgcgtgcctgtcgtcccaattacttggaggctgaggtgggaggatcacctgagtcaagacggcagtgagccaagatcacaccaccgcactccagcctgggtgacacaatgagtctttctctctctctctatatatacacacacacatatatatgtatattccacatcctctctataatatatatattattatatattgaggattatcctcaatggccgttttttgtctgttttgctcagtgatgtattaccaagcacataggacaatgcctgctattcaataatgatgtatgaaatgaaagccaggcaagtggctgctgggaggccaaggaaagatcacttggggccagcagttggagaccggcttgggcaagataacaaaaccctgcctccacaaaaaaaatttttcaaattgtgaaatgaagagacattggtggaacatcgcattctgacagtggccacctgtagtggcaaggtgtggcaggaataactgccctgtgtgcaaagtactctgcgctttagattttgaagcattcttgaaatttctagtttttttttaaatctcctttgttttgtcatgaaatttctattttatctagcttaggtcggcactgtaggaaagcagccacaaactcagggcagaaatccaaggaaggaaaaacaaacgtttgctgggaatgagaacatctctgttatttctctctggaactaggcagacggacagagatcaaggcatgaaacaatccctaacaagtaaaaatatgctttatccctcattaaaaatccacctctgctgagcacagtggcttctgcccccagagccttgggaggctgaggtaggaggcttgcttgatgccaggagtttgagaccagcctgggcaacatagtgagactccatctcttaaaaaaaaaagaaaaaaaaaaggcatggtggtgcaggcctgtattcctagttactgaggaggctgaggtgggaggattgcttaagcccaggagtctggtccagtgttggcaccattgcattccagcctgggcgagagtgaaacttttttttttttccaacctctaccttttagcattatttgttgtgtatttggtttggttttaagggagacccctgccaataccataagctggtcccaaaggtgaaaattatgaaagtatagtcacgtcagggatatgttctgagaaatgagtccttaggcaatttcattttactctcatcatagagcgtacttatacaaacctagatggtctagcctagacacacctaggctgtatgttgtagtctgttgctcttaagt

SEQ ID NO: 916567 - DNA, 4001 bp, Homo sapiens
tgctcaagggtggaaatataaagtcacagagcaagaacctaaatccaggtttgtctgactctagttttttggttgtttcttttctttttggttttttgttttctttttctttctttcttttcttcttcttctttctttcttgtgacaggatctcactctgtcacccaggctggagtgcagtggccagtggcacaatcacggctcactgcagcctggaactccaggattcaagcgagcctcccatctcagcctctccagtagctgggactacagacactcagatcatttttaaaaattttttgtagagacgaggtcttgctatgttgctcaggttggtcttgaacttctgctcaagagatcctccggccttggcctcccaaagtgttggtgagccacccctctggccgaatctgggctttaaaacataagttaagcacttggagagagagaaaaaaaggcagcacagaacagcacgtagagaagggccacaattgtattaaaatacgtatatgtatattttatattcagaaaaaaggctgaaagcaatccactgcatgtgataatctctggaggtgacttatgttttccttccactgtggggctggggcagggagaaggatggtcgtcacccccgcagaaggcaaaagactgcccttagcgttgataacaaccatacctcacactcacaggctccttcgcggttacaaagggtccttcttcactgctgagcgtttgctcctcaccacagccatttcacaggaaaggaagccaagcctcagagaggccgcgactctccctcagatagcccgtggcacggctggggccaggaccgacctctgcacgttccgagtcctgcaggcgcatttccaggagagaggagagctggcagagaggtccaggggggtccaggagccgggccgggggcgaggtgacgagtgtggccgttcccgagtctgccggcagagggcgccgccgccccgcaagtcggccaggccacgccccctaccaggacccgcccctttgcagcggggagccacagcaccctgtgaggagcggctcggcaggctggggttcgaggccatggggatgagaggacggtggacgggctgggccggggcaggaggaggagcagcaggggaggggctgggccggggcagaaggaggagccgcaggggaggtcaccggcgggccagggtctgcgtgggtgaggggttgagagtgcagaggcgcccgtgtctgcggctgggagcgcgagatggaggcggggtgggggcgggctagtgcgaggggaaggtcccggtgtggcgggcggcggtgcgctacggcgccaggacttcctgaggcggcgggactagctgcctcgggaggcggttactcactccggcgctgccacctgcttccttcccagatcccagcaaagcataaccccgaggccccctctgcgctcccaccccactcgcggcggcggcacgcccaggagggagctcgcctctgcagctcaacccacagcctcgcggccccggggtgggcgagggtggagagggagggcggtgcccggcggactccacccgagccgcaccgccagcccccaaccgccgcagtctagcccaggccttgaaggccagcctgcagcctcttgagcagcgcgtggggctccaacccccagcacctccacctgtcccatctctccaagctgagccccaactctggtctagacgggaacccgtgaaaagcagactccggcagggatcccctgccggctgtgcgccccagccccgcctcctctccattccgctcgcccctgagcactggcgatacccagccagacgacaggggctggacagtgtgttgagccccacccccatctcctccctcgccgccacccatacctacctccaaccaaggcgaggacatagatgtgtcagctaggatccctgccctctaacagctcccagtctgtagggagacggccaccatccataccaaagcttacaccaggaagcagaaagtggttccgggccagtgggaggcacaggtccttagctccccaagaagacacagcctcagggggccgagttcggccagtatttagagtcccaaggatctgtgtgggagggagctcagagatctccagaattatcttcagtcaacatcctttcaataaagactcactaagcacctagggtgctttaaaaataccaacgccccagcccaccctagaactcctggatcagaatctcaagggggccaggagtggtggctcacacctgtaatcccagcactttggaaggccgagttaggagaattgcttgagcccaggagtttgagaccagcctggccaacatggcgaaacctctctctacaaaaaatacaaaaattagcctggggtggtggcctacgcctgcagtcccagctactccaaacgttgaggatcgcttaaacccaggagattgaggctgcggtgagctgtgattataccactgcatccaggttggacgacagagcaagaccctgtttcctgtttctttttttttctttctttctttctttttctttttctttttctttttttgagacagagtctcgctctgttgcccaggctggagtgcagtgtcccaatctctgctcgctgcaacctccacctcccagcttcaagcgattctcctgtctcagcatccccagtagctgggtttacaggcatgtgccaccacgcccagctaatttttatatttttagtagagactgggtttcactgtgttgtccagtctggtcttgaactcctgacctcaagtgatctaccaacctcccaaagtgctgggattacaggcgtgagccaccgcacccagctgaccctgtttcaaaaaccaaaaaaaaaaaaaaaaacagaaaagaattgcaagggggaggggaagggtaaaaagaatggcaagagtaggagtatggccctatctgctgttaaatgtcccccaccctactgactgctgtagctgccagccactggtcttgccttatttgcccagagaccacactcctcagagagagtggctccagccaagccctcaattagagtgagatttggggggctccagaagaagatgctatgtatgctgggacctgggtgggctgtcactctgtgggttgctgagtggaccagatcaactgtgagtcactaaaggctaagtgactctgtaggggagcagctgggaaagagacccagaggcagtatttgcatttttactttttgcataaatttatatgttctccccacaaaggccaactccaagatggatcactgaagcttaggaggtgtccctgaaagcaaaaattcatatgtcttaggcaacctggtggcctcctgctcctgggaggtccccatattgattgcatgcaagacacatctctaaaaataaaaataaattataaataaataataaaaacactcttgcatcttgctgttgaaaagtatgtttcctctccactatcaaccccagtccatgagctttcataccacacagggttctgtgcagagaaggtctgttggttggagtcatttagtcatttagttagatgttctgaactcaactgttcattcattcattcagacgtacctgccttcgatcagtgctggcatgagatggggttcactcccttgggagcccacaatctgggtggtggagtgaggagaggccctgggaccagaagcagtgggagggtgtctgagcacttcagataaatgattgtggggttcaggggaggctccactttgtacaagcgtgcagcaggctgaggaagggctgaagaggtgggctctaaggagggagggaggctgctcccaatggttggctgatgggagagccctgctctgtgcccctctccacctggtatggtcccggctccccaccaggggtcagcacactgctgcactctggctgttttactctcttgaggaactctcttgggtttccgtggcccctccagagccctcagcttcctttctgtct

SEQ ID NO: 916568 - DNA, 4001 bp, Homo sapiens
taaggacgctgtccatctcaatcactgcagagtctgcagtctctaaaccctgctcagcactggcaggtgctcagtaagtgtgcgtggaagggtggtggatgcacatgcctgcattggagctgtgctgggaggaaggtcagctaggtggggagagcattccagctcaggagctgtcccttccatttggcggcagatccaagagccagagcagaggttcttccttatgttgaatcacatccctgactctaaaagtccccagccctggatcccagctctgtcccctgcactggcccacaggaagcctcattctagtccttcctagcaagtattttagtcttttcttaataaactgccccttgcaacaggacaccgctgacaggccctctgcgtgacaggtcctggtggcctcctgagtacaagctctgcattggccaatatccctacccagaagtgggcatattactattattagcaataacaacagcagctaatatttgttaaacaacatgtgccagatacattaagcactttacatgcattttctcatttcagcctcacaatgttatgaggaagggattattattatgcacattttaccaatgaggaaactaaggcccagaaagaaatgttaagcaacttgcccaaggtcacacagctaggaattggcaaaactgggattagaacccagggagcctaaccaaggagtccagaatcaggcattctcgctccccctgccacccacttggacctgtgtagcggatggaggcttcacactgcacagagcagtcccacagcctccatccagagagcagggcagaagctaagggcctgggtccctgggcctttgagccaggcacagggcctgaactcctcagctgactttcttaagtccagcagaggcctcagcacaggaatcgtcagtcacattcacaccgttaatctcggcccatccttctgcccagttaccttcaattagaatcttgattttatactgtgcacttgtcattcctcacagctctggatgactacacggagtcagctgacttcctttttaagtctccatccaagtcactgatcttaaatgttcacttggagtagatctaggagcaagccttgtagccccaccactagggccccaagccaggccgacgacagcccccaaatccatcagcacccagtgggcataactgttgtgaacctaccaacctctgcccagcctgtgttttcccaatgtgcccctaatactagccccacaaccaaattaacaattcactgtaaataaaccacctctgcagcatttctcccatccccaggtcatctatcaaaaacgaaggcataaaaagggaatgagcctgccaggcgcggtggctcacgcctgtaatcccagcactttaggaggccgaggcaggcggatcacaaggtcaggagttccagaccagcctggccaatatggtgaaaccctgtctctactaaaaatacaaaaattagccgggcgtggtggtgggtgcctgtagtcccagctactctggaggctgaggcaggagattcgcttgaacccgggagacggagattgcagtgagccgagatcacgctactgcactccagcctgggcaacagagcgagactccatctcaaaaaaaaaagaaagggggggcgttgggggggaatgagccaagtcaaggaactgtgccctgccctccacacagccagaccaccatggaggaggtctggaaatacagaccacccccgcccccaccccacccagtataaggaagatgttgcggcaaaaaaacaaaacaacaacaaaaaaacacgcctgggagacacaagccccgagtcctaatccccagctccgcctgactccacgagacccccagccttggtttcttgactcagtccctcgaaggggttgcatcacgcagcatcggtccctcccggctgggtctcctggcagacgagctcccgcgctcctggaaccggttcccgcagccggcggagaaatggaaggaatttctctggcctggccacctccagcgcccctcgtgggccaaaccccacccttggcggactggggagagaaagccttggccgtcgcccttgggggctgactcggagccagcggttccgctgggaatccagtcccccccccgactccccagtttccaagcgggactccggcgtggccccgagcccgcccaaaggcatccaccgaagacccgagattgcccggcctctccggggcccacctcccgccaccccggcagcccctcacctggccccgcgggctccgctcgcctctccacccccgctttccggggtcgcgcaccagccggccctgagctgctctgcaccgcaggggcgcccatgcctggaggccgggggtcccgggcgccgcgaggggacccccgccagttccgccgccgccgccacctcctcctcgcgctcctgcagccgcgccgcagccgctcagcgccccccgcccccgggaagccccccgcccgcagttccggccgcgcggcgccccccgcccccgcgcccgcggccgcccgcgcgctgtcccagccccggcgcgcctcccccggcgggcggggcggggaccgtgacgcgtgcccattgacgtctccggaatcccggcggcggcggccgacgcagcctcatcaatggggctaaaaatagcggcgcccggaatagccgcgagcgccccgccccgcggctccccccacgccgcacacccggttacataacccgcggccagagccggggagctggttctcaggtgagggtgccgaggtctcgctcacaccttccgaggctgggcacctggggctaggttataaagaaacttagccggggcttccccaggaagaggtggaaagagcgaggcccagagagactcggtggcggtccaaagtcacagcgattcggctgctggcgaggacagggcctggcctttgagtctgcgggcgccctgcctgcatcgcttggcattcatgccaccccaagggcaaggaacccaggtagcagggcacccagcttccacacgagaaggcagcttacagagaaataggactttctcctgaagagggcacttcccgaggcgggggtgcaggccccggcaaagcccaggtgatggattcactgatctggctgctcccataccactgtgtgacttaggacagtcacttgacctcctgagcctcagcttcctcgtctctaaaacatgatatgatcagattatccaccatatctggctgtcaggatgataacagctgtggaggtgccttgtacacagtagatactgagttagttctccctgctctccccaatccaaaggagtgcttcatgcactcagaggcccaccaccgtgaccaggaagccctgggaagcccaccctcctctgaccagagtcttcaggcccaggcttccatggtaagaattttcctgggggtgcaggcacttggaaggtttctctctcccatgtgactggagccctctttggaaatggaagaaccatcctgtcctgagcaaatccttctcccccagcagctgcccactcaggagaggctggtcaggaaggcccggccaaagttggagcaatgggattggggctggctgggtggggttgggggttaccatctctgctcctatacccccgtacaggcaaggtcattggggaacacccattagggaggatccagtcatgtgctctgctgtgccagccactagcccctgatcctttttggagccaccttaaattatgagcatgctatacaatctccagcacccagcccaggccccacgcagcaaagaatctcttctgtgctcaaaattctccaaaagaggccccacacctccactcagccctcattccaggggctgcattcctctctccaccccactgcccacccccagaaatcctttgctggacaaatcctaaactcttggcgcaactcagaattccctttctctcattcttcataatgattccaagaacctctgca

SEQ ID NO: 916569 - DNA, 4001 bp, Homo sapiens
gacttaaggagaagcctgctggtgggtgggtggaagacattctgcccctgcctgggtccctccactaaagcagggtctgtgccctgaagaatccagaggctcaggcaaagggggttacacagccccagtcccgaggagcctgaagagagcctgaacagagatagcatcattcaggcagatccttacattcacagaatggtcaaaaaataatgcagaggaggctccaggacagtctccctcccaacctacacacctggggtctgcgtaactctggcctcaccagtcaatgagggaagctggagaagaaatcaagcaggaacagagtaccataatcaaggggtgcagtgatgggggcaaaggctgtcaccacctcctggccaagagcccaggaagtcctctctggtcctagccttccttctaactccacaggccctgaacagggcacctccacccctagcctgacaaccaagacaacagagacccttgtagctcaggccccacacacccagtggcaccagtccacaggcatgcagcaccctgcgagaggtgagggtggccacatctgcctgcactaggacagcctggccagggatgggctgggggtgaaggaggaaagacagcagttgggcagaactgggcgcttgttcctgccttattcaaatcctgtttctccacctggacgtcccacatccggatcaacccccatcagtccctcccccttcatgcaggttcttaacaacacaagatatggacctacatctagcctcacaggaggggggagcagtcccacaggaggaggaagaggcggggttgaaggaggcagtggggagaatccggcttcaggcaggtcttggcaacaatgtggcttgcacctgttctgctgaacaagcctcaggctgcaccctacctgtaagatccaacagagactactgggggagggggcatagggatgatcagcatctggagctggaatggttgggaggtatcctctaggcagcaccgccccaagactccaacactggcaacttctatccaggatccccaaggacaagggtttccacctctgtctctctttctctctctctctctctctctctcacacacacacacacacacacacacacacacacacacgtgatccaagccccagcgaaatcaattctccctgtgcttacagagaccctgccccgaccccaagaagcctcctttattcaatacacagcaagcagccctccacaggtcagccaccaagccagtcacttccttcaatgatccggaggcttcctaacgcacctcagacagaaagttcagggtggggaacccctgccaactcagccacagcctctaaagtgttaagaaaacaaccgggacactgggagggagctgacaggctgggaggaaggagggccttttggaaatccaatcccagttagaatcgtacggatcccagcagcgccaaagctctgtgtacctgttcccccacggtgctgtgacccccatccacacccacccaagttcagagcaccgtgcgcccagttgggcaccctaggagactgaactaaggccagccgcctgctggacaagtccctactcccggcgccaaccccaaccccctacagcttccactttgcaggtagtcaacctcccctacctcctaccccgcacccagtagtttccagtctgacctgggttctcatcccgttgtgctacagctgcacactacacctaccctcttgcatgccggccctacaacatcctctctgcccgcgcgtacacccatctccttcatgcaccgctcctaaaaacagatgcacgttccccgaagggaacctacccggccggctcccgctgcccctgcccggactggcgccccgagtctcagcctggtccctggtcccgcgtgcgctcccgaagttcttctgtgcactcccccaagtttcgtagcctccgccactgggactccccggccgagcccgaccctcctcttaagcgctccgtgacgcacggggaggggcgggggcgccactgacgcaggccgcccgtcgagctttggccatacaagggcgcggggggcggtgcggttccggcgggaggcggccagggggaggtgcggcccggggagcccgagggggcggggcgaggagggggggcctggaatgtctgcgcgcgtgacgcacgcggggttccattgacgcagggagcgcggattgtttgatctataaataggctcctcgcgcccgccgcgcccgctaaaaatagcagctcccaggcccactaggctccccgcaccggactcgggtcccagctgggggcccccaggtccagaataaccagcgggagggccagagcccgagaaggggcgctgtagagacgcggccgcggggcttccccggatgaggatctcctcactctccagttgctcccgggagccaaccgcgcccggtccctccggctccctccgagcctagccccgcctttacaccttcccaagcccttcctggagccctagggtgtcgctgctgccgctgctgggcggtcaggacaggccgcgggctgaggcgggcaattcggacacaccctggggagcctgcgccctcacctcagccctaggcgcagctagtgcacaggacgcggcttccccagcagggtctcaggctgagaggctgcccctgagacgtcagttagagccctcgcttagtccctccaggcagtctccctacacaggaccttcccgagggcaggcgttggccaggcccaagctcggccaacagctctggctccgctccacaagctgaacttggtttcgcaccgtcccctccccagccccttacagggggagtgcaccctagttgggaaattaccgaatttcagaaccgggtggagcctgagaaatcttttcaaacttgtgccaactcttcctcattttataaacaaacaggctcagagaaataatggcacttgctgaaggtcacacagccaggtggtggcacactgggttggaacccagggccacagactgcatctctagggatctctccacgcctcttatcaatacccctccccctgtccacatcagggagcaccggccctcccagcctacctccagcacctgtggggaggcagctctgaccagttatcacctgcccggtggagtgaggaacagcccgccagggccctgctgggcacagaccaggcttcagccacctggagccttccctggtttggccgtcacccttccaccctgatctctcctgagcctggggagccctcacggaaaagtaagagaagagggaagggcaaaaaaacaaaaacaaggaaaagagagccctgccaccccactgcgacccccatccattccccttctcccatgtaagtcaatatccatgagtttctgcttccattgagcctgcacccacccacccagttctcaactcatctggtcaccccataggactttctctgccccggaggctctgccggcccgatttccaccctcaacccccatcacagttttcccacacccttgtctccagcccccgcttctgcccactcaaaggtcccacaagcacctcaaatttcatctgttccagacagaacttgtcatttctgcaccccctgcctgccacctaatctctgctcctggctcctgatgccccatttgcaacttttcactgtttcctgaaattcttttttggaacatctcttgggtcctttcctctccccgtttttgttttgttttgttgtctttgagacaaggtcttgttctgttgcccagcctagaatgcagtggcatgattatggcttactgcagcctggacctcccaggctcaagcctcttgccttggcttcccaaagtgctgggattataggcatgagccactgcactcagcctctcccgctttcctactgccagccacagcccatgcctcactggtcccacagaccaactgcctgcgcccagtgaccactcctcctttcccacacccatgaagaccatccat

SEQ ID NO: 916570 - DNA, 4001 bp, Homo sapiens
gagacgatggggtcttccctgcctgttgtgcctttgctcccagagccataggaggtaactgctagggatcaattggggatatcctaggcagaggggagaggtgaaaagcccgggactttctcattagaaggcgggacctgccactccgggatggcaatgtcagtagagcaccttctcctggggccaaacacatgtaggatggtccccagtaggttccagccattgagagccgaagaacccgcttccctgctccatccctgtttttcagctatgcttgctgccactgcaagtaggaataagcccctggcagttccctgaattaagtctcagtgcaatcccttttctcgttgggagctagggaattgccagacctctgggctgtggtcctggtgggggcaacccaggctgagaggagtctggaaaggtggagctaagtagggaaaggcgaggtgctgcactggccttcaggttcccggggagaagcagttggtggagcacaggcctgcagacatgcttccaacctgtcagtacaggcctggttgagtacctcttctcagactaggagaggggacagggaaccgagtgctcccaagcctttctacaaaggatttcctctcttccacgggtcagaggccaggaatatttctcagactaaatggagtaatagctgggggaataataataatagcatttagatagtgcctgctattaggcactgttctaagtgctttaaatatattagctctaacaactctcccaacaatcctatgattgatttgattctcatttaacagatgaagaaactgaggcacagagacgtaaagtcaattgcacaagttagtaaatggcagagccaggatctgatcccaagcgaagtggctgcgcagccccgcttgtcagcattgcctctcagaggggaatgcctgaatctgcagttttccgccgcccactcacatcctcactgttactcccctgccccattcctctgaggccaaagctgctgcagacatgggatgggaggagaggagcctggaaggtccattccactcaggagttgggggagcagcactcaaggcggccaggggcccccggcaagagccacacaaaaccctgatgccctgggaaggatggagacccccgatgttttgattctgaggagaaaggacaagtggatagacagacctggtctggggaacctgtggttcgggggaagcaggaagtcacaaccctaaactggccagtcctccaggccctcctggttgtaagtgaccactctagagggttcctgtgttcctgtaagcccccacttctaaacagcctagctcctcaccaccctcaagtttggggccattagaggaaaaagggaagccaagcaatgagagaataggaaccctcagagccaccaaaccatgggaacatccccggtgaagagccttgagttggcaggatgacctctccccatctcagcaagggagcgggacctgaaagctgagggtctgcactttctggtcctgcctcctgctcaggatctgggaagtggaaggaaaaggccaggggacgctggcaggggaggggtgatgcctcaccaagtccttggaggtgccgagcctcttgaggctgtccagcgggagcaggtcggccgagtccttgtgcaggaactgggtggcctgtttgagccggcgctgctggctcaggtgggctcggtctcgaagctgtgcctcctgccccctcgtcctggcttctccctcatctctcctggcctcctgcttggtgctcatggcccctgctggaggagtgggccaggggctgctcggtgggggcgtcaccgagtcctctctgcttcttcctgcctgtctctgtcccgtgctgcagctctctttccaacaggagggtctccacgggagggaaagaggaaaaataaataacatgcaggagcagccgcgtcagtctccaatttcccgagattgctgtagagggagtgagactccggctggaaaaacccagtcctagaagagagggagggttggcagggcccacagctggctgacttggccgcatccccaacgctggggtcctggtcagagcgggcggtggatggggcgtatgtgtgtgtgtgtgtgtgtgtgtgtgtgtgtgagagagagagagagaaggagagtgagagacagtgctgtaaactgtcagggtgcccgtgccaggtggtttgcgaggaagcgcttgtcactgtgtgggggcagcagccttagtgcacctcccagcgtgtgtggcccccgccctcctctgcatccctcccaggcttcccaggactgcccagctgttttctcctggcattatctgcagcccagggctggcgcgcaggccagtaactgggttcagatcaaagaggggcagcatgagagcgtccttccctcctctcatccccctagccttaccttgttaggtctcttgcctcccgcctagcagatgtcagagtctttaactaattgactctggattctgggttccagggaatgacaggaacaactctgaatcttcccacgagtagaaattgtccctggcatctcagtctcctttatatgactctcctcaagtcctggctctttaaaaaatgttgcatttcaaatatacagaagttataaagaataagataaccagtactcttcactcatcaccagtttaaaaaataagctgttgaagctccctgtgcacttccacttccgcctgctgaaattggtgtttatcaggcccagacttctttatattctttatgcaaatacttacatatgcattctaagcaatatgtcgttggttttgtcctactcactgtatttattcttctgcaatctgctcttttttgctgaatagtttttgttagtgagattcatccatacggtatgcccagctctagttaattgacttcacctgctgtgtaacatagtattccattagatgcatgcatgacattgaggaaatgtaggttatttttcatttttaggtctaacaaacaatgctgctatgaatatttttgcacacatctcctggggcacctatgtaggcatttctctagagtatacacctacacctaggagtggaattgctggggcatcccatatacagctttgcctttttggcatattgccagagtgtttttaccagtgcacactgagacagctgcacacaggggctcctgaggttccacatcctctccaggacttggtatcagactttttctagccctggcttatcagcagatttttctctccagcctttcctcttcaccatcagggaaacgcattggccaagcacctgtttacctgtgttggatgctcacagggtgattaccccacctgagccctgctccctaagggtgcagtctgactcagacagctccaaggcacatgtactttcagacaaaccagatgtctgctgagcttctaggaaccaagcctctttgagacactttcacaaccactgcaattatatgaagaaatactgtattctaatccccatttagagggaaagaaagtgttatgggttgaattgtttccttcaccccccaaatgtacccctaacccctagtacctcagaaggcgacctcatttggagatagggcctttacagatatggtgaagttaagatgaggtcattaggatgagcctactcccatatgactgcgctcttattaaaaggaggaagtgggacgcagagagaaacgcacatggggagaacgccacgtgaaggctgaggtcgggataatgcatctgcaagccaaggaacacctaagaggaccagcaaaccaccagaagccaggggagaggcgtggaacagaccctgccttacagctgtcagaaggaaccaaccctgccaacaccttcctgttgtactttcagcttccagaactgtaagatgacaaatttctattgttttagccactcaagcttgtgatacatactttgttatggcatccccaggaaactagtacattaagtcttaggacccag

SEQ ID NO: 916571 - DNA, 4001 bp, Homo sapiens
ccactgggagaaattggataaagtgtatgccagatctccctctattagtccttttctgtttattttttacacagggtctggctctgccaaccaggccggagtacagtgttgcaatctcaactcactgcagtctcaaccttccaggctcaagcgatcctccccaactcaagcctcccaagtagctgggaccacaggtgtgagccacgacgcctgcctaaattttgcatttttttgtagagattgggttttcctttgttgcccaggctggtcctgggctcaagagatctgcctgcttcaacctcccaaagtgctgggattacaggcgtgagctcacacctggcccctctattaattcttaaactgcatgtaaatatacaattatctcaataagaattacaagttaaaaaaaaaactttcctgcccaaaagctgggtttgataatcttctatattcctttcatctcttaagacctgcaaaattcccaatgtctccaaagccagtcttctttccaccataccacacaacagcttcaaaagccaaagcaaaattaactcttggcaaagggaaactaagaaagtaagccaccatttcatagaattctgcattgctagtcattttacgtcccctctgaaaatcactccaatttgcttttttcattaaactgacttctggccaaaaaaaatggaaaatgtgatcctataaaacgttcttgctcaccaaataatctctccctatctatgtgccacctccacaacaagaagtaaccaatatacaaatttcggttctgaatcctccttggaagcaacagcgacaatggattattggttcccaaatggtcaacggagcacaggaaacaggacagtgggttaggagctgagacagtccctaaattcaggcgtcaccttggccaggtcatttaaacctgagtctcgcctttcccatctatagaatggggatgtggaacctccttcgtagattacaggaacgatttagagataatctacgtgcccggcactggtatttattagttcattagtagtaacaaccgagccaagctcattttatgtgcacctggccatgaagttcccattcacagccttagaatcccctcctcaccgaggttaatggataacccagaaccttccccacctggacctctcctctttcaaacaccgcacagctcatctcatctcatctcatctcatctcatctcatctcatctcattccatcccattccatcccatcccatcccatcccatcccaacccacccccaccaaaaggaaaacagaccagcctcgggatcggccacctccccagcagccccgctcttgggcatctctgcgccagcccgactcggctgttactattattactattgatgagtaacaacacctaacggtgcgtgggagtggccggctcccaagggaggcctgaggaaccccagccccgcgcggcccaaagcccctcagatgcagatttcgggctaaaaatcccaagaatatatacaacagctttcccgaccggggaaaggcgcgagttgtgaagtttctagagcgcatttttccccgtttccccgagtcgctccgcaggagcgatgctgcctgcggctgggggtgtgggcaccggggttcgcgactggaggccctggaggtccgcagctgggctggtccgggtcctagggcgcccgcttcccagctgagcgcgcaggaggggccccaggcgccggggcggggtcgccgcctcactcaccttctgtgcttctcttcgcctcccggtagcgctcccacaggtagcgcttcatgtccggggcggtcccgggtgcagtgcacaagggccgggcggggcccgcacacggccgcccccgagccgcggtcccgcagccaccccgcaaagccgccgctgtcgctgccctcgccccggccccgcgtgccaccaccgccgccgctgccatggtcatgcctgctgcctgctgccgccaccgccgccgcgccgctctgcgactgctgctgcccggcccaagatctacccgcgctctgccctgcaggagggcagctcctgcgtcggaacacgtggcggcgcaggcctgccctcccgccgctgcggggcggggagtgggcggagccggaggcggggtctaacgggggcggggtcgatggggagtgggcgggtctgggacgggggcggagacggggcggggcggggccgggccgggggccccacgcccagcctgctgcggtcaatttcagggtggcgcgggggtggccgtgtggtgtggtggcgcgcaggccacatgggatggaatgatgaggtacgaccccagcgccgcccgcccagctccgccgcaccttcgtcctgccttctgggactgacccccagctctggccacaaggacagcgcccctcccaccccagctgctctggccccggccctagaaggtgacctctctccgcattaatggcctctggcagtctaattaatggcagtctggacctcccctggatcgtggggcccctctgagacgtccccgatccccagcttaaatttatccaggaggacctgtgagtgggtggctgggccgaggttccactcatgggctgatgtcggctggaggatcccagccccttaagacctcagtaagtttgaagggccctcccattacacagcctggaaggccaatgcccgccccccgcctaggtttccgcctggcggcagaggtcattggaacatggtcacccagctcctgcccctgcccacgctaacggctcggtgcacaggtcttctctcaaacctgctaggctccacccgtcctgtgcctgtggttccactaaagccaaatgaaccgcaacctccctgcctgggggcaattctgtgtggactgagtcagacagagcttctgcaggaaagactgatgtggcccagccagaaccctgctgaaaatcgccgggcagcaaggacttcccaagctgtcctgtggttacttaattttgagcaggtggagtagggggaatggccctcaaggctggcactctgccaaggagaccatactggcttgtgtgaaatgggtggaacacagtttaagacaaataacccaaggcattagtgtatgctccagttgtgggatggaggggtctggaggtgtttcatggaaaaaggtggcatctgggtttaaactaccatttattgaaggcttgctgtatgcagtatctcatgtaatcctctcagtaatcctgaaaagcagactccataatttctccaattttataatatagtcaatccctctatacctgccgagaatcggttccagaacacctgccccatacctacataccaaaatctgcgatgctcaagtcctttatataaaatggctagtatttgcgttcacacatacttctatatattttaaaccatctcgtttactttttttttttttaagacagagtctttctctgtcacccaggctggtgtgcagtggtatgatcgcagtgcactgcagcctcgacctcctctgcttaagcgatcctcccacctcagcctcctgagtagctgacattacaggcgtgaactactatgaccagctaatttttgtatttttttgtagagacggggtctcgccatgttgcccaggcttgtctcgaactcctggactcaagcaatccgcccaccttggcctcccaaagtgctgggattacaggtgcaagccaatgcaccaggcctcaattacttttcatacctaatacaatataaatgctctgtaaatagttgtgatactgtattttctatttgtattacttttcattgttgattttttttctaatatttttatccatggttggttgaattcacgaatgcaaacctgcagatacagaaggctgacagtaatgaaaccgaggccaagaaagatgaaataactttcctaaaaccacacaactgaacccattcttccatttggcctgctaacatatagtatgtaggatttaggtgggtgacagggaagaaagt

SEQ ID NO: 916572 - DNA, 4001 bp, Homo sapiens
aggctgagtacgctggagaacttctgagtgttgtgaaaacaggacctctggaaaagtctcctctatgttacaactttctcccatcctgacgtttaggacagagcgcttccatgttctcctcgttcgctgttttgcggggtaggagcgggcacctctttatttaaaaagcaggtcgctcagtgcactccataatcagctgagttacaaacatcaggctccaggagaaacacccaccccttccaggctcccctcccctctcagcaggccctcgcccccgcctcttcacacacataaacaagtccacaggcgcacagtctcccgagctctctagctctgagcccggcgctcccgggagcaacctccattcggactcagaacctgccgcccgccgccagaggccgaggccagacgatcttttcggtgtttcccccaccggcaatcccaccccagcctcgattccagcaaaagggatcctttctagtccacagccccgacaccgtcggacgcaagggtctcagtgccgtgcatctgaagcgcagacgacgaatgaacgcagcagccaaactcccgcaaagaagcagcgcctcctggacgcgcacccactcccgcggagagcaacaagcagaatcctactcccccatcccatgccctcggccctcgcccctcctgtccctaaccttcaactcccaagcgtcccaaatttcatcaggagcatccaccactgagtaaagctctggggcaatgggacagttcggtccgtcgtgggacctttaaactccgacctggctggctgcgcgggtgcccaggtctcccggcctcccacgccaccgctcaaagtccgagaacaggctggacgataccgcaaggagatcccctgggatggccgggcccgggtgcccgccgctccccggaggggtcccagatgtgcgggctgcgtacggagctccaacatctgcgcaaaggcccagggtggggtggccaccgggtgggcgctggccaagaggagcccggggcgcgaggtcttttctgaaaaaaccctttcggggaactccaacgcaggtacgcggcgcgtggcagtgagtcccaactcccaaaactggaacgcgaggttccgggtcctgagctgcgcgtcccctccccccagcccacgcccgggccagagtggtgctggggcgagctgagaatcaggctcagcggccggcagagtgcagggcgtgtgcaggggagctgccgcggcacctccccgcccggagttctgtctgccacccccttttgttataggatgcgctaggagctttctcggaggagcaggcgggtcggttgggagtggtgggtggttgattctgttgaatctctttcctgctctttcgtcgtccccatttcccctcttctgcccccaccctttccaatccaggtcccttaaacctgatcactttcccagattgagggaagcttcttgggcagccgagggacaagaggggaggaggtggagaagggtgtccgtgtctgtgtgtgtgtgtgtgtgtgtgtgtgtgtgtgtgtgtgtgtgtgtgtgtgtagcggggtggctgcggttgcgcttcggcctgagcagatcccagcgcaaactttggggaagacacaagcccgggaaagtgagtgagcgcggcgcgatgggggtggggcgggatgcggatctggggccccccgcaccagtccactggaaaatccctccccacgtggacccccatccccaaacctgcccacccaaggtgcccgccgcctccccttaccgtggcaaaagtaaccatggcatccgtgtggccgtttccagggacgtcgacatgaagagaaaggtggacgcgagctcggtcattcaaagtctcccccaccccgccgcagccactacccagcaggggaaaaaggagaggaagaaagaaaggagagagaagaaagtagttgcgccgggctgcgtcgcggggcggtgcgcggagctgttcggaagggagaggagcttcaactctgagtcccgtgaacagaatctgcgcggttataaccagccaacccggccagatggctccgcgctcagcgccttaaccccttccgcgccgcgccgccctcccccgccggcccgcgccgcgccgcgcgcgcccgcgccccagagccccccccccgccctcacttcgggacccgtggcggggaaggggtcatttctcctggcccctcttgaaaaacaaaaccaaaccaaacaacaacagcaacaaaaacttccaaatctgtagtattcttcagtaacccccacccttgagttcccttttagagatccaggaaaaaacgaaacgttaaatgtatcgtaacaggttacatgttagtgtcttcagcctttcttagtggttctttttcttgaaatttttctttttgatcttttttctttcaagattttctttacaaggcatcagggccttttcctgcctttttcctcaggaggatcaggtctgaggcgtaaactcctcctccaaaccttagacccttccagctccagatctctccccaccccctaccaagcccacccgccactcctccccccaccccacagcacgaacacgcccaaggacaatcgctccccggcgaactccccgctcccggggacccgcacccaggacgctgtgtcggcggtcaagggaggtcaaggtagaggggcgtgggggcgggtggtccgagggactagggaggggctgtgtgtgcgcgcgcgtgtttgcgggagcttgagtgtggaagggagagggagatggatcgcagcctcccatttcacccatcctccaacttctaaaccccttccttccaaactaggatggggccctgcagctaatcactcgcccagcacccaccagtctgcacgcggggacagcgcgagaagcaggaaaggcgagcaacaaacaaacctgttcgtggcgccccgaaagtaatgacgctcacttccccaccggtggatacattcgaggagaggatagggggagggggtcaaaatctcttatttggagataattttagctgcccgttagacctcacttgctccgagccgttctctctaaatttaccaagttaagtcatcttgatttcgcccatttgccatcgagagaagggggaaaaataccacttagtgatcaacgagaaatcgagagcccggaagcagagttttgcccacttgcccgcttcccgagtccttgcgtggtggacctccgctccaagcccctcatcccttcctccctgccacttcagccgctcctcacatcatctcctgccaggaccttttgactcacgcgcgactgggaagggcagcgagtatcccgtttcctccctgccctgtcgttcgaggtgtctaataagcaagccgttccgcgtttcggttagggcccaggttcaaaaaatccaaataccttgaaattgcttgagaatttggttaaacatcggaactgcacccaccagttcaggaccaaccggccgcagagagtagctggggggttggatggggaggtgggaagggaggggggagtctgggggctgcgtactagatagattgtacctgcctcatcattatcctggctgatgggggttgccacatcgaaaaccgccagaagcgcccaccgaggcccaggggcgtcacctcctgcggtccctcgcaagggtagggtagtccttcagtggctcccctcgtgccaaaatatcgacgtcttcctcagggccagaagaggctgccgagtcgttccctccacccagccacacagcaccatgaaggtttggattgggcgtgctctgtcgggttctgcttttctccctctcatctggcccgcctccctgccctcccccacttcccgcacttgcccccctcctccagcttctcgccctggtcaaaggagggattcaggccccagtttcagatccactggcagagttcttttctcaagctccaggtcctctgggaacctgaagattgcaaggaaagaggtggttggctcctgctg

SEQ ID NO: 916573 - DNA, 4001 bp, Homo sapiens
tgaccccttggctgtcatggactcctgttgggactcagaaggcaccaagaagttcccttccatttaggcattttacatctcggggggatggaagggaatgggtgaggtactaacattcttgaatgcctgcgctatgctagaaagtttcaggggttataaccttcctcggacgtaggcaaggaccgctgtctgactctgaccctaggaagcacaggctcggagagtctctaaaacctggacaagctcacaggggaggagctggaacttgaacccaggtccgactccaaagccctagcactttccaactctgctcacagctctagaaggggctggcagatgaggaggggtggtcacaggctgagagtcggccataaataaatttatcctctatgtatagatgattcatgatccatttcagtttgcttctgggtagtcatgcaattattttgttacaaatagttttaaaaaattcctatgtgcctaaaaagatgaaaccacttgcaaaaagcaaaacaaaaaccaaagccaaaacaaaaaaattcaacccttaaacaaccccaaaccccaaaacaacaaatgtgctgcaaagaaacttccaaaactaaaattgccagggtcgttgttattgttccaggaccataacactggagcaaatcataattctaatttgccaaactaacagcagagaatttgatatagaacttgctggccagagctacagggtatcattttaagtaagtgcaggccataacagttcttttaattcattaacccaacattaaatgtaccagaagagggatataactgtgtttatacacaactctgacatcatctgattttaacaagtttactaaaacaacagtcatggccttgacaatactgaatgcaaaatactggtgtacacagattttacagagtgactcctgagagccggatcacaaaacaagttttaacagatgggagaggcctgagggaaggcaagcacactgattttattgagaaaaaagcttatatactgtagggttgctgaagtttaataaataaaggtcaacttataatatataaaaacaatataaacatttatatgctacatgcatatcatataatttaaagtaataatttatatatggggagagatgccaattcatgttcttccgatttttctcgacaaggcacacacacaggacgtgtctatccgtatccaccgccagcccacgagtttattgttctctgaagtcagtgctcggacgtaggtttgggatgttttgcactgagagttccagtgtttatcatcaatacccctgcaaccgtttttgaccggcctggcttccttacatcgcgtttcataaaaatattgtttgacgggagagttgcccgttttgatctcccccagcaccgtgacctggtgtccccgaatgtcgatggccgatgacttgtcggtcacccacagactctcactgtcacataccgagtactcccctcggtgactcttatgctccgcgtaccgtttccgccgtgatgttctgttcgccaccacggggctgcccacgtaatcctccatgagatacaagggcgggggctccaagggggtgctgtcgctcagcaggacccgcggtgagttgtagcgtctctgttgtcgcagcagttcggtgtccattgcaatcaccggctggaatgctgacttggcgggccctccccgctccggctctcggggagcctcagctttgggcagggtgctctggtaattttccttaacgtccaccatctgcttggagagcttgtttttcaaaatatctgcctggatcagcttaataatgagggaattgagcgagtcttctggcaaactcctttgatccatgttgttaccttggatgccacggagataagcgagaaatatcacataaaacaagatggacatcaccttgttcacctgtaagatctgaaaaggaaacacaggtgttaagagcaggctctggcagctgagtctgtgttattctggcaccagctacctgaggctgagtagccctgtgagggcacgagagagggtaccgccccccaggtaagcaaggcaactcccctctggacattctgaagaggtgatttctttcccccacccccgggagatactgcgaatgcactccaggtctgccgactctgctttttgcacgggttgtatttacattggatgtctgctttatcctgcggtctctgcttgtgggtggacgatgtcctaccgcttctttaaacatcccttgagcctgcaaagacgcatggttcactctaccttggcaaagcatgaaaacttcaaacctgagaattgtaaacatggagtaacttcccttcagcagcagcagcggtggccttgtaattgtctcaagaaagagttcgactgctccccagctgcagcccctggaacacactgaggctgaggactggttcagttgcccccatattgcagtgtcagatgtggggtcatccctggccaggccgcagctggaacggtctattctcctgcccttggaaatgaacatgtagggccactacccactccgcgagagggcctacgttccagggtgctctgccgagctttctgatacatacgcatcaccaactgatctgctccatccccggggacgctctccacaaaacgcagctctgccacagcactacttgcagaagacagagatgcagaataaccaccttacataaatgggctggacttgcccagaatagaagagtcattgttgattcacttgcctcctttagatttttaacatttctgctacaaaatgttccttttagtgcttatgcttcttctaattctactatttccttgttgaaatggcatttcaacccatccacgctctcattctgttgccatagtagaagcttaacaccggactccggtggcgtcctggtggaattacagtgctgatctcaagacaccttcattgctagtctctccctcactagagcaaagcccagatgttctgagggtagcactggaaggagatgctccaggtggagaggggcagctgagctagtgatccccgaattcgtccacctccttgagatattcactccttaatcaccatcgctgccacctcactggctcccaggggggtacatcatttcctctttaaagttctgtccaaacatggaaaataaaaactcttcccctggttcacctttggtattttcggaaagactttactaagtccagggggaaaatagagaggaaataaacaaagccgacacaagaaacagaaaagcagtcctgctaaccagcacctatgtctgagcctgccagtgctcactcgctcccaggactcacagacagcctctttcccagcttgtctgaaatactgccggctcacttgtccctagaggtcaacaacagtgaggcactctgctcatactgcctcctcttgctgctgtgataaggagaccatcttctttccatgggaactagtctttgggaaaactgactccttcaaggtcaaagccaagagagggattctagctttgctgctcacccttagagatgactctaaggaattgtactatcctaggaaaatggttcctctacagcataaggaatctccctcctattctgcatacaagtgacattttcttcaatattacaggcccaacaaaatgcaacttgaacaatacaaaaaatatggcatacaactaggattacattctctactcccctcaaaaagaataatacagctgcaataaaatcatttaggactgagagtctattgaaaaacaatttgttaaacctcccaaaagctcagccactgtaagctaagaatacacaggatatccgctcttaaggaaataaatcaagtatggttagtgaggggaggtcccaggtagaataagagtcaaggtacagattagtgaggtaatgaccaggatgaactgagagggagaatgctggctgatgctgatggattgaggaggaaaaagtaagagtctttatgggtggtggc

SEQ ID NO: 916574 - DNA, 4001 bp, Homo sapiens
gcctgggttctgtttgccacttttctcattagctggggcaacagttgcttgtggccagaagcacacaaacacacaatgtgctatgactcacctgtaaaaaatttcaaggaaaatcatatactgcctgtacaagtatttttgacttgaaacacttgccttgtgatgtttatttacaacctttcaatggcttgcatgtttttgccataatatggtttgagaaggaaaaggttttttttaaagctcatattttaagagtgcaagaattaaagtaaaatcttaggcctttaataggtccctgggaaaaatatccaataattttaaatgcccctaaactcctaagtccagaaaagatttgagccagataaagaatccatggggcaaaatacttggagtcactcaagggactattcaatgatactaaggatgctcctgtgacttggactggtttgggatgcagactggaaagcctggattttgctgggtgccagcggccctcagggaagagtggaagcccaagggaggagatgcgtgctacaatgttctgtagccaccagcgcatccctctagcccaggcgcccctttctgaagcagtcaagatccgcacgagagactggatgtctgcagactccctcacatctctccccctcacctacagggctgcgcttacgcctaactggaaaccaggtgacccgcaagagggagggagaggagcagaaggggctcccgaatacagaaaccacgagccaggagccggtggcctagggcagcccaagaaagccaggatgggagtgggagggagagggcatctgccgacgccgacgccggttgtccagttaccgagccagggagcagacccgcctccgacctcccgcagagtctctgccagggtaccaattccccaggggcggccagccagctcaatgcaagcccggggtgatcaccacctatcgtccaagccaggagtcccactgcgttccagtcactgctccggggagagggcgctcagccctgccccaggtgtccttacctggttctctagtacccagcaccaggtcagggacaccagcgatgggcttctaccagagaccggccccagcccacgcgcgcccagggtcgctgggccacccctcctcatcattccttaggccatgaagtgccgggggatggcgagctgggtcctttgttccctcaccaagtggaaaagcagttttttaacaagccaaaccaagaaagaaaccccggtcgcagtatccccggcagggcgcacccaggatagctggttatccaagcgcatgtgtatcccagttgtaaaaataaatcaatagtatttgaaactgcggagccccggggaaaggaggcggaacatggccactcatttcaccctcgggagcagcgctctgcgctcgcagccctggctcccctgcacccccgagtcccgagatgggttagagaagcagcgagggaaggggtgggggccccgccgcgtcaccacccacctgcggccaccaccgtgcagccccagagcagcagcagccgcgcgcagctccccatggccgggaggagccgggagcagccgggccgggcgggtgccggagggagccgagacctctgggctgcgggatgaagcgccgccgtcctcgggagggaacggggccctggtttcttcctcctcctggggcgccgggctcggtcagcggtcgccggcagctgggagccaggggccgggaccgcgcggggaggtggggtgaccctcgcgcaccggcctggcgggtcccgggcacctggggggcggcgggagccccgggaccatagccggcctggctgcgctgccccgcggagcggccctgcgggctcgtctgccgctagcccggggctcggcgcccgcagccgccgctgaactttgcgagacctttcacttcccggccgccgccgccgcctcctcctgggcgtcctcctccgcttttcccacctcttctggctgccccggctccgtcccgtccttctccacgggcagttccatgcgatgcatttttattgcaccgacgccgcggcgctccggtgccagccctcctcccctcgcacctccaccccttcctcccgcccgccccccgcgcttgacagcccgggcggcgcagcccgcgggatcggatcgccgctgccgctgccgcccggggggggggtcccccgcgccccgaccgacgcccccgacgcccggctgcccgctggtcccggtcgcctcagcctggcccccggctgccctggcgcccctcctggcccgcgccctgcatctccctagtgacccccctggtgccctgcagcacccacaggcctcccctgggaagcaatctcccaccttctcccggaacattcctaagagcagtagactccctctagatcaggtcagggcatgccaaggggcttaaaaaaccgcgaaacaggctagcgcctacttcccacatcccccagcgaaacaagccctccctcctcctccagccaccccctctcggggagtcccacgacccggggacggaacaccccaacccagccccgcgtcacccgcactgagagcgcgccaactgctaagcggcgttcgccgcttctctgctgccttttgcgggggtagggggatgtctcggctaaacaatcgctgcctacatgatccgaaggtgtgcccactttggtgtaagaggtattgcctaactcaaactcaaggtgctgaaagaaaagggtcacaggattagctagtcggcagtgtaagaacatcgttgtccagaggcagggcaagggcacgacaaagggaactcttcggtccttccaagcgttctccctttatagagtatgccgtgctgtgaaacagtgttaggaactaacttatggggagcaatttagtagcaaccacacgcagctaattgcagataggattgctcagggctggtgcttctggaaagagattaaatagcagccgagtctgagatttttgcaagttctgtgaaaatataattctacttacacatccagggaaactggcaaaagttaagtcgacagcaattttgtattgcagtgctcattttgttcctttgaatattttccagaaaattaactacgttccagataccatttagtcgttgtgtctgttacagatgaggataattcagagctttgggatacatgtagatattatttacaatgacccagccaggaacatataagaagtttatatctcccagggggatctgggttgaggtcagcataatccatttgggcgacattaaaattattcttctggccaacagaggaaagtagcagaaggtgtggacagcaattcatgtagcatcacctgctttagaaaataaacgctttgagttcccaaatactggcaatggtggggctttcttcatatctcctaatggagccattgaaacacctctccaattaatctttttaccaaataaatgataggaaactataacagccaaaggttcttagcataaatgttaacttaatagccaaggcaaattaaacaaaggggtggatgcacatttattattaacttctgagtctagtatatttaggcagaactaatccatttctgttttttaattaacaaataaacttgtatgtatttatcatgtacaacatgatgttttgaaatatgtatacagcgtggaatgactaaatctagccaatgaacatatgcatttttgcatattaacatgcatttaagaatacactcactgtcttagcatttttcaagagtacaatatattgctaaaaatatagaatgcttcacaaatttgtatgccattctcatgcagaggccatgctaatcttctctgtattgttccaattttagcatatgtgctgccaaagcaatcacagaactactccatatctcattacaaatttcaaagccatttactgtctgcacgaatcctgcattgataatatatttctttgctgaataactggctcttatttcctttaacaagacagaaagctct

SEQ ID NO: 916575 - DNA, 4001 bp, Homo sapiens
cacagtttacatatatagaaaatatgcatattaacatttaaaaacacaacataatgaagactatacaagagactttttcaagacaaaaccaaagggaattgcttactgataattttagaataataaagatactgaggtttacttaacttgagatgttttttacaaaacacacgttgaaagaattgtattgtactttaagagaattcaaaattatgtatcctcaattttttcataggcatttaaggaaattgtttaaagcaaaagtggagctgttcaacaacacatgtacaacagcattgaaaatggatctctggatttttaaaaaactctatccaagtttctgttaatgaatattttacagagaaggaaaatttggaaaatactatacaataataaaaataaagttaaaaatgactctatcttccttgtactacacactcagtaaaaagaaatgccacaattggagaacccattggcttaattttacctagaacctaaattatacaagagatcttttctcactatttgttagagacataatctgttttaggaatttatgaacaatgtataccaaaatccttataactattgcattattacaacaagtagtttcaagttaataaacacagtgcttaatcaataacccagtttttcttccagaagtatgtgaatctttaatctcatataactttcagataaaatcataattatagaaaagtttgttttttctcataagatttaaaaagtagaagctgaaagttatgttctgatgattaaaataaatttaaaattttgtataaatcacatttatatcttcttagattttaatttcataatttaaatcaaatgatagcatgagtttgagttaaacatttccatgtcatatttatgatacataaaagcacagaacaggttaaattatttttgctgcatttgcttcctaatgtgttcttttccctttgaagtgttcattgtaatatttcttaaatattaagtagagccttttgcaatggttgtaatatttcatgttatacctttcaatttaagtcttattttcaaagtgagttattcgtagatacttaggactatataacttctttcaaaccacatgcaaaacactctaaagtcaaataatttccatcaatataagaataccaattttccaattgtattttgtattaacttaaatggcatggaaaaaatgccaaacagttatattaatagcacacttattagactatgcaaattctgttctcaaaaaggatctggaatatttttgtatttttctagaaataattttctacaaataatgcttcatttttcactaagtatcaattttcactttatttgttatcttaacacaaacaagaaaataatacggggactattacaagggcgtgagggccaccgcttcctaagagaatgaatgaggatgagagtaaaacattttgaatggaatgggatttaatgatgggtttgcaggttgacagccactgcctctgtatttctcattagataatgatcagcctaattgaaagttttgtagggtttttttccctctagttgttgaattccaaaggaggtcgtgcagtgtttcattgaaatcccttttattgctttgcagattttaaaagagaaaatacatctctcagtaatcataaaggcagagaaagagatactcagtttctgtcactaaaaggtaaatcctgaataaaagggagcaactcttctccccagatacattaacataagtagcaacacactgcaaaagagaaaaaagaaatcacttcagggagttgtgaaattctgttttgcttacctgagcacagactccaggagctgaaagccaggagtagcatgcatacaagctggattttcattcctgccatcatctttcagccttctaacaagccaagtccgtaaaagtcagaagcacactgaagggggctctctctagcacttcctctttccttcagctggctttgaaagtgagtgaactatgagaggtgctctggccattcccctatatatataagcaggaggatgatgtcattgattgtacagacattatctttgcaggatgtgccctatcttcacctccatccctcccctctttgccctgctttctcctccccttttcctttgtcccccctgctctcctcccccatttctgaaccttgagtgaaagtgacgatcttccctaattgctgctgctgctgctttggatttctgacgcacagaaggagtcattcaactgcactgacatacagcatacatacagcatactgacaaagaacccccagtatcatccttttcccacttctcattcccccactccaaaagttgtcattttgattttgtgaaacatgagatctgttatttctaatttttaaggaaaatctccaggatgaatgcatgaaatcagtgattccttaggcttggaagttcttgaagagttagggtgcttctctggtaattcaaacttctgagcaaatgtttagtggttccaaaactaatacaggttttaaataatccatgctggaataagatggaatagagacagagaatcagttataaaaattaagcaattaagtttagagaatagaaagaaaatcaataaaaagaaataatagatccagggaataagatattatttcctaacaaatagaaaatattttattgtaagtaatgagagatgactgaactatgtgtgctgacttttggttgaatgtattagaaaaacaatttcatgtttataaaatccagctctaaattacttacattctagcaggtaaaaatttgtgttgttgtatcactgactttttttctgtacattatctctttttatgcctatatttttctgctctttttgaattcattcttgatgccatgtctcactctttgtataattcccttctcaacagtttttactattgcatcggctttctttccctgttataatactcttttcaccataaaaaaagagattgtacttttggaaaggagacaatcctaaataaccaccattcaccaaagtcacttttctatgatagtcttcatgtatttcatgagttacactgatacccattctttgtctgagttctcaaaagaaaattgttcaaaatgccttttagagtaaaactttcttcttgtagtaagcatttcaagatacatggggtaatttgacaagtcagtgctgttagagatgtgaatatttgaatgtaaagttgtctgagtcttgtttaatttttaaataaatcaatcatgtagtaacagttgagaaaaaataggattggttcctatagataattgatttatattatacaatctatgagtttaactttttcacctttacccaaaacttaagcaaagcgattaaatccaaacatttaataattacttagaatagcaaggagtctttcatataataccagaaatttaataataactgatatatttattacttttagtttgttttctgaacttacataaaacacaatattgaacatactcacatggaggaaggtttctgtaaagtatttagttgacaaatgtgaaatacatacgtctagatgttttctgctttcctaccattagggggagcaatggaagcttgaaacacttggttttcacttaacagagtctcagtgaggatttgtgcttactttcctgttactatcagagcatctttgtgacagaatcctcttaaagccactttgattaacaaatcgggaaaattatatatactttgcatgataattaaattagttgttttctctgcttttgaattgcaaatacaaagaatgatcttttaaaatgtgtgatagcagtctaatagtaaaaaggaaatgtgattcttattttcctcagatgatttcttcaatatgttgacaaaattgatccctaattaattagaaaaaagggggagaagaattaatggaaattcattttaaatatataacatggatattagttgttaatgtgaaaattgagatatgtga

SEQ ID NO: 916576 - DNA, 4001 bp, Homo sapiens
ttggagagttgtggaaataagacgtttcggggcatggtctaaatgagtgcctgcgagggagagagaccccggccgtcccaacgctgcaaagtgtttgcaaatctaaaacattcctttgctgctaggattaaatttttaaaaacaaaccaaaaaataaaataaaatatgtgcagacaggatgtaacaagtgtttcaggacagagacacgcctgagtcacggggtgctggagaaagagtgaggagtctgtctcggggcttcccaatgagccccctctctgtcaagagagccccagggcgcacagacccccgcctcgcacgccctcagtccccggccgcgtccacccagcgccccccgcaccctccaggattgccccactcaccactcggccagaaaacctctcggtggcccgcttgactttgccgtaggtgcctttgcccagggtctcctgcagctcgtagcggtgcttcaagttgtgcttgtggtgatgccgcttcaccccgtgcggcttcctgggctccagggctgcagtcgcccccgccaccgcctctcggggagagcccggcgcccccagccccaagtcggggcggtcccccgccacaggcgcggcggccccttccatgtccaagcgcggggcgagccgggctacagagggcaagaccgggcacagcgctgggatgtcggggtccccaccgagggaagccgctgtacgctcaaggtcgcccccgcagcatcagggaggcggcccgataccgctcggactgcggctcggtcactggcggcggcggggactgcacatctggcgcccgcggcgcgcacggtccgcgcaccgccccccggccgcggcgagctgtggagcgtcgggcgaggtggcggcggtggcaggggaggcggtggtgtttgcaggagggaggggagagggtggctcgcagcgcaggagggggagtgttatgtggggcgccgcgccccccaacccctccccgggaggacgcgcagacggggcgggggcggcgctcgcgcggccccaggggagggggagcgaggggcggtgcagccagggcttcccccacctccctgcagccacccggggccggggccgccgtgagctgggagggggatgggagcgtgtcgcgactcgccctttgtgcggcgcggcgtaggccacggcggcggcggcggcggcggccaggagtgctttgtcctcgctgggccggaagggaccgggaaattccaagccgggcgccccctccccgggcgctctcgggctcgccagtcgcagctaccgcgggccctccgccgcctcgggctccggggccggtcgctcggcctggattcctgctggcgccggggcggcggttgcggctggccgagccccggggccggggaagaaagagcgccgcgagccgggggccgccgggacctgctcgcgatacggccggggccgccgcgggcctgggcgccccttcattttcttgtaggtgtcgccgcagcctggcggccggagctgggggagggggcagggaggcctggtgttcggttacaggcggtgactcacggaccttgcccgcccgaggctggcaccccgcggggcagagctgcgcccgcctggggcaactccgagtccaggagaaccccaagagcggcgctttggccccggcccccgcgccctctccgaagaaaggagagtcagggacggagggaggccgggaggctgaaccccgggcccgccgtcgaaccgccggccctccgacaccatctggaccccggcggggacagccgcctggaaggggaggaaggccagggacgtggaagagatggggctctaaaggcgccgggacggagctggctccccagaggcgcccaccctgccagcgaaggccgccatcggaggtgggcaaaccagggacctggggtggaccaggaccccgggcctgctgagcaacccgtttgctgagcaggaggcgatttgcaggcctcttgcctccttaggccttgggagatttcctttcactgaaagggccagatcctggcgatggtgacaggaacggtaccccgcacggtaagggtcaggcaggaagggcctcccaccgcggcgtggctgccgccgttctaagaagagaccatgaaaaataaggaagaaggctagagaaaaagaggtcttagggaaatttttttttttaacaagtggtgcaatgtaccagactagggtgggaagagtgaaggctgaagaaggtctggtgttctgcagatcgcatggcggttcttttccaccagtggacctcactggggcctcctctgcagctctcaggtgcagcccttcctctacattcccgccgccttcattcctgtctacccctggtcaccttaccccggactccagcaacagcccgctctccccaaccctccccgggagcctcctcactgctgccagagtaatggcctgaaacactgccctcatcctccacacgtgtctctgctgtactctgacgcgtgatattcttacctgtccaaactttccttctactgatatttcacacaaacttccctgccccttcttcccttccccaggagcaatgacagaacacagacacaaaggcgcatcatgcctattcaattcctattctgtccaccgcatttgcagggcctccctgccacccacccccatcctgaaactgttctgcttctatacagtttgtggacgttgtgcctatagatcccacagtcaggatgagtggcatgcaggttgagtcctggcttcccagaggattggctgtgtggccttggtcaaatgacataacctctcagagcttcggttttctcttaagatatggatttagcagatctattgtagagataaacacattgtgtctacagtagtattttaaaatattttctacttcttcccctcccctgcgatgtggtagaaatccactaccccatcctcttgaagttagatgagaccatcggacttgcttaggccaatggaatgagagcagaagtgattgtgttgctttcacttggaacctttaggagccagtgagcaaatccccatgtcttctttttcctatcttgacaatcatggtggtacaaagttggagcctccccaagccagcctgagtctctgtgtaaagatggcagaaaatcccagccaatctgcattggaaaagtagtgtcagcaaatattaaactttatttatgttaagtcagtgggatttgttaaagcagcataacctggcttattctggctgatagtgttactcccagatatgtgggacttcatcagtatctattgaatcaacagcatcatctaccataggctggtactgttttatgacagtaaaccctcctctgtaaagtagctgtttacaatccctattttcaattgaagaaaccgtatcagaaaggttaagtaatttcccagaggttacacagtttgtaaatggcaggaccaggatttaaaccctacctgtccagttccaaagctcccccttctcctttcatatatgccatgctccgtctccttaaatgggaaggatgaaaaacacccagtacaatgcctagcacacagtcatgcccaggcactgggagttcctctccagactgaattcctaccacgtttataattggaaccacacttcagcacaatgctatcaggcattgtgtgtgaatgttttcacatcgataaagcattttctccaacaagagcccaggctccttgattaagagcttcagatctagaggcagagtgactaggttcaaatccctgttccacctcttatgatcatcttggataattgttttccccctctatgcctcagttctctaatctgcaaagtggcgatggtaactttcatgtgcgtctgtgtgaagagaccaccaaacaggctttgtgtgagcaataaagcttttaatcacctgggtgcaggcgggctgagtccaaaaagagagtcagcaaagggagataggggtggggccgttttataagatttgggtaggtaaagga

SEQ ID NO: 916577 - DNA, 4001 bp, Homo sapiens
ttcaattctcaacctacaggttatcagatttacaaagttttatacaatggatttttctaatacattctccaaaacttgctccctacttcaccttacctaatgacacgggtctcttgactcaactagaggctatgaatttagtatttatttcagtagaaataatatccaagcataaaaataatcatttatttttattgctaaagtaattcctaaagcttctatcagtctttgctttaccataagcacaatagagatcatcatttcaatttccatcactcatattttcccctagagtctagtatttttacaaagcctgaattccaagttcacattatggcaacacttcagtcaccactttcagataggcttccaaacttagcctcacaaaaatctcactcactcaacaaacagagcccaacatcaggagtaaggactggaccctgaatcctgactctaccacttcctaattgtgtcatttgggaaggtacttatgctctgcaactgtctcctcacctataaaatgggagtaacttcactacctcccagtgttaaaaggattaaatgtataacaagttttcttctggcagcgcctggcacattgtaagcactcaattaagaatatcattacacaatattgaggaaaccagacaagatccttgatctatcttgatcccttttggctatcatttcttttatatttaaagtttactactttgcctcaacatggcccctttccgctaaggctttatcttttttacagaacacacttaatgcttgttgacttgttcattttgtaaaagttaataacctttccctttgcagtttctagctctcctaagcagacccatctcaaaggctggggccgtatttctctgcacactcgtttgggattcaagtctaatacgtaaaggttatgagtgagcacagagcaacccatttaaagggcttggtttcttttcaaaaaaaaataaaggcaaaacaagggtttgaagggcaaatttcgagaacttttcgttaacataacaagaactaagccactgagtgtattctgtgtcatattcatcacaactacagggactagcagtaaggaagccattaaattcccatctccagccttagcctagtattttatacacggttggttatgaaagcagaactcagaatgttaatttttttcacctatgtaatttatcttaagagtggcaataccaaaaggctactattgccctaagcaaacttcaacagttagccattttaaataaatactactgaattaagtaaaaatcgctctccagggaaaccccaagggtctcattctcagcccaatgcagatgggtaaattatccaagaacgactgctctgagaacgagaaaggctactcctttccagatgtcaagccagacagcaaagaaccctttatacataagctgagagctggagattactgtctgaaaatggcagctttgcccatctctagtccatcgtctcccttttggcattattccacatttttcactaaccatttttctgcagtcagaaaactttaagaagggaaggccgttttaaaaatgaggcataattatgccaacagcttgcgggttcatggacccacaagaattgccaagactagactcaattccaagcacgaggactgtctgttactccacaaacatgcttagatcgaatccgagaccgcaaacggctgtaacatggaaggaaaatatgtaaaagaggcacaagggctctgctgcaacactcacgccatttccaccctcctctcgctgagcactcgaggtttatccggctttcaactcaattcgcacgttaagatggtgactcccgctaggcgagacttacgcggcccgggaccttcccggggaccaggcgccttctcgagtgcccagatggagaaactggggctgggcgagccccctttgtctcatctatcagcccagagaaaggaaggaagaagtgagggaggaaaggagtgagggaggaaaggagggagggaggaagggggctaatccctcccagccccgcagcctgcgcaggggcggggagcgaggggaagcacccgggccctagaccccggcgccccggagggcagcgtgcggcgccgggcgccctacctcgtcctcctgctcgctccggaagcacaggcacgccgcccgcttcttgaagccctcgcggtcgtaggtccgcgtctggttgggcttgaacttcatcatagaggcgggctcctgctgctgctgctgctgctccggccgccgccgtgggggcccggccgccgccaccccgccggggagtgggggcgagggcgagtcgggcgcaggagcgcccgggagcgctagtcggtgcgggaggtgcggcgaggccggtcagtcccggggccggcggccgctccgacgcgggcgggacgggacgctagcgcgggtcactggaaccagggtgccgagatgaaagctccgcctctgcccagttgtccgccgctctccatggagcccgactcccgctcgcctccgctccctccggccgtagccgccaggggaagggcggctagaggcgcgcgccacgcggagacagttgcgaagacccgctcccactgagcagcagcaccgcggcgaccgcgcgccgccccctctgctctgtttaaatgaagcccacatgcgccccgcctcccccgcgcgccactgcgcctgcgtgcagagaccattgcaatggggtgggtgggtaggtgtggcgggggaggtaggggcgggacctcggccgcccggtgggcggggccgcgcgcactcccgggctggagttcggcgaggccttgggactggcgctggagcccagcgtgggatgaccgtgccccgaaaacatgccagtgaatggaaagaagccaaggtcccctccctccctgcttataccctcaactttgccaatgaggaccctaaataccagctgcactacaggggatgtaactacatacaccgtcaccaaagttgcagcctggccaagaaatgccaggggacgtcgcggcgattgcagactccgcggtgactgtgtagatacgtccagaattcgcccttgtagcgcggggagaggcgagagtgaaggcctagaaaagttaagacgttaactgttttttttttctttgttttcacaaatggggggtaggcaaatttcctttttttttttttgtatttaaatttttaatctttggttggggatggcttgtattatttaaagagtcaactctagcttaaacgtttctttgaagctgtctataacatcccccactttgtgccaccttccggaaagtattaatactggcaatggctaatagttgcgaaatggttttcatgtggatctcatgctaagtaacagcgcagctggatgctggggccacagcactaaaatataatgggatttctgctatctgggagcttacagtaccttggggacttggaacaaacaacctctacacttcagagtgttagaagggctaagataggagccaggaggcctgatcttaaggtagctcgagaaacccaaactcaggccattctgcccttccacagaggcccaggttgcttgggtcctgacttggttggttggtttttcaccccttgagggcctattgtgtgtcaggcactggcatctaacaaaaccagtcagcccctgcctctccaggagcgtaggcacctgagagcacaccgtcaaatattaaatgatcacacgtgtacacgtaaaactacaaatgtaatgggctctaaggtttcagacaaagatttgaccagatctgcagtcagaaaaagattattggggcagcaaggcaggagctgagggctgaaggaggaggagctaaattgaccaagagctttcaaggcaaagggaactgggatttctgcagagcccaaagtgggagggagtgaggagagttctcagaaatgaaagaaaaggccagtgtggctgcagagcggaggcaagctggttccgcctctggcagaggg

SEQ ID NO: 916578 - DNA, 4001 bp, Homo sapiens
cacaatattgaggaaaccagacaagatccttgatctatcttgatcccttttggctatcatttcttttatatttaaagtttactactttgcctcaacatggcccctttccgctaaggctttatcttttttacagaacacacttaatgcttgttgacttgttcattttgtaaaagttaataacctttccctttgcagtttctagctctcctaagcagacccatctcaaaggctggggccgtatttctctgcacactcgtttgggattcaagtctaatacgtaaaggttatgagtgagcacagagcaacccatttaaagggcttggtttcttttcaaaaaaaaataaaggcaaaacaagggtttgaagggcaaatttcgagaacttttcgttaacataacaagaactaagccactgagtgtattctgtgtcatattcatcacaactacagggactagcagtaaggaagccattaaattcccatctccagccttagcctagtattttatacacggttggttatgaaagcagaactcagaatgttaatttttttcacctatgtaatttatcttaagagtggcaataccaaaaggctactattgccctaagcaaacttcaacagttagccattttaaataaatactactgaattaagtaaaaatcgctctccagggaaaccccaagggtctcattctcagcccaatgcagatgggtaaattatccaagaacgactgctctgagaacgagaaaggctactcctttccagatgtcaagccagacagcaaagaaccctttatacataagctgagagctggagattactgtctgaaaatggcagctttgcccatctctagtccatcgtctcccttttggcattattccacatttttcactaaccatttttctgcagtcagaaaactttaagaagggaaggccgttttaaaaatgaggcataattatgccaacagcttgcgggttcatggacccacaagaattgccaagactagactcaattccaagcacgaggactgtctgttactccacaaacatgcttagatcgaatccgagaccgcaaacggctgtaacatggaaggaaaatatgtaaaagaggcacaagggctctgctgcaacactcacgccatttccaccctcctctcgctgagcactcgaggtttatccggctttcaactcaattcgcacgttaagatggtgactcccgctaggcgagacttacgcggcccgggaccttcccggggaccaggcgccttctcgagtgcccagatggagaaactggggctgggcgagccccctttgtctcatctatcagcccagagaaaggaaggaagaagtgagggaggaaaggagtgagggaggaaaggagggagggaggaagggggctaatccctcccagccccgcagcctgcgcaggggcggggagcgaggggaagcacccgggccctagaccccggcgccccggagggcagcgtgcggcgccgggcgccctacctcgtcctcctgctcgctccggaagcacaggcacgccgcccgcttcttgaagccctcgcggtcgtaggtccgcgtctggttgggcttgaacttcatcatagaggcgggctcctgctgctgctgctgctgctccggccgccgccgtgggggcccggccgccgccaccccgccggggagtgggggcgagggcgagtcgggcgcaggagcgcccgggagcgctagtcggtgcgggaggtgcggcgaggccggtcagtcccggggccggcggccgctccgacgcgggcgggacgggacgctagcgcgggtcactggaaccagggtgccgagatgaaagctccgcctctgcccagttgtccgccgctctccatggagcccgactcccgctcgcctccgctccctccggccgtagccgccaggggaagggcggctagaggcgcgcgccacgcggagacagttgcgaagacccgctcccactgagcagcagcaccgcggcgaccgcgcgccgccccctctgctctgtttaaatgaagcccacatgcgccccgcctcccccgcgcgccactgcgcctgcgtgcagagaccattgcaatggggtgggtgggtaggtgtggcgggggaggtaggggcgggacctcggccgcccggtgggcggggccgcgcgcactcccgggctggagttcggcgaggccttgggactggcgctggagcccagcgtgggatgaccgtgccccgaaaacatgccagtgaatggaaagaagccaaggtcccctccctccctgcttataccctcaactttgccaatgaggaccctaaataccagctgcactacaggggatgtaactacatacaccgtcaccaaagttgcagcctggccaagaaatgccaggggacgtcgcggcgattgcagactccgcggtgactgtgtagatacgtccagaattcgcccttgtagcgcggggagaggcgagagtgaaggcctagaaaagttaagacgttaactgttttttttttctttgttttcacaaatggggggtaggcaaatttcctttttttttttttgtatttaaatttttaatctttggttggggatggcttgtattatttaaagagtcaactctagcttaaacgtttctttgaagctgtctataacatcccccactttgtgccaccttccggaaagtattaatactggcaatggctaatagttgcgaaatggttttcatgtggatctcatgctaagtaacagcgcagctggatgctggggccacagcactaaaatataatgggatttctgctatctgggagcttacagtaccttggggacttggaacaaacaacctctacacttcagagtgttagaagggctaagataggagccaggaggcctgatcttaaggtagctcgagaaacccaaactcaggccattctgcccttccacagaggcccaggttgcttgggtcctgacttggttggttggtttttcaccccttgagggcctattgtgtgtcaggcactggcatctaacaaaaccagtcagcccctgcctctccaggagcgtaggcacctgagagcacaccgtcaaatattaaatgatcacacgtgtacacgtaaaactacaaatgtaatgggctctaaggtttcagacaaagatttgaccagatctgcagtcagaaaaagattattggggcagcaaggcaggagctgagggctgaaggaggaggagctaaattgaccaagagctttcaaggcaaagggaactgggatttctgcagagcccaaagtgggagggagtgaggagagttctcagaaatgaaagaaaaggccagtgtggctgcagagcggaggcaagctggttccgcctctggcagaggggcctgtgaggcctgactgagaggctggggaccactggagagctcagagcaggcactggtctttctagtctccaacctcctttagatttgggactgctgcatctaactcatcttgttactcccagagcccagcagatgtaagtttgtagaatgggttagtgttgaataaataatttaaggaatgaggcttcaccacaattagaaatcttatcaagactgcgcagagatgttttccaagccattgatttcttattgaaggcacttgaaatttaactatgtccaggatttacaaacacaggcagaaaacatctagctggggagtccgctatggctaatatgtgattattatttttggataattggttcacatcaataaagttattaatcctggcttggttgcacaggctagagtgcaatggtgctgtttcagctcactgcagcctccatttcccaggctcaagggattctccggcctcagcctcctgagtacctgtaaccaccacagttgcatgccaccatgcctggttaatttgtggatttttttagtagaggtggagtttcaccatgttgcccaggctggtctcgaactcctgagctcaggcgatctgcccacctcagcctcccaacg

SEQ ID NO: 916579 - DNA, 4001 bp, Homo sapiens
ataatcaagcttatataagtgaaacgagaatatagcatttataaagaattttatcatcacagttggagtaaaggaccctgagtaagttaaggtatagtcattctagtagccaagtcttagatcttttgttgagaacgcactcctggctccaaatcctgcttattcttcaaagccttactcaaatcttacctgcacaaagacttctctgactttctagtactcactatgttattttctcctaaggaattatttcaacacttggaatctatattataacactgttttagataattgcttcatgaaagtgaatcttatttcccttgttggattgaggagttacctaactgcaggaattctctcttaaaagattttctgcagtctccaaaatgctttaaaccatgggtactattaaaaaacaaacaaacaacaacaacaacaaacagagcttgcaacaacaacaacaaacagagcttgtgagatagaagggtaagtaaaagaattgtggtaaattggagcaaaatgacccttcaagttatttcaacccaggaggtctcctgtcccatcacaacactccctgtcagtttcactcaaaggtctagaaactaaattgtgcggactaaaaggcctgtgtttaagacaagaatctaatatgcttttcctccacttaaaaccttcagatattccttcagcaggaaagtatgggaaacaaccacatagaaacaattttaaacgtttaacaattaaaattaaaaacaaaaaaaaaaaccttcagatagctctctggtctatagaagtaaaaatttcctaaaatgatatttacaatgtgaccccagtttaggggttcagtcttctattcagccacaaacatcactttaaacgtatactgcatgtgaccactgagctacacgtacttttttttcatatcctagcacctctgaatatgcttcttttacaaagacctacatttgcccccttgagcacctggtcaacaactacttactcctcaaagagcctcaggtaggctggagacacacagatgcaggttggcaatttggttcttgtatttattagcttccgaactttcagcaagttccttaacctcttttagtctcagtgttatatatgaaaaaaggataacagtacccatctcataggatttttcttgttctgaagattaaataagctaataatatatattcaacgcctttagaacaatggcagtcacatagtaggtactcaatgtttggagtacgaataatgtactcttattattcaaagaccagctagaaagttaccttctttgaggggtcttcctgatagttacagtgacaaggagacttaatcgcccccaaacacttaccactttacactgcttggttgtctccattacacaactaattccccgaggggaaggatcttgaataactgatctttgttgtaggcggctagcacagtacccagatcatagagggaactcagaatctgatgctggcacttgtaatcagaaagtctgggctgagatcccagtatcttcactgactggctttgtgatctcaggctggtcacttagcatttcgaacgccgcgctacctaccccgcccaccccaggagcgaacagtgttgctgccccaaagcgccgaatagatcgcagaacgtagtgggaaagtaagggactattatgatctgtaccccaccccgacgcacgccaagcggctttttccccatttgtggccaaatttcccggcatggggaaggagccttaggggaagcacccgggacctccttggcttcttctgggagtctagtttcacctatttcgtttcgccaacaggcgagacgggcaagacttcgggctcagctgccaccatcagtactgacctgtccatggctaaagccttttccacacacaaccaaagttggctgcagtttagctaccgcgttttagccttcccgctctccggaagcaagcccttcgacccggaagcagtctgtccctaaaacagacccacagaaaaggggtaggggagaagaaacaacgttcccatctagcgcatgcgcgacttcagcctacaggtgcacgcccggtgggcgcaggcgcaaaagtttgccaatgtgttcctggttgcgtttagcccagacgccctgcggccgctttgcctgaccaaagtctgtgggcgtggaacaggccctgggttctcctactgggaagaatgaagtatgttgatagtctggaaaaatgtgaagtcatttcctggtattctctgtcagaaagcgcctgttcttggaattcagatgcgtgggctctgccccacacctcggggatctctatctctctgcctacactcagtcctttgttctgtagccccctgcagtttttgcaactattttccataactgctatttgttctttacttggtgttctttcctattaaggagaaaaagttcacctgtattaaaaagtagaaaggcaagcgtgaaatatgatggtattgccctctatttcaaagtgccgtctaggcaaaaagtggtgtattttggtcttgaaggagtcagtcacatttttgttttggtttttgttttttccagtttgaaagtagtgactggctattaactgaccagattacaaaaataatgttagatgcttcagtttatccgtttaataagcctgttgatatagtcttttctgttgctggcatttataccttttattaatacaaaataggtagtccttcattctccctcgtggagaagataatttgaaggatcacaggaacttgagtttttcaacagcatagatctcatgaatcagattctccagtcagatgatgccatatttatcaggaaatctagcaatcaaagcgttatctgttaaggtaatttgtttattgattttgccataaccaatttgtagatcagttcatttactgatttcaggttcaggtactccatgtgatatatggttccacaatcctcagcgtgttaactgaagccttgttgagtttaacaaagctgccattgaagatctggggaaagtgaagaagttgcaacagagttttgggctcacaccattgatacatttgatccttaaggcaagtgacaatttgggtttcacaggtatatagaaattgccagcttttcttgccatatatttcttgtgacagtgctgagctttttttttttacttcttgcttgcttttttttggacttgattttttaaattatgtttccttccttccttctttctttgttttttttttttttgagacaggatcttgtcctattgtcccggcttacgtgcagtggcacagtcacggctcactgcagccttgacctcctgggctccagcaatcctcctacctcagcctccctagtacctgaggttgctgggaccacaggcacgcaccaccatgcctgacctcctctcctcccccgttttttaaaaatattttggagaaatggggtcttatgttgttgcccaggctggtctcaaactcttgggctcaagccatcctcttacctgggtctcccaaagtgctgggattacaggggttagccaccacatctgacagtgcctagctttttcatagatgtagctttctccttgcttttctttttcttttttttcgagatggagtctcattccattgcccaggctggagtgcagtggtgccatctcggctcactgcaacctctgcctcctgggttcaagcgattctcctgcctcagcctcctgagtagctgggattacaggtgtctgccaccacacccggctaatttttgcgtttttggtagagatggggtttcaccatgttgtccaggctggtcttgaactcctgacctcaggtgattcacctgcctcagcctcccaaagtgctgggattacaggcgtgagccactgcgcctggccttctcctttcttttcaaagcattttatgggcaaacttctttctcaggcacttgacctttagctctgtgaaattccttcatgtgttttattttta

SEQ ID NO: 916580 - DNA, 4001 bp, Homo sapiens
agcaacaaactgaaactttcaattcacacttcctcttaaatatgactatattccaatttgtaaagctttatatattcattgtgctataaaatgccaaattgcatttttgatgtcagaatactgtaagatacagaattgccgctgggcatggtggctcacgcctgtaatcccagtactttgggaggctgaggcgggcggatcacgaggtcagttcaagaccagcctgaccaacatggtgaaaccccgtctctactaaagatacaaaaaagttagctgggcatggtggcacgtgcctgtaattcgagctactcaggaggctgaggcaggataattgcttgacctcgggaggcagaggttgcagtgagcagagatcgcaccactgcactccagcctggatgacagagcgagactccgtctcaaaacaaaacaaaacaaaaacagaattgccttctcagtaaaggaggaaataacatttataataactatcactttagtgatagttattttaaatctttgaaaattggacacttccaaattaccgtgctcattataatttgagaaatacggttctattaataatattctgctaggccaggcagggtggctcacacctgtaatcccagcacttgggaggccgaggtaggcaaatgacttgaggtcaggagttcgagaccagtctggccaacatcatgaaaccccctactaaaaatacaaaaattagctgggtgtggtggtgcatgcctgtaatcccagctacttgggaggctgaggcaggagaatcaactgaacccgggagatgaaggttatagtgagccgaggttgacctccagcctgggcgaccaagcaaaactctgtctgaaaaaaaaaaataaaaataataataatactctgatagacaaaggattaaccagatagtcctgagggttgaaccttcattgttccaagtctctcttacatgtaaaactagctttcctctgggaaaacatggtttatgttcaccacaaagcaatcttactttggtgattaaacctgagagtgttaccactgctcgtatcaatgacaactaaaacatacatatggattacaatgttgtcagatgccctcttggaatttttatttagtatatttacatatactaaaattcaagcattagtttcctcatgtttacaggagatgctaaatatcttattcaaggtctcatagctagtaagaagtaagtaaagcaggagtaaacatgtaggcattccagttctagaattcatgctcttaatggctatgcttaactgcctgctcaattaatatgactccatattctgcatacattagatgcacaaaaagtatgacagcatactaataggaaagctgaatattataaaagctataaaatctcctggaagattgttttttgggctctcaacattagctggttttgtatgtcaaagcaggatgtagaaaaaccgtaattaattggatctcatttatattgtttttttcctgtacataccaatgttcagttaatcatagccttcacttatcagaatattccattaatgatcatgaggcaaaagtgaagcctcataccattctttttcactatctatataatgtttacataaatctcaggcacatataactgggaacatctttctctatggatcttatcttttttttttttaacattcaaactcaatatactttcaaagtttagatttggtttgtgtaagttctcttagtagtgaaatatgttcactgtcattcggtgcagttttgtagactaacctgaaacgtacacgtgccaatgaccacataattattgccaccatatgcaattaggtttcctgaatccccattctcaaagggattaaattctaccacatgcacataatcttcacaatccacagtgtaggcagcatttcttgaggcatcttgcttcatcttgtatgtcaaaattcaagcagttgtgaaaattaaatagccttctactggacaaggtcacgaaactgtggattagagcacaggtacaattacaatggtcaatatgttagtcattcagcaaatgcatcaaaataaggttgtggtgttacaatgagacagaaagctcaaaagaaacatttaaagtacttatcaagggacagaaactgcaggaaaaatattaaatctagttattaatggttccacatttgctccacagctctttcccatatctgtgattctagcagacaataacactgcaaagttctgtttagattatctaaaacaaatagtatttcatctgaagatggaatcattttaacagcaaatgttaataaaaattaataacttttatgaaccactatttgtaggtaccatattaagcattttactgacatgatcacatctggtatctgtacaaatctaaaggcaggtactacctctggtctccattttgtagatggagaaactgaggcttcagtaggttaactaacttgccaagctcataagcagggccaggatttggaagacttcattgtgtgtggagaaccagcgctaatgaagaaaaaaacagcctcctggcttgaaggagaccacagtttagggatagttatgactcaacgtgaaaagggctataatataaacagatagaaaatacaggatctgttgttaaggagtaccaaaatgtgtgatataaaaataatgttcagggggttgggcggagggagagcatcaggataaatagctaatgcatgtggagcttaatacctaggtgatgggtgtgcaaaccaccatagcacacgttttacctttgtaataaacctgcacgtcccgcacacgtatcccggaacttaaaaattaaaataataatattcttaaaactaggcagaagaccttaacctgtcagggactagtgtgcattctggaagtagcattcccacatgagaattatgggttttagagtttttggttttttaaaaaattcgacacaagggttgtcctgaaaacagctggactcagtaacaaacatatcaagcaccttaagagtatgtactgagaatgagtcccacctcgagacgcttataaactagtaactttaggaatggacatcagggactggagacttttgaagggtgaccagcaagtgttatggacacggagacagagaggtatagaagtgcaagagattcgaggtcacgaaattgttccgtccctacacctactgctcattaaagcagtggccggggcctcaccgtacacgttggacaggacttgcccctgtaaaactacaacggcagagaagaagggagggaacaagataagtctctgcaatgagcgccgacacctctccccgggccaggcgagttcctcaagaccccgctcccacctcccggggcccgaagtgggaaggaagaactcctgggaatagagtggcaaggctgggcggccggcagaaaagcatcccggcctctcgggctcccagctcgatacgcaccgcagagcgccaggaaccgaccagaggcaggctggtcttccttgggggctgccgcgacgcgctgtggctctgcttccgggtcggagggcgagcgcagcgattggctcccggggcctcccgcgaggtttgaactgtattcagcggcgacagcggcgactgcggcggccgcgggagggcatcccgttggggatccttccgcacactgaagagtacgtcttcgggtctacccctaatcacgtaagtctcgcgtctgccctacctgccctgtcgcatttttaagtggtgattcaggctgtggcttttgagggtgttttgcactgtaatacctcggtcgtagcaaagtgccgtgggaccgaagtattatggtgcagtgacttgacgctcgagcctggttgggcctgggggctgtaggcggagttcacagtatctagcgatggagctggtaggtcctgagggttcgtctgcagcttggaagacaggcccgtagaggcctgcttaacttccattagttaggcaggaaacctgggttctagtc

SEQ ID NO: 916581 - DNA, 4001 bp, Homo sapiens
tattcacacacccgcagtgtgtacacatgtaaacacattctcacatgcacataagctgggctaaccagcagatccactctccctgttgactccaacacggaggccccacagctgcagctcacacacacacactcagatagatcccattgctcatatcctcacgctcactctcactcaagtctccaccagatgtttcattccccctcagggggcaaaggaaattaaaccagatctgtccacaggggagtttatttgcctgggagagtggagatgaggtgggaggaagtggaaaggaggggcaagagaatgccatacctaccacctcttgaccccaggccttcacacatgggtgggtgggtggtagggcacagaccccccccactcctccagttcactaaggacagagttgggcagcaagtccctaagaagctcctgctagtggaagcagttttcatggaggggctcctctgcctaccgtgcagcccctcaaggtcaccaggtggggctgggagggccagggagctctaatgctagcttcactggggcagcccctgccctgctggggtttgccaaatgtgatttggctgagcaggcagaggtccaagtgttgggggaagaaatacaccccttctagactctacaggggctgagggtacagagaatgagggtttggggaatgacctgcctgcccccaaactaggtaggtcacagttgggggtcagaaaacagggaagccataggcaggggaggctggtagaaggaaaatgggggactggggcctgggcccccattgcgggcacacaccaggggcataggcagatggctgcactgtgaggcaggcactgacactcactcatgcaaagccaacaccacacaccacaccagtatacacatgtaccctcggccccagtactggaccaagcctggcttccctggacacatgcacacaggtgcacacggtgacccacgccctccacccagcacatatgagcacagcatgttcgcaggttgaagcctccaagtcaggaaggaggcagatcaagtctgagctcccttagcctctggctcttcgcccgagagcctcagggaaagaggccttggagtggggttggaggcagggagggcatgggaggagagactccccttccagacagcctcccccttcagtggggcacgagaggggggtgtgtctgtgaggtcgtgcaggggagatggtgtctccgtgggaaatgtgatgggaggctggctgtagccaagttcagccgtgtctgcctgagtccgtgtgtgcgtgtgtgctcgggccatggatgctcccgacacagagcccacctggcatggtgacaagtgcagagaagagaaatgggaaggcgggggtggaggggtggaaggacagacagacagtgaggcaggcgagcgagactggcgcggaaagacggcaaggctgacaccctgctggcttgtctgtctgtctcgcactcccgctctgtctggcgcactcgcgggtcgggcttcgtcccctcccccgccgcgcctgaagtcggctgcaagggggacctccgcccggcaccctctccaagcctcagccaacttgcgctaggagagtgcccgtcctgaatcgggcagtctgtctgtccgcttcccccgcgccgcgcaaagttgggacgctcggagctgggggcggggcgggcgcacggagcccctcgcacactgggaccttcgcgtcccggaaccccgcgcccgcgctagcgccccagccctgccactcttaccttcctaaggagccacgggccaaagagcaagaggaaccattccgggagcagccgcatcttctctggcggctgagcggggcaggctgggcgggtctcgggcaggcgggagccaggcctagggacgcggggctccgggcgggcggcggggcggctgcgggagcggcgggagcggcgggagcggcgggagcggcggcgcggcccgcggactgggcgcgaggcgcggagccggcgctgggggcggggcgcgggcgggggagaaagttgggtctgactccgcgggcggggggcggggctccgcggcgctccaatcccggccgcgccccgcgcgccccctcccgcccagctgggggcaccgaaggtgactttcacaccggcacgccccggacacgcccctggcccaggtgcgaagcggagggggtcgaggggctcaggcactggtcccccgagaggccgcgtctgtgcgcccaggaggaacggggcagggcgtggggctctgggctccgggcccgtgcacctggagtgggggcgccgcggagcccagccggacgacgctctccaagccccgggcctctgccctgttcagggccaaggtgtgtcggggcaggcgcagggcaggggccgaggtggggacgggcggggcctcgggcggctgccgccgcgcgatgctgacggggatggatgggcgccccgcggctcattcggcccggagatgagaatcattgatcacggacggaaaccccatcacgtctgtcaatagggctgacaaacggcgccctccgccccgtccccgcctcaccgcacctctgcggtctcaggacccctcggctagaccggctgttcacctttgcccctggcccccaccactgacccccacgaggcccagtgcgcctctgcatgggggctgggcaggaaatccctctcagcgccgcctgcctggcctcttggtgcagtctctgttcctcccctcccgccgtcccatctttcaccaccagctcttctagatccttgtccccattccctatctctgtccttgtctctgtccccagccccagctctctgcccccatcctcttctctgtttcttcctcggttccctcctccccactgcctctctctctcctgcccgggtggtttcagctgtcagctgttgctatgcactgaggctgtggctgaggttgtggtatgaccaacacctagacagagatagggacaagcaaagagactgagagacagacacatcccttgagagcccaccccagggatgcacgcagatgccttcacggggacagggcacacagagcgaaatacagagacaggcgcacacctagcggcaccccaacacacagaggagcacagcaacagaggtgagcacacctgcacccagacgagcacacccagacagttgctcagtgcgctcaccctctctttgtcttggcagagagcaaacacccacagaggtggacacacacactgagacatacacaggtgtatgctgtcactggcagcccagaagacaagtgggggcacatacaaagaaatggacagatagatatgggacgtgacagccacacacacgagtcaggaaaaggaccggtgctgagaggacgaggcagattcagagacacccagggagacaggcagaagccaggaggcaggaacctgggtgccggggtgggggtggagaggagagaggcaggaaggggcagaaatgttcaggctcaaggccaaaaggccttgagccagaaccctgagcccacgttccaggcacgggggctgcttcagtagtaggtgggaacagtgggcacacctaggcgtaggctgtccaggacagaagcccattaccagggtcctggtcttctgggggccgaacccactgcatctctcctcctttagctacagtctcaggccacctgttctctctccagttacacacacacatgtgtgcgcgctcgcacaaacacaagtgcaaacacacacatgcacactactcgccctgtctctgggtctttgcctctgtccccctgtctctccgcctctgggtttctgcctctcattcggtatcagcttctgtccctggttctcagcctctgtccctggttcttcccatctctcaggccaaggtgagggcttcccacctgcctcccgggtgggtagtttgagaaactgcctcctggtggaccttctcctagcaggtcctgacaggcggagtgggggatgctgactggaggggtat

SEQ ID NO: 916582 - DNA, 4001 bp, Homo sapiens
ctcccaccctgctttagagagatgccctgttggggcaaaaagctctcaaactgtgggagatttctgctcagaaatgggaagagggagaaaaagaagctgggagctctcacccagggcatcaaaggcaggcagcacatcgaactccaccccctccccgagctggagcgaactcagtacgaagctgagcgcacgggggttgccccagcgtggagcctggacctcaaacttcacggaaaatgctctctctctttgacaggcttccagctgtctcctaatttcctggatgaactctccccggcgatttaactgatcctgaaaagtggtgagaggactgaggaagacaaccaggtcagcgtcagatcggcctctgagggtggtgcccttgcctgaggagccaccctgaaaaagacgacaaaaataataattgatgcttagtgaggcaaacctccctaaataaaatgacaggagcaatcactaacattatggagcactagccactgttctgaaggcattgcatgtcttaaactcctataatgctcacaatgatgctatgatttggatgccattatcattagttcccattttacagatgggaaaatggatgctcagtgagataatatatcagccccatcacccagctagtaggtggcaaatacaattcaaacctgggggccttcttccaggatctgtgttcttttcccattgtcctttacgatgcccaggactagcttatgctgggtggttcacacttactattttacttaatctacacggccctatgaggtattgagggaaagtagaggaaaaatcagttaggtaaatggtcaaggctgggccctggaggagcggcctgcctgaaactggcgcagggagtgggacttacctaaaacaaatccacagttatacatacaagagaagcagcgctttatgcttgcctagagatatacccacagctgcataaggtaagggaagttgcacagctttactgataaaaagtttctcaaacagttacagggaggagagtggtttcttataaaagttttttgcattcagctgcaatctggcaatccactcagacttccctctccacagtggagacagctttcttcttttgcttactgaacttttgctccaagctcacgtttgtgtccatgttccttaattttcttggatgcaggacaaagaaccttgggtactaattcagtgagaagctgctacattaaggtgcactggcaagactgcaacagtattggggattatggctgaggaaattggaacacagagtagttaagtgacttgctcaaggtcttgcagccagcaggtgctatttgctttcaaaacatatgattcttcactgcagaaatggtgagcccctagcctggccacgaattagcaaactgtttaccagagctgggattcagttccctatttctgaaatgggcatcgcccaggacagtggttcataaacttcagcgggaagtaggggggagggtcacttgttaataatagggatgtaggatttcaccccagaatctattttaacatgctgtgtggataaataagaaaccaccatcccagaagatctcagctctctgtactcacatttgcaccctgggttctaggtttttgcttctctctctctctctctctcattctcaatctcaactcttgcacattcagccacccctcccctggccaggcaggcctggactcacctttaccaccttggacacacacacagggtaggagctacctcggaagcacctttccttcaggaacccacagatgatgtcaatggcatggttgatttgcatgcggaaacacgtgtctggcaagagatagtcttcaatgaacttgtccagagatttggctggggtatttctgagatccatcattgacaggagagagagtggcaacagaactgcctcccagacctgtttgcttttatctcttctgctgactgagcttggactgctgttggtttcgtttcctcagaagggaggagctgtctttgcactttccttttgcaaatcagacactcccctgatcccagtgctgaatttcatctgctcactcttctgcttcctgaaacttaccctttgtcctttagccagcaacaagcagcccagcctttctctgaactctgctctggaaatgcattttaacctccagccaacataaatcttatttaacagattttgtgtttccttctttatcttttttttgttgttgatgaaatcctttcacagttgtctgtggtattttccagcaatacatgcccactgcaaaaagaaaaaaagtcagaaaaaccaggaagtggaaagatcatctatgattctaacactacaaaattgcctctataaacgttttgatatagagctttccagatttttttcaaatgttaacacacacacaaacacaggtctcttttctttttgttaagaatggtattatactatgcttttttccctttcaattagtagatttttattttattttattattttttggagacaggatcttgctttgttatccaggctggagtgcaggggcatgatcatgactcgtgcaacctcaacttcctgggttcaagggatcctcctgccccagcctcctgaatacctgggactacaggcatgcgttactgcacccagctcattttttattttttgtagagacaaggtcttgctatgttgcccaggttggattttatttctcacagcagttttaggcttacagaaatattgagctgaatgtgcagagagttccataagctctctctcctgccaataagttcctctattattaacagtactgtgatacatttgttacaattgatgaattgatattaatacatcataattaacaaaagtccatttacattaaggtttacattaaggttcactcttgtgtcctacagttctatggattttgccaaacataacatgtcatgtatccaccattacagcaccatgcagaatagttttgagataggaggtggggcttgactcagggccagattgaagactggctggcatgagcaccagcaccatgaacagtttactcattccctggcaatgacccagttaccacccttcttctagaaatttctgaataacctgcccttaatttgcacgtatttaaaagtgggtatgaatgtgactatagaagtgccctgagctgctgctctccaggcactgcctatggggtggccctgctctgcagggacagtcacagaactgtaaccctgctgcctcaataaacctttttcttcctcctctagctcacccttgaattccttcctggacgaagccaagagccttcccggacggtgtcccagttttggggctcccctgccctgcaagagtttcactaccttaaaatcccctatgcctcacctgttcatccctctctgagttagatctttcttctcctaatatatgcattcaatgctataactttccctctaaacactactttcactacatcccacactttttgataggctgttttttcattttaatttaattcaaaatatatttatttattttgttgagacagggtctcactctgttgcccaggctggggtgcagtggcacaatcttagctcactgcagccttgacctcctgggctcaggtgatcctcccacctcagcctcccaagtagctgggactacaggtacatgccaccatgcctggctaatttttgtattttttgtagagatggggtttctgcatgtggcccagtctggtctcgaactcctgggctcaagcgatccatctgcctcagcctcccaaagtgctaggattataggcgtaagccactgagcctggcccaaaatattttaaaatttctcttgagacttcttccttgccccatgtgttatttagaggtgtgttctttaatctccatatattttggaattttccagctatctttcttttgtgggtttcttttttaattccattgtagtaaagggcatgctttgcataacatatct

SEQ ID NO: 916583 - DNA, 4001 bp, Homo sapiens
gttaaaaaaagttgatctcatggaggtagagagtaggatcatagttaccagaggctgggaagtagaggaggaaatgaagagaagttggttaatggatacaaacatacagttagatagaagggataaattctagtgtttgatagcacaatggggtgactatagttaacaataatttattatatatttcaaaatagttagaagagaagatctgaactgttctcaacacaaataaatgatcaatgtttgaggtgatggatatcctaactaccctgatcatttcacattgtatccatgtgtccaaatatcacatgtaccccatataaatatgcacaattatgtaaaaataaaaaaacacagtagaatggacaaatgtggaatattcacataatggaattgacacaacaatgaaaagataaacaactgtaccccacaacataaatttcataaacatcataggtcagagaaaccacgcactaaagcacacagagcccatgatgccatttatgtagggttcacccatgcatcctggtttacattcccagctttcacaccaagagtcccacatcccaggaaacaccccaatcttggatgaactgggatagttggtcaccctataattgtaaaacgtttaaaaacaggcaaaacgtgtctatgctgttagaagtcaggagattgcctacctgggtttggaggtgctgactggatcgggggcccagggctctggggggctgagaatgttttgtttctggatctgggtgggggttacacagttacattgtttgtggctacctatcaagctggacactttgatctgggcactttttctgttttacttccatgaggaaaaaaaaattgagaggcaggatagtgtagtggttaaacatgcatgccctcaagccaattacccaggcttaaaatcccagttctgacaatagctattaaccaaacttgccttagcttgctggcctgggccagggctggggacaccacgtgtctagatttctttattgaggcactagcggatgtgtgcaaggggtagagaccaaaaagtgtggcagcagcagagaagggacgtcagcagctcaggaggctaagaggatagtattgggccatcaggacccccacgcccccaattctagggtcctggcatctccccagtcccccttcctccccagaggtccagaattttcagcctcagtcctgagatttgtgtccacaaaaccaaatatttctaactgataaaagccactccttcttgctgcggagaaaccacaaggcaacctgggtagtttgaacaaagttctctagcctccctaagtttactcctctgtactgtggagaggatagaagaaaatcgcagtgagtaatcacagtgaattcactgagcactgccagtcttttgctaagaacatgatgtgctcaagccttacgatactctgaagtgggtattatgcctctccccattttacagagtcagagactgaggcacagagaggttaagtagcctgcccagtgtcacacagctctggagcaagcgcctgctccagagcctgagactcctacaccacatcccacccaagtgtgggcctcgcacataataggcacccagcacccagtagctcggccttgctgccgccgtggaatctcctgcctcccagagacccaacctcagccctggactcactatggccactccctgcaccagggggaactgttcgggttcctgcaggacgtcacagatggtgttcaccatctcgtcgatcagtgtctgacattcttcgtagggcttcaggtattcctggataaaccaacccagcttctgagcaggcaccgaggacagctgggactccccatttcccattgctctcagctggctgccggcaagacagtgaatggtaggatgggaggcagaggaattcttgctgctgcccagagccaggaaactgaaactgaagtctagaggcctctctccacccactgcagcgagcttaccaactcttgtatccgggacagggaaacaaaactaacttaagctcagaggctctgccctgccccttgcagtgagtttaccaactcctgcatccggggcagggaaaccaaaactaacttaagctcaaatgctcttccccgccccttgcagcaaggtttactgactcctgcaccccagcagggaaaccaaaactgactcaagctcagaggctttccctgtccccggcagcgtggtgaccagcccttcaggggctccccaaaacttgaggttaactaaacagcctctagaaccccattgtgagggcttcatacctgctagatgtctgtccttgagcacatcgcctgccctcttcgcgcctcaattcccccatctgtaagctgggggaaaatggcagctctctcgtaggattagcttgatgattaaataatacctgcaaagtgcttagaagcaggggcgcacaggtcatcttttgaggctctgtccctttccccctgttctcagtggccagggaactcacattcagggaaagcggcagagaggaaaaagagacccagagagggaactgacttgctcagggacacacagcaaagcagggacctagctggactcaggttttggtctgcttctgggtaaacacaggcccccgtgtggtcagcgggtgggaacctctgtgtgtccagtttctcagcacacttgtggacagccgagggaccgtatgaggcacttgtccagcctcgcaagggcaagaaaacacaccccaagtgtgtgagccagaaaggagacagacatgcaactcctgtgcccagagctttgaaaacaaaactcgcagaggactcccagccagctgccttggcccagcaataataattcacagagaaggcaaaaatctccaagatgtagtgggggaccagggcccttccatactgggatggttaattttatgtgtcaagttggctgagcccaggtacccagatatttggtcaaacattatcctagatctttttgtgaaggtattttttaaagataagattaacatttacattggtagactttttttttgagtaaagtggattatcatctgtaaggtggtgggcctgattcaatcagttgaaggccttaatagactaaagactgagctcccccaaggaagagggaattcggctgcagtgccttggcctccacttgcagcagcaactccttcctgggtctcccacctgccagtctaccctgccgattttggatttgccagcctccacaatcacatgagccaattccttaaaataaatacctcaaaataaatataaataccctgttagttctggaaaaacctcgattaatgcacatgctcattaagggcctttcctgcccttatccaacttttactgcaacaccgagaggtaggcaggctgggcaggcgtagtcctaaggttcctttttcagatgagaacatggaggctcacaaaggtggaaacatttgcccgtgatcacacagctaggaagttgtcaggctaggttctcacactaacacactgcctgactccaaagcctgtgctttatttgttatttaaaaaaacactttattttgaagtaatttgaaatgctgagaaaatttacaagatgcacacaaagaacttccttagactttttagccattatattttttaccacatttgcccctcattttcttgctatttatacattttaggaggtttttgttttgttttgtttttgagacagagtctcactctgtcacccaggctggagtgcagtggcgtgattatagctcactgtagcctcaccctcccaagctcaagcaatcttcctacttcagcctcctgagtagctgggactataggcatgcaccaccatgcctggctaaatttttaaaattttttggtagaaatgggggtcatgatgtcaccatgttgcccaggctgggctcgaactcctggcctcaagcgatcttcccacctcagccacccaaagtgctgggattacagacctgagccac

SEQ ID NO: 916584 - DNA, 4001 bp, Homo sapiens
ctgtgatgtagttacatgtggctgcagatatggggagtgaggctcagatggtgaaatgagttacacagccagtaaacagcaagaaccaggatggagccctccaggagcaaggcttgcctcaaactgggaccccctacttatcccgatgattatgccagtccttttactaccagctcccaccatctgggggctgctgacaaagtgggaacagggaatattacaggctgggcacttcctgcacgttttgcacactctcatctcattgaaccttcctcacagccccagaaggaaggtaccactttacaaaagaggaaacgaaagcacagggagattgcaccgtgctcactttacaaaggagacaatgaaagcacagggagattgtgctccagaaccccctcccacccctttccagggaagctaaggatgccagggctttcccttgctgcacagaaatccctcctgtccatctccaaggtagaaacgggacttcacacctcctaggcgacaagtgtctcctccttccccacctcccaagctgagagtcagccccaggaaaccactaggtgctctgaggccatttctactctgcgttttcactccctctcctgacaacctcctctagcacacccaggttccctccatcaatccactcctggcacccccaaatctaccctgaggataaggtagctcatgacttgtctcctccctgaatctgcgagtgtcctgggatcacagtggcagtgtggctgtatttaagtgacaaaaagtgacccggagcctgggcaacatggtgaaatcccgtctctacaaaaaatgcaaaaattacctgggcatggtggctcacacctgtaatcccagcactttgaaaggccaaggcaagtggatcacttgagcccaggagttccaggccagcctgggcaacacggcaaaactctatctctacaaaaaatgcaaataattagccaggcatggtagtgtgcacctgtagtgccagctacttgggaggctgaggtgtgagaataacttgagcccaggaggcggaggttgctgtgagccaagatcatgctactgcactccagcctgggtgacagagcgagaccctgtctcaaaaaaaaaaaaaaaaaaaaaaaaaaaaaaagatgtgactcagagtagtaatttagcgtctagcctcagtttccctatccataaaacaggtacaataatacctgcctcactgaacgtggggatgaaatgaggtaatactcatttaatgagataattttcattgttatttgataatgtctcaataaattgggctactctggctgttacgcggagtgttattacttctgtaaccttaaggtctggcatagtgtgaggcccacagtctgtttgaatgactgggagaatgagtgaatgagtgaatgaatggataagaagcagcctctgagagtagagatgcaggaatcaggctacttggatttgaatcctggctgggcctcttacaggatcggacacgtcactgtacctctctgtgcctcattttctctatctgtcaagcgggcttaagagtacctacctggctcgtatgttcgggggagttagcacggggctggcacattggaagtatttgttaaagaaatgaatgaggtgcacaagcggataaagccacccccaccgtaagcctatgtgaggcttaagcgtcctcccaggactcccctttggacacataaagaccccgaggtgggacctcaccttgacagttttcagcacccgcggggcagcagcaccgaggcggcccccgcgctccctcagggcagcggccagggcgcccagagcgcgccgcgccttctctacgaactccttccgcggctgcagccttctggccacgaacctgtccagcgcagcggccggggtgctgtacaagtccatggccgcccggcgcaggtgcaaggggaagcagggctctggcgcggccttcggatttctggtttcgttttcccgcccggctctccgaaccacgcccagctggccaggtcctaggtcctcggtcccgcgcgtggcgtgaaacggggaggggcgctgcagttcctgtcttccccaaacttgggaaattccctgctttcagtttcgtttctttctagcagctcttggacctgacacccacttcctggtccccttcccagctacgacttcctctccttcatctccttgcttccagccgtccctgcaaccaccagctccaacgaactaatcacaacctaacaaagtatacccacagaacatatgggtacatactgagtaacgtactctgagcatttcagaaacgtgcaggttttacatggaaaaaaaaggtcaggatttaataaacggagaagtcctacctcgctgtctgactgagggatgcgttctaaacaccactaccaccaccaacgataataaagcacacttggagactctcactgactcctcccaacgaccatggtgtaggtgctattatcatcacccatttgacagatgaggaagtcaaggtacagaggaactaggtaactgtccaaggtaacacagctggaaagttgtctggctggattcaaacccagcccaagcccacagagctgccctcttcagaagccaactcttcctaaataatttatacgtgtaatgcagttccaataaaaattccatctttaaaaacttcaaacacacgatctaaagtctgtctgcaagaattaaaaattattttggaggagaaggaggaaggaaagtcagtcagtttaggatggtaccttgcacaacaatactacatattaaaacattgtaaagctacaatagggaaatcctcttggaatgggcacaaagctaagcggactgtaagctataagctgcagagtggagatttgaatccaggaccattgcgcttctatcttcatggcctgtctcctttttctgcttatttcctgctgcttctccacccgggttcctagagactgcacacctgagctctcttccaggcctggtccaagccatagcctatctcctcctccccatcttactaaaaaactcccaggtcctctctcctgtctgctccgggacccagcatttactctgcctctgagtacacttcaggtaatagtcttaacaagtgcttcctgacatctgcacggtaactgaaaggaaatagataggatcagagtgtgaatttcagaggtcatggtcaactagagggagagatgctgggtctgtaatatgtacaccagctaatattttgagtagtgaatgctgcatcacttggaatattcaagtatgggcaggttttgtaggtcaggtgttgtggtggggatttaagtcaagggattgagcaatgattttcattctcgcccattaatcacagtcttcttcctgagtcacaggccactttagaaactttccattcaagatagtggattgaacacatgctcaaaattctattaaaatagcagcaaagatatattaaaagcataatggaaatcaacagggttggaaactgagaaaaagtggagtcaagggggcgggacatttgaggcatttttagaagatggaacgcagaagggtcaatattgggtcatgatggtggactgaacatatgcataagccttcaacgtccatcccaggcctctagaggtggcaggaaagcgatagaaaaactttaataatgttgctgggtcctaaccagaggtgtcccaggtaaactggaatctgagatccctgtcagagatatgagactggatgaaggaggaaattgcagccaaaacacataaaggagggggtacctatgcagagtggaaaggctctgaggagctgcaggctccaggcagtggattgaaggaaaagaagggaccctaggttaactctcatggttgtcagttgtgctggcatagtaatggcagcctctaaagacatgtggtctcccgccccaacctttctgtgttgagtaacaggcagcagaggtgcctgcctaaggagggagcagtgagggtggg

SEQ ID NO: 916585 - DNA, 4001 bp, Homo sapiens
tttacttaattttttaagtgagtcattggtgagactgtctgattctccaaagtctttctagctccgaccctcttgaattttgatcttagctagcacaggcggtggcatgaaacagctggaggaagggcttgggggaaaatctcagtgaggggggcttgggtcccttgagtcaagttcaaatcccagcttcaacactgtgtgaccttgggcaagtcacctcacctctctgagcctccattaaaaaatcattttaggccgagtgcagtggctcactgtaatcccagcactttgggaggccgaggagggcagatcatgaggtcaggagatcgagaccatcctagccaacacggtgaaaccctgtctctactaaaatacaaaaaattagccgggcgtggtggtgggcgctgtcgtcccagctacttgggaggctgaggcaggggaattgcttgaacctgggaggcagaggttgcagtgagctgagatcgtgccactgcactccagcctggtgacagagcaagactctgtctcaaaaaaaaaaaaacaaaaacaaaaatcattttattggccggccagacatggtggctcacacctgtaatcccagcactttgggaggccaaggtgggcatattcttgatcccaggagttcgagaccagcatgggcaacattggtgaaaccctatctctacaaaaaatacaaaaattagctgagcatggtggtgcatgcctgtaatcccaagctatttaggaggctgaggatcacctgagctcagggagattgaggctacagtgagtggtgattgtgccactgcactccagcctgggtgacagagcgagaccctgtctctaaaaaaaaaaaaagtcattttattatcaaaaagttaaaacacatagaaaaatagatgatacaactaacactcatatacccaactagttgattcaacaagtctaaattcctggctacatgtgcttaatctaagccacgttaaagtaaattataggcaccaaggaactttgtccctaaaatacttcagtgttcgtgtccaaacaaaagacaaccttctgataaccacaaaactactgttacacctaacaaaatcaacaatgatttcccatatcagatatatgtactatctgatatctaggccagttgtccccaaactatattttacagatggttcattcacactaggatccaaccaaggacctcgcattgtattggttctgagcctccatttgctaatctgtaaactgggcaaagaatagtacctatctcacagagtgcaagaattagagatagtgtatgttaagaggttagtccagtgagcccccaaatgtgagctattattactagactcattctactcaaggcagtggtgcagtggggtgtagacagctaggtgggatggggtattctgagatgtcatcagcatgggctagggataaggaggacaggggtccccagcatccccagggacgtggactctgatactgggttttgtcttgcgtgggggctggaggagcccagtcttaccttgactaccttcagcacccgcacatcctggtccagcccacgcttcccctggaaatgctcctgcctcagaaactcctccacggtccgcacagcgtctagcacctcttccttccactcccggtggggctgcagccactgagccacgaaggagtccagcctggaggctggtgtgctatacagttcctgcatcagtgccatctctgtcccgagagtaccgctgctgggcagatatatagccaggctcctacccagctccctggcacacacctccttttttaaggtagctcctcctcagctgccctccagtgctctgtgggaggagggaccctagcagagaggaaaccaggtgtgacgggctgactccaggtcccccttcttggagacacccttgctgcagtaggggcacaggaggactctgggctgaggctggaatatctggggccaccttaacaggctggccgtctagtcaatctgtcatcagtttcgattctcaacttttagagttctcctttatgacgttgggaaactgaagttggatagtgtttgaccccaaaggaggcaacttgcccagtaggttggggttggatagttgttagtcaattcaactgcttacatctgtctaaggaaattgaggcttgggaacggaagggactcactagtgttcaggtggtggagtgagaatctggagcccaagagaacagactgggaattctagtctacctgtgccagactctaacctctttgaccctcactattcatagagtgggtttttttgtttttttgtttttttttttttttggccgggtcttgctctgttgcccaggctggagtgcagtggtgcaatctcagctcactacaacctctgcctcacgggttcaagcgattctcctgcctcagcctccctagtagctgggactacagacatgtgccaccacgcccggctaattttttttttgtatttttagtagagacgggggtctcaccattttggtcaggctggtctcaaactcctgacctcaaatgatccgcccacctcggcctcccacagtgctaggattacagcgtgagccaccgcgcccggcccatagagtgggtttaacaggtattatgattcacgcactgaaccaagaagttcatgcattgagccaagaagacaaaataagatgaggttcctgttccaaggggactcccagaacggtggaggagacacagaaaaaagagactgcaaaagtccagtgcgatgagttaagtaggaaaaaagcatgaaaacatgaagccggcagatgagtttcatttggtgttagcagacacctgcttgagaggaatcttaaagactggggatccgggctgggcatggtggctcatgcttgtagtcccagcactttgggaggccaaggtgagaggatcacttgaggccaggagttcaagaccagcctgggcaacatagctggacacctgcaacttcccaaactctgaataatattaagtgctccagggcttagtcctgggtccttttctcttcttgttctagacttactcccttggtgatttcagccagcgtttaaatgtttttactctggcaacttccacattttaattttatttttatttatttgtttatttttgagatggagtctcactgtctcgcccaggctggagttcagtgacacaatctcggctcactgcaacctctgcctcccaggttcaggcgattcttgtgcctcagcctcccaaggagctgggattacaggagcccgccaccgcgcctggctaactttttgtatttttagtagggacagtgtttcaccatgttgcccaggctggtcttgaactcctgatctgccctcctcggcctcccaaagtgctgggattacaggcgtgagccaccatacccagtgactcccacatttgtatcttaaatccatacctcttccctgaaatccagactcatgtatccaactccccactccacattggctttgaattccggtctgccctttgccacacttgtaacttctctgcttctgtggtgaggatgattgcaagggcaagaacagatgtagggagatggtcaggacactgcacagtggtgcaggtgagaggcagtggtggcctggagtttaaaactccagtttttgttttaaaaacaaaaagttttttaaaaaatagctaggtgtggtggtgtccacctgtagccccagctacttgggaggctgaggtgggaggaccacttgagtctaggagtttcaggctgcagtgaactatcatggtgccactgcactccagcctgggtgacagcatgagactctgtctccaaataaaaaataaaaaagactggcactccagccaggaggatgagggtacagcatagaggctgagaagtataaataatgctaggatatgccagggactcaagtgtgctgtgtgccttgggatgaaagggtgagcaggggagaggttagaaatgtac

SEQ ID NO: 916586 - DNA, 4001 bp, Homo sapiens
tttccagtaccggccttcaagcactctggctggctggtacctgcagtgagtcgtagacctcaggccgtgccgggtggtaggaactcgcgatgagggctttcctagctgctgactcctgccccagccgctgccgccgctccacctcctgctcaagctggggtggcacagggttgttaccaggtggggcctcccatcctcctgaggccactgtacagatgaagaaactgaagcccagaacgccagacagggcccaggctggaagccaagtctagcctacactcctgaatctatctgggtcaactgcaagttccagactgttagctgaaagggacttctagaaggggacccatcctgtttcaggctgccccaacctgagcctagctgggatgagaacccctagatgtacctcaaccatctgggcccacacagggacaggagacagtcatggccaagtcctgtgttccagaggttgctgaggactctcctgggaagcttcccaccactgactccaggggaaggaggaggagggagtggggcagcagccctggcagcagcctgcggggtatatggtaaggtgtgaggagcccaggggcctggaagctgtggctgggatcacatctgctcctgctgtaaaagcttgggcaagggatccctctttaagcctcagcttctcaatccaaaatgagagtggtgcttgtgcttatctcacagagctgttaagaacggcatgactaggcaacttagcaacttagcatttccccttctctctcctggtgccaagactcaggtgtggagggatgagtggggggcaggaaggaggaaagtgagggcctaagtgacccttcagggatcagggactgaggctaggctcaagctgtgtcctcaagctgcggacacaaatctaacgaggaggagctgtgcaggggcaggggactggtacctctgctaacagctgctggaagtccttggcgctaacacagcctcggctgcgcaggatctgggagcagaaagaacactgagcatgactgtatgacctgaggaaatcccttcactctctaagcctcagtttcccctgcttaaaatggggagaggagccccgacctcaaaggatcatggagagaatgaactgcggaaccctgtcaagctcaggacagggctccgggctggtgttgctgtgaggcggcaagctgagcccggccctgtcctaagcaccctacatgcttgttcattccttcctcacaatctcacagggagatactattacccctttacggtgagaaaaccgaggcagagagaggccgtcattcttgtatttgaagatacggtgcgcggcgtgcgcaaagcaaacgaccctggggacgaacttccctcctccactacccctctctgcccactgctccgtagggacgacagcggccactcaccgggccgtagtcccggcgcagctgctgctcgcctcggaagcgcacgtgcagcccatagcgcgccacgtacaagttatcggtgcagaagcaggcgcagcggcagaagtgccgcggagcccccaccgtcgccatagtgaagcacccacagccctaccagcttccgtagagagacttcgggcacgcccccaaccgcgggaggcgcggaaccagcggccaaggggccgctctaagttcccaagggcggaaaaggacgaagacgcacctcgccaggaaacggtctgcggagaaagatgctcctgggccgggttgggaccggcggcctcctcgttccgcctcccagttttcccactacgaggcagggactaatggctccactttacagacagctgaactgggtcgtgccttcacaggacggggagaggaagggactcggagccccaaggcctttgacttaaacgccgacccaccccccgccgtctgcccggagctcgtggagaaccagccgagctgaggacagtttaaagagctcggaggtccgactagttcccgctggtgcttcaatcatccagccctgtacgtttcagtttggatttagcatctaccccgggtccctgcctggcgcttccggtccctccgccacagtctgttggattacctcagattgccccagtgagtgtctccaccaaaacgctccgtctcgcattacttccggtggcgttcccaatggacgcgggagggcggggtcaggtgtgggagggcgacggggcgtggtctcaccgcagccaacaaatgacaactcttgcagaccgagcctcttctctccccggacctttgctcaggaatctaccagcattaaacctttgagctaggtactattatatcaccgtcttacagatgaggaaactgagacccagagaggcacagggacccgccgcaggtcacacatccagtaaggggcaaatatggcgtttgaaccctacagagttccccagttaaccaccacagggcttctgggagtggtggaagtatgtgggatttggggttttctcgtgcagagctgcccggcccgagaaggtgtttaacgttttacagtcgtcttgattgcccagtgatagtgagaggccctgctatctaggaaaggatccatttccccagatcaatgttcattacccgcctaactgccctttttccccaggaggcccagggcaggtcggctccccagccacccaccaggcaggcctggcacatgcagcaccccaccccaccctcaccccctctccgtttgcagcagtttgcaagatgagtgtgttgtacctatcagtttatttatttgtttatttactttttgagatagagtttcacccaggctggagtgcagtggcgcgatctccgctcactgcaacctctgcctcccggattcaagcagttttcctgcctcagcctcccgaatagctgggattatcggcaggcgccaccacgcccagctaatttttttgttttttgtttgtttgtttgtttgttttgagacggagtcttgctctgtcgcccaggctggagtgcagtggcacgatctcggctcactgtaagctctgcctcccgggttcacgccattctcctggctcagcctcccgagtagctgggactacaggcgcccgccaccacacccggctaattttttatgtttttagtagagacggggtttcaccgtgttagccaggatggtcttgatctcctgacctcgtggtccccctgcctcggcctcccaaagtttttgtttttttttttttttttttttttttttttttctttttttgagacggagtctcgctctgtcgcccaggccggactgcggactgcagtggcgcaatctcggctcactgcaagctccgcttcccgggttcacgccattctcctgcctcagcctcccgagtagctgggactacaggcgcccgccaccgcgcccggctaattttttgtatttttagtagagacggggtttcaccttgttagccaggatggtctcgatctcctgacctcatgatccacccgcctcggcctcccaaagtgctgggattacaggcgtgagccaccgcgcccggccttgtatttttagtagaaacgggatttcgccatgttggccaggctggtctagaactgagaccactgcgcctggcctgcttatcagtttagattggccctctccatggaccctctcctccttccagacactctgggctcagtcaccgaagggagcagcagcaagaagaatatttaccagcaagtactgaatcaacatgtgctgccagccagcgctgacatgtatctttgttgactgcttaaggtattattacccccattttacagataaggaaagtgaggtgggtacaggaatctgtctagagtcataaacctagtgagtagcagaccagaattagaacgctccagaattagagtatcttgattccagagtcgtatgtatatgtgtatgtgaatatatgtatatgaatgtgcaatcatatgtatatgtctgtatatgtgtatatttacacatactttaaaaattgacatagaggccag

SEQ ID NO: 916587 - DNA, 4001 bp, Homo sapiens
agcagtggtcagatatattcaaagttttcatatgtcaaaggtagtgtgttagactccacaaatgataaaaagaagatagaaacttgacagggataaatatggttcatcttctgattcaatacttactggcttctagagtgtgtgtggcaagctagcagagaagttgtagaagatagctgtgtctcttgcaaataattgcctaattctagcctcaggggcaaatacctctatgtaaatctttcaactctgtggtcactgttcattccacattgtagggcatcagataccctcatcgtgctcttttttttttttttttttttgagggggagcttgctcttcgcccaggctggagtgccatggcgccatctcaggtcactgcaacctccgcctcctgggttcgagtgattctcctgcctcagcctcctgagcagctgggattgcagccgcgcaccaccacagcaggttaaattttgtatttttagtacagatgaggtttcaccgtgctggtctcgaactcctgacctcatgatccgcccacctcagcctcccaaagtgctgggattacaggcgtgagccaccgcgcctggcctcatcactcttaaataatgaaaaactaaatttttagaggaaaaagaaaatcacaggaccctgtgaaggaaggtatgtgttccctttttctatagattctctttgtcctgtgtccttggtaggcagagaccattaatccaactgctgcccctactagtgattttccaatcataaaccaatccgattctttgcagtaggtaccgatctaaccaagattctgaaagaaaaatcaatctcatgattattgtaaaattcagaccctcaatatttactacacaaataatgaatgagtaaagaaacgaatgactattgttcacttctggttttacctataaatatcagcagtttttatagcaatttagttcattggctcaaatgttaaatcactccatgctcacacttatgttctctattgagagaaatttctgttttgtttttggaaatgtaatttggaatttctttatccaaatttctgacaatacttgtctctctttctctccttatattctgttcattttcctcagaacagatatagaataaaaggcaatttacccagattgtctgtggaattgggattatgaattaatttatagctatgcaatttaattactgtatgggtcaaacagaacttacaatttttcaaagcagtagtacacaacaaaatgtaacttatgctaaactatactgaatatcatttactttgcctgcataattcatgaggtacttcaggtttttgtagtgcctgaaggactcttacagaaattatcgttatatacaccagataaatttggttcccgagccctccgatgtatagaattctggataaatgggagtttgtggtacagtcctagctctaccacttattagctccgtgaaactggatgatgttgttagtcctcctgatgcccagttagctctctgtaaaagggagatagtaatagtaccaatctcaaaatgttattgcgaagattctgagaaataatactctgaaagtgaataacatatagaataacctgtagtaaatactcagtataaattgttataaataagttgtcatcatcatcatcattatagccttcttgtttttcttttaagtaaatggtattaattctattttcccatacttgggtgtttagctttctaatcccattcttcggtgaatttacattttggggctaacactgggattctttccctgtacacattttcccatccctagtacctttagctttttttccatttgacttctcatcaggctggtccttcacagtctggatctttaggtcatcaaaagtcatttccaaattcaagctaagaatgagagagtgaagcagtcacgaacttcaacaaactaaaaatatgtgagcttctgcagaagtatttaaatagctactgttatctaatagaagaatgactcaatcattggtaggaggaaggagaggctttgcttcatattgggaagttcgctgacgcaaattcttgagttatgtgtattgcaggtggagaaagtggtgattctgaaggtgtttcaggatatttcgctaagtaatttatgaaagggaaaactatttttcatgagcatcagaggagagatattgtacccactcttcagagacagaaactgaaattcaaagagagtaagtcacactacatttgtaaaaaatgtgccagaattatgggccaaaatatttgattccaatgtttgtttgctaatttcattagcagactgtttctatatggtgtcttttacgaatcagatatattctcttttgattttcactgttttatctggcaatggatctaagaattttggggtgaatcacatatggctcccatttccagcgatggtgtgtcctgggtgattttagaatttatctggggctactagttcatgcagtgccagtgtaacgtagcagcagagagcactttgaatgcagaaagagctagtttcagtactttcctttagtctacaatcttgggaaatcttaatactttgaatctatgtctttgtctggaaattagggataatgtctacctgataacattgttataggaattcaaatgacatgtctggaaattagggataatgtctacctgataacattgttataggaattcaaatgacatgctgggtaaaaataataagcttttttacactaggtttgtgaaaaatgtcacgttgctataggaattcaaatgacacgctggttaaaaatgacaagctttgtacttggagcataataagaagccaataaataataattattagtatagtactaatattcagcacagttgaattacccatcaaataatgtatttcagtaaaatccatgattgactcatgtcacaaagacgcttacatgagagacccataagtatgtctatatgtatttactgatagaatacttttctattttcccttgacaacctcctaaccagatatatatctattagagatgtcttctgaaggaagtatttataagcaaaatgatatgatatctggcatttactttaaattactccaggaaaaaaaagtgcaaagaaaagaatacacaaaggaagaatggaaaaataaatacataaataaaacatataggaaactattaggaaaaattaccaatattgacagcctaattaggattccatttccctcctcctccctgtttcctatattccttttattatgtgcagagtatttgagaacaaattgaaaaagttggccaggtgcagtggctcatgcctgtaatctcagcactttgggaagctgagggggggggtggatcactgaggtcaggagttcgagaccagcctggccaacctgttgaaaccctgtcaccactaaaaatacaaaagttagctgggcctggttgcaagcctataatcccagctatttgggaggtggaaaatgaaaatgcttttcattttcagtgagctgagattgtgccactgtactccagcctgggcaacagagcgagactccctttaaaaaaaaaaaaaaaaaagaattaaaaaatactgaaacgatatcacactgaaaagggcacattatcatttctacagtgactcagttattttggatgccatgaatattatagaacataaagtgtttaccatttcaaccatttttaggtgtactgttcagtggcattaagtacatttacattgttgtgcagccatcaccaccatccatctccagaacttttcatcttccccaactgaaactctatacccaccaagcaataactcctgtgatggtgaatttcatgtgttttgtttgtttgtttgtttgtttgtttttgagatggagtttcacccttgttacccagggtggattgcaatggcatgatctcggctcactgcaacctccgcctcctgggttcaagcaattctcctgcctcagcctcctgagtagc

SEQ ID NO: 916588 - DNA, 4001 bp, Homo sapiens
tgaatttcaaattcaaaagggtctgactcaaactattgtggccacatctcaatagcttttgccttaccaagttacttacattttctgattgtaatttatcttttatgaaaaatatagatataataattatctcttgagttgttgcaagggcatgtgtcaaagacagttcctcaataaaccatgtttgctactactattactcttttgctttactctggtgtcaagcaaatatttcttgtttaaactctaagaagagcttactattaaataattaatggataatttagccaatgactaaaaaagtccaaaatcatgtcaccaaatattaatactaaggtaattttattaaataactttatttaaacatacaacccatataaagaatttgtattatggactcttggcatctgcaaaactttaccttttataatttttgtaaggttagatgccatgattcgttgttacactgcaatagctgcagaatatacagtggtttgtggtggctgttcttacttatctttcataactttccttaccctttttcatcctgctctgtgccccaggagactcgcatttatacattgcatcaacattcttgtccccatgttgtatttggtttggcttagaacagaagccagcaatagatttgagagagtcagatcaaaataaggttgggatggctgccttgctgtactaaagaacagagatcctatcaggtgatttttttttaatagttgtagcattctattggttccagttaacactccttctacttgccccttcaggccaagaagtgtaaaagttctgttgtatgatctgtgtggctattacctaaccttgttcacaatttctaaatagccctctcataaagcgttttctcacttatcccaattcaggagtaccatctctttcctgctaggaacctgaatgatacacagaaatgcacccaccagttagtgatgaaataagagcaactcttccattccgttttaagctttggttagtaggttctgctgtccctactttggaagcattcttacacaatagaagtcaaaacacatctaacttctgtaagactttttgagtgattgtcctcttgacagcccctttcacttcattgttcctcaggccgtagatgatggggtttagcataggtgtgatgacagtgtaggacaatgacactagcttcttgctctcaggggactggtttgatttgggccgcaggtaggtcagactggctgttccgtagaagagggacaccacaatgaggtgtgaggaacaagtagaaaatgccttctggcggccagtggcagaggacatcctcagaattgttatgataatgcgggtgtaggaaaccaaaatgagacaaaagggaaacatgataaacaggagtgtggaggcaagtgcttgcatttcatacatggttgtatccactgtgactagttttaacactgggggaccatcacagaaaaagtggtccacggcatttggtccacagaaaggaagggccatcatccaagctgtctgtagcatagacacaggaacaccggacatccaagagcctatggccatccacaagcatagggacctgttcattatgactgaataatggagagggttacagatggccacaaagcgatcataagccatcatggagagaaggaaacattcagaactgccaaagaagaagaagaagtacatctgggtaccacagcccacaaaagagataattttccttggggacactagatctacaagcatttttggcaccataaccaaggtgaaacatacttcaagaagtgacagattttgaagaaagaagtacatgggtgtttgaagtgcgagatccacactggtaactgtgacaataagaaagttgcccaacaaagtgactgtataaatggccaggaaaaaaataaagagggaaacttgcatctcggggttgtttgtaaaaccaagaagaataaattcagtgactctggtgtgattttcacagatcatatcttagatgagtttctctctaaaaatcaaagtatgtgcatcaaagggtattaaatcaatatagaggtaatctcaaaaataataataacatccataaaacatctttattctcagttgtcttaccattctgtttctctgaagcagaaatgatgtttatgataagataaaattaaggaaaaataaacattctgtataaatcttactcattgtttaccacctagatgtaatttttttctcatgagtagtcatagtctgtgctcatattcttcaacgtaggcatgctattttgtaggataaagtggaaagagtgtagatagataattaaaatagaatagtgtactaatttttaaatgatttcaggatgcaataaagataaataatgggctagtttgacattctaatatttaattatattaatcacatttctactgaatatagtacattttataccattcatccactataaatatatacatataccaacatgcccagtacacacacacacacacacacaagaaacttaataaataaacataatatatgcttatgattttggtgcttctctgtagtctccatcagcctaatagtttatgacatttttatattgtcttttgaaccataactcaacttcactgggcccccacttcttattatacatagagttatagttatattgtttaagctatattttttaaaaacttccaaacaaatatgacttacaatagagaaatatcctcccaacactcatcttaacttttctctgccaaaatagttcctctcatgactgtccatcttctttaaaacttcatgatcagaagtagggtacatatacttacttttgtatgtcagctgatccagtcccaaaagcactaattcaaccattacaaactcaaatactatatcttacttagagcaaaatattttggccaacattaaattatgcaattgttttctttacaggaggtcattcttagtaccaaaatttagcaattacaggaggatgtgttagaaaaataattttttccaaatattagaactgggtaaatatcgtatcaattattttacatactttttaaatttaattcagaaaaaaatgcatatttcattttatagtcaaaataatttaaaatagatatccgctcctgaagtcagtaggtaaaaacttacagtgtatggaatcattctgaaactgtggctcatttaaataattctatgttttaattctactcttaagacatgtaacatcttacctgtgtattttccatattgtaagttctcaaaggaatgtcctcagtagcaaaaagaaaggaacaactctggtgatttcaggtttcccatgcccttgtaagtcccaaaataataggtaacatgtgacagtgattacaaccattactctctcactactattgcaaaaccagcttcactatcattcttgtcatcaggaatagaaacaacaacatcatattcctggtatattcataaaaacttacgaaaaacttcatatgcattatcatgcttacctacattttggagcaattctaaacttgttatgggtctaaaattacaccatcttttgttttgaaaaaatatgggagttgatgaaggcatcaagattttatagtagttacaatatttagtgcatcctaaaatgcctcaaccaactgcctctcagaattctaatattaacagtggcagaaagcagtactaagatgaatggcttttcattgagtaataagttctataatgtacaatccatgtgaaatatgaatacggatatccaaaaatggtcagtttctcgaatttttaataattaccattgcacatttttcacctttcccaaaggcatttaagttttaataaaagtttagacaattagaggtttataatgtcacaggatgtacctctaaatactcctctcagtctttctatatcctaaaaagcctacagattactttgcatatattcactaaactaagagattaattagcagtgatgttgca

SEQ ID NO: 916589 - DNA, 4001 bp, Homo sapiens
gtttggcacactggcctctatcacccatccgtccccgacaacacacaacacagacaaattgagtgcactgttgacatttagtatcattctccccccatgactggtggaagctaagaagatgaagttcagggtgctgatcttttttttttctttaactgacttttcttatgtgagtacttacccctagttccctctttcttcccttcccttccctccctccctccttccctcccttccttccttccttcttcttcttcattttttttttttttaatgagacaaggtcttgctgcgttgctcaggctggagtgcagcagtgctatcattgctcgtgcagccttaacctcccaggctcaagcaatcctcccacctcagcctcctcagtagctgggactacaggcatgtgccaccacacccagttcattttttaaattttttgtagagatgggtctccctatgttgcccaggcaggtctcaaactccatcctcagcctcccaaagtgctgagattacagtcatgagccactgcgcccagccctttttttcttgcttctttacctacttttcacaggaattgggtagatgagggtagacccaggaagtgagagtggaatttgagaaagaaaaacagtaaaatgaagagctgaaaaataaaagagtttatttctaaatgtatgtacgaaactcaggttgggggactagcatgtaaaggtatatacaaataaaatggagttaagtgcacttatttattgaatcctgttgtgagaacttaagaggaaaagaaactgaggaaaaaaactaaggaaaatccgaaattctcccgaggaaggtccaagaaaaaacaatgtggaagtgaagtcagagagataacatcaggacattggacatcaggaggaactttcaggtctgattctagtgccaaggaagccatgaacgctctttcctggagcctttcagcataggagagttactcatctgccagggctggggatggggtaactctcccattccccaggtgaaggagctttcctttcagggccttcctgctagacagactgtggctgggccagcctggttcttccaagtgccctcaccatggcctccttaatttccttgttgcggaaactataaatgatggggttgcacatgggggtaatgatggtgtacaggagggagaaaggtttgtctttgtcaggcccatgtgtgctgtgggggttcatgtaagagaacatagctgaagtgtagagaaagatgaccacagtcaggtgagaggcacaagtagagaaagtcttcccccgacctgaggaggaggctttgctgaggatggtggccaggatgtgcacataggaagtgacagtgagcaccatggggctgagaattaccacgatggcatcggcaaagattgcccacagactaaactgagggtccccacaagagaggccaatcactatgggggcctcacagaagaagctttctatgtggttgtctctgcggaagggctctcggaatgaaatatactcgagaaagatgccattgatcagcccaaagaaccaggcagttcccacaagcctgacacagaccttctggcttatgatcgggacatagttaagtgggtagcagatagcaacataacggtcataggccatgaaagccaagaggatgcactcggccacaccaacacagaagacaaagtacatctgggtcatgcaacatacaaaggagacaatgtggtccctgaccacgaggtggatcaacatctgtgggatggtagtggtgatgaagcagacatccaggagagacagatggccgaggaagaagtacatggggctgttgagcttggggtctgtccaggaggtgataaagatgatgaggccattcatggccatggtgaggctgtagagggccaagaagagggcaaagagcaatgctcgtgtggaagtggagctctgctgaaagcccacgaggataaattccgtcactatgctgccattccttagcatctggggcctgtttgaggaggaaagatgatgggaaaagcacaagggtatagctgtggggtaatagaaggtacccacttggtcccagaagcccaattataaaacaggatggatgaatggtggtcaaccttttggaacttagtaaactagtaatttggcagtgttacggggtggtgaaaatgccagggtcatcacaggctgcatacatagaatcataatatcaacagatgaagaaagtgctggttgtaatgttctttactctggtttcatcaggcatcaagtgaagtattgcatctgctccagagccctcaatattgaaggattagccattaaccaggatgtattcagaggtgaaaaaataagataattgggtctgggaccatgccaactgaggaaaagttttaggaattgaagaatggagtgtgtgagggaaagggctggtggctatcaggttatagaagattgtatttaggaagcacttgagatatttgaaggtgtatttttctagaagcaaaaatgctcaacctctgtgtacctaatttaaaatgatgaatgggttgaagtttcagggaaaataaaaacattctaatcctcacaattgtccctcagctaacagtgatttgcacctttttggagacagtcatgtcaagctcttcccagtcacccacctcttcccagactcactcgcccagcagttgctgctgctaccgcagccacccatgctgtgcatgctggagctgagggctgggtgggggctcatgcatgccttcctaataggagatggttttcctcctggggctggaatttacggttacacacaattgggtggaaaggatccaaccatccctgtgtgaaaagggaagctatgagcagggcatatatctaacctttctagaatggaccttcagagaactttcaactgtctctttgtctctggcaacaaatcttgttctttttccattttcaaagaatgagcggtcacaattcttatgctcttatctctctattgtaacttttaggaagttgttatgttcatattaagtctgtcttatacttttcatgttgttttggagctaagatgtatcagatcccttccaccttcagatgcttatacttttttttttttttttaagaatttatagagacaggtactcactatgtcacctgtgctggtcttgaacttctggctttaagtgattctcctgccttggcctcccaaagtgctgggattacagatgtgagctactgcacccatcctcatcttcagatgcttatagatgataagtatattcctgcttaactttcagttctgccaaccatttctctttattttctcctctcctactctcttttctacacactctcacactaccctctgttagtcttttttcgtttttcagtctacttccaatcctcattcttctccctctccttttctcatttgtggtgttggttgcctgccgtttatcttactctggtcaaactcccctgtcttctccatgtctctcaatctcacatattctctatctggatttagagctacctaccctttcactgccactccttgcagctctagattccctctaggtatgatttgatgttaggtcaaggtagcgtctgggcagtaggctattcccatcatctttactttgggatacttttcttgtgcctaggacttctcttgggggcccagaaagggaagggaagggcagagagcactgtttaagatgtttcttggaagactgtgctcaatggacatgttggggcttaggtcacagtctggggaaaacaagtcagtgagctacctccagaaaagcctgggatttgtctaagaataaactgaggttagacctgaggaattacttggtcctactggaggataaatgcttacctgtggtttattgtgccagaaagaattctgtgatacccagcatttagtgccttgctagctaccattagaggttactaggtgaaggatttgtctaaataaatgggacaatttca

SEQ ID NO: 916590 - DNA, 4001 bp, Homo sapiens
ccatcatttcctgaacagctcatgttattgatgaaatgttgaggtctctcctcactgaaagccagagtttctggcatttcttggctagaggacacaaaggtggtaatgatgtgtgagaggtgagggaatagaggggacgtggaacagcctgtctttttgcctcggccttctgctgccctttagctatggggggctccagggaataaagcaggagaaacatctgtccctgggctgagggaagtgggcagccggtggcacctcagcacagagggatgggagtgttttccttccaccttgtcttgcttctggctccctggttagctccagctctggatcctgcctctcaagctggtgggtcttctggaatccctgaccagctctttcccaaaagcacccacagtaggacaccccagtgtgtttctgggagacatgtataggctgtcctgggagataacttttcctgatgtttaacttggtcctttttgataccatctgaccatcttcccttttgtgctggtatcttgggaaggagagagccttatgactggaaccctcagatgcccctcttcctgaaggccaaggggagaacagatgttccactgagtagaggaaagctcagacacaggtggtggaagaaaatgtaacagaggggctaggtaaactcctccacaggctttgggtgggccacttagttggatgtcaagttcacagacacctgctttcatgactgacatggacctctggctaccggtgcagccatggcaatcactgtgctcagggatccagaacaatctagaagatgctaaataaatgtcctttccctagggcagcaatcactttcattctaccttgacctaataacccatgctctgatagtgagtgtggactctgggataagaggcaatatgtagatttatctctgttttaatttcagcactttcttccaggaagccttttcctttgaggtgctgcatgatttctgtgagagtggggtttaaatccagtccctgaagagtgggaggatgagcactgagtgagtgagcagacatccgagtcccttcagggtgaggggcgctgcctcttcaccaagtgtcgcagggccctcctcacgtccttgttccgaagggtgtagatgatggggttgagcatgggtgtgatgactgtgtagaagagactgaggacgcggtctgtggtaacagaggagcctgcctgcggccggatgtaggtgatgctggctgttccaaagaagagagagaccacgagcagatgggaggagcaggtggagaagaccttgcggcggctctgggtggaggccattgctaggatggcacccaggatgcggatgtaagaggtgacaatcagagagaaggggatcataatgaagactatggtggctgtcatcacggagatctcgctcctgtgcttcccagcacttgccagcctcagtactggcaggatgtcacagagaaagtgcgggatgatcgggtggctgcgaaaaggtagagagaagatgagggaggcatgggtggtggccgtgatgatgcctgtgagccaggaggtacccaccatggccatgcaggcccgtgggctcaagagggtggaatagcgtaggggctggcagatggcaacatatcggtcataggccatggccgtgagcaggcagcactccgagatgcccaggacaatgaagacgtacatctgggctgcacagccctggaaagagatggcctggggatgcggggagcccagattggccagggtcctgggcacgatgtcagtggtgtagaagagctccaccactgagagttggcgcaggaagaagtacatgggggagtgcagggcagggctgacctgtgtgaggaggatgatcagggagttacccagcaaggtgaccaggtagaccagaagcaccacccagaacagggggccctgcagggccttgaggtcagagaatcccagaaggaggaattcaggcagtgtagtatggttttccccagccatcactccaggccagaagctgaggcacagccaagaagagaagttatttagaaataacaagcaacatttctgtaatttggtaaagcacttgccacacagttcctctcaaaatcaagtgagagaattaatacctttctctgaatgagccatgggtctcagagagattaaataatgtgtctgaggtaatatctagaaagtggcaggcctggaacttgaatccaggtctcttgactccaaattcgacgcctttctcactgtttcctgggctctcgtcctgtgtctggggcctgactctcatatgtaaagactctagctctgatctttggatctctctccagagtgaggggtgaagcagctgctatgacctaggcccctttgtactctctagatggatgctgaggcacaaaagaaactgggtagcaccagggactgtcccgaactggtgtctaatgttcaccatagtgagctgtgggttaagagtgtcacacagtgatatgactatttgtgataatactgcccaatggtatcattgggattctgacaccttccctgatttctctgttctcctcttatctggggccctgtgatcagctacactagctgttctgtcccagcacaccctgttctgtcaggcctccatgcattgccatagtgtctcctttcagaggatatttctattcttcatattaaaatcccatcacacttcaagccttcactcaagtttcgctatctcggtggcagctttctgtgatcctcaggctcagaaataattatccatggcatttcaagattaaaagtgacatttaggaacatatatttccatatgacagtacttggatcttatcttcaacattttagaagggtgctgtgcagagtctgtttgaacatctgcagtgatggggaactcaccacctattgaggtagccctttctagctatggcctcttctgcctgtaggaaaagactttactgtattggtcttggctaaatgcttagtatttcatacaatatttaactcctcttgcaccagagagcccttgagtatttgaggaaggcacttttatctctgctttcatgagatgttgcttgtccttttgtcctagcacttattactccactgtgagatcctgcaggacgtggtggggaggtggggaggcagttacctattttagcagctgctaatgtttcccaagtgcttggttcctgccaggcaccatgctaagggctaaacattcattaaatcattggatcttcctaattacactacgacatagaaaccttcattttctccattttacagataaggagagggaagcccagacagtgttaagtaactttctcaatgtcacacattttgtaagtgacagagtttgggttcaaatccaggtctgcctaaccccagagcctgtgatcttaaccaccaagttatcaactgccttggaggttaatcaccagtcaaaaaaaaaaaaaaaaaaaaaaaaagaaaaaaaaaaaaaccaaggccaggcgcagtggctcacgcctgtaatcccagcactttgggaggctgaggtgggtggatcacgaggtcaggagatcgagaccatcttggctaacgcggtgaaaccccgtctctactaaaaatacaaaaaataagctgggcgtggtggtgggcgcctgtagtcccagctactcaggaggctgaggcagtagaatgacgtgaactcagaaggtggagcttgcagtgagccgagatcgtgccactgcactccagcctgggcgacagagtgagactctgcctcaaaaaaaaaaaaaaaaaaaaaaaagaggttaatcaccagaaaaacaagctcagtacttggaccatgtcgagtgttcgctaaacatttattagatgagtgaacgaatctcagttataaagacagaggaactgataaatagaacaattaagtgatttgcctaaatttaggcagctagtttgacaaagacaggaaactggactggactttcagaagtcctggtccc

SEQ ID NO: 916591 - DNA, 4001 bp, Homo sapiens
atatttaagccttttctatacatgcttttatttatgacctcatctattcccacatcatcagctactatgtacatgttaaggattgtgaaattcatagatctggttccaaattcagatgggcatttaacttacttaaaatgagaatttaacttaattcaaaactaaatttatcatctccatagctttttgttttgttttgattgaaactaatagtggtaatatttactcagtctccttggattgaaattttgtgctcctattcacaatatttattctaccaaaatttctttctttaccccctctgaaaacatttattttctctctaacttaggttgagttattcaattgagtaactaaatagaataaaaccatattcatttcactattaacacttaacagattgcaatttatttccaagtctctcccactgaactgaagtttaactttttattgagtacttagtaactatcaaagagcttagtacatagtagggactcatgaatgaagtcttaaattcttaaattctttttttcctctctctttttttcatacctagtcccacagataattctttattttatttatttatttatttatttatttttattattattatactttaagttttagggtacatgtgcacaatgtgcaggttagttacatatgtatacatgtgccatgctggtgcgctgcacccactaactcgtcatctagcattaggtatatctcccaatgttatccctcccccctctccccaccccacaacagtccccagagtgtgatgttccccttcctgtgtccatgtgttctcattgttcagttcccacctatgagtgagaatatgtggtgttcggttttttgttcttgtgatagtttactgagaatgatgatttccaatttcatccatgtccctacaaaggacatcaactcatcatttttaatggctgcatagtattccatggtgtatatgtgccatattttcttaatccagtctatcattgttggacatttgggttggttccaagtctttgctattgtgaataatgtcgcgatgcataattcttaaattctttaaagattcagaagctttttgaccatatccttgaagggttgttttacctgttggttccttagggtgtaaataaaggggttcaacaaaggagcaactgaagtaatgagtagagctactcccttgttgaatgtatccccttcttttgcagagggattaatgtacataaacatgcagcttccgtaagagagggagatgacaatcatgtgggaagaacatgtggaaaaggcttttgtcctttgttgggcagaggggagcttcagaatagtcttgataatgaatgcataggagagaatcactagcaccagagtgaccaccagggtcacagatgccacaagaaagacaaccttctctatgaggcttgtgtctgaacatgagagttccagaagaggctcatagtcacagaagtaatgattcagtctgttggatgcacaaaagtcctgctgactcatcagggtgattgttggtataatagccattagcccacccagccaagagcagaaaatcagctggatgcagattctgctgctcatgatggtggtgtaatgcagaggtttgcagatggccacatagcggtcataggacatggcagccagaaggtaaaactctgtagccccaaggaacatggcaaagaaatactgagtgaagcagccagcaaagctgatactcttgttccctgttgtgatgctaatcaggacccttggaatgaagatgtttgtgaaggaaatttccaagaaggagaagttccggagaaagaaatacatgggagtctgaaggtgggagtccagcaaggtgaggatgaggatagtcagatttccaaggatgctgagtaaatacgcaaggaaaagaaaggtgaaaactgccacctggagttcagggacatctgttagacccagaaggataaactcagttaacacggttttatttttcattgttgaaaaaattttgagtctcaaagtgaaaaagagagtagtaatcaaaagtgagaaaggaagaggtgctctgaaatgaacggatgaagtctgacaagaaaaaaatgaaatggatgattaacttctcctctgatgacatagtccagaccagtggcccatttgaatgatgttggatccttcccagtcccatttgccctatggaggaaagttcttgtcattatgtttccacattgtactctccctagtgctcacatgaggcaagtgtctgcctcataaatgatattcaaaacattgtgaaataagttaataaaagaatgcctccagctgctacctccttccagaatggttatgaatttcttccccccaacattaactttatttctcattgatcccattcattgccctacttcctttttgtgcctaactcttctcagaattgtcatttttcttactcttccctacctttttttcatataaatatagcaatttctcatttttcttcaggttcagcttccttaattcccttgaagcaaaaaaagtatcatcttcccacttctttccagtggaccctccaacttcttagcctatgtctgtctgttagattcaaagatttgtgtattagggttatgctattctgtcctttgaaacattctacatactttctaggggtcagtaaatattagattagaatatttcctcaaacacattcagaatctttagatctagaattttgcttcctgtaaggatagggagattctattaaattccaaggaaatgttaggatcttaagaatatttaaagcaagaacttttaaaccagggatctactaatccctagattagatttactatgtctgtgaatccattaaattatgtgtaaaacattttgtgtatgtgggcatgtgaattttatggggaaaatgtacaaaactatgatacaggattttctgggagattccatatttgggtacttcatgggcatttcaagtttctactttatttgtgagcccatgcagttaaagagtcacattatctgggagtgcccttattgatttattcaagatttctttctagttatgtttttataaatgtttataaggcagcagctttaaagcattcttgattaaaattcattctaaattatatatattttaataaacacatatagatctcacttaaaagttttatagagcgttccttaccacataaggtataatatatatatatatatgtattttgagccacagtcttactctgacacccaggctggagtgcattagcatgatcatgactcacttcagccttgacctcctggcctctagtgatccttcaaccccagcctcctgattagctgggaccacaggcatgcactaccatgcctagctaattattattttttattttttgtgaagatggggtcttgctatgttgcccaggctggttttgaactcctgggctcaaatgatcctctcactttggcctcccaaagtgctgagattacagatgtgaggcactgtacctgacccatgtgataaaatctgatattttctatttactttttaaaatgctggttgaagcccactaaattgattttataacctcctattgggttgcagtcaacagttgaaatcagggatcaagaaaagttattgtaaataacttagggaacaaactttaaatatacagctgagagaagagggtccagagaagttagcttggagatgggttggtggtgctggggatggtagccagagagcatcagctgcagatgccctctcctcctggttactaacctggagtcttcagggagtggttgaatattcacatctgcatcagtttcagtctttacaactccagagaagtaaaataaatgaagctataaacaggtaacatacttcctgacttgactatccaaatgactattgtgagattttaatcctaaatattcttggtggcaaattaaaattagaaggcaatataattacaaaatagtataagaat

SEQ ID NO: 916592 - DNA, 4001 bp, Homo sapiens
aaatttatagtactttttagtatcattaattcttatttcagcttttgaaaccatgggcgcagacacacacacacactcatcttgcttgcatattttagacatttattaatatgttaagtacaaggaagcaaaattttaacagataaaaatcataattttagatatactaaaaaacttttgcttttttctgaagcttttattttctataaaactaaactttaaataattttgttcaggtataaaataatttggatacatatcctgttttaaactagtctaaaatttaagaagatttacatactacttttaggtaatgatagaaagaagcttattttccactcacagaaaattaacatatcttaggaatatactatatattctctatgtttgacaaaacttatgtatgtatttgcatatgtgtctatccatcatctgtcattctacagagagaatattatgggattcacaaatatggagctctacttagcacttataacaaaaaagtatatattgataatggtctaggctcctttattaatagattaatttcaccaacatacctaattaaaatgagtaatgaaatttttttttgcttttcaaatgaattcacttacattttttaaaaattatattgtatctttcacatatttcctagaacatcagtagcatagtgaagggaatttctataagaataaattaaaattataaaactatatgttctgtgtataacaagtagaatatcatattgatatttataaagccattccaatgtatctaggtataattttatttcttgaagtaaactgaagaataattttagttttcaaaatattcttgaagagcttgtaattttacaaaaaattgttcaaaggagggggtgtcaggaagacacaagaaaattattttaagtcaaatgagaaatatattaaataaatatgcttgcaaacttttagggaaaagaaaatgatgcagaagactgcaaggaggccattttgattgaagaagctactgaaaattcatattgtcctttcctgtgcctctaattcatcacaccataccatttcatgtgcttgtgaaaaatacagtcttccttgccatgttaatgaaagcttgcttgacttgctgatttcttaggctgtaaataaaggggttcatcatgggggctactgaggtgtttagtattgccactcccttgctcaaggacactctatcttttgctgagggtttaatgtacataaaaatgcagctgccataagagatggagacaacaaccatgtgggaagaacatgtggaaaaggcctttgtcctctgactagtagaaggaattctcaaaattgttctgataatgtatatgtaggacagaaatattaatgccaaagtgaacattagagtaaacgcagcacaagaaaatcccatcacctctaagaattttgtgtctgaacaagcaagttgcagcagtggaaaataatcacaggtaaaatggtcaataatattagacctacagtaatgaagctttaaaagcaacatgagtgctgggaatatgattaagaatgaaaccagccaagaagtaaaaacaagcagtgtgcagactcttcgattcatgatactcaagcaatgcagaggcttgcagatggccacatagcggtcataggacatggcagccagaaggtaaaactctgtgactcccaagagaatgaagaaaaataactgaactatgcaattattaaaggaaatggttttatctcctgaaataatgttacccagaaacttgggtatactgacggttgtgaacgaaatttctaatatggagaaatttctgaggaagaaatacatgggggtctgcaggtgggaatccagcagggtaattgtgataagggtcaggttcccagtgatgctgagcatgtaggtgatgagcaggaagacaaagattacaacctgaaaatttgggtcatctgttaatcccagaagaataaactctgttatttctgtatggtttctcattcttcagttgctttcttttttcccctgccagacctacaagagaaagtacaaagaacaaacttgaagagttatcaattaacaaatatccaagtacggagctggagtttggttgacatagtatgccatttctacttcaaggggaaatttaacgccacccgataataacagtggtcctttaatttccactgttttacaggtgaaaactcttcacataagacaggttaaaaattaaagtttgttatcacagttggaagtggtagggcaggaatttgaaaccagactttcctgactccacataatacctgttatctttcaaagacatgcctacaagtttcctccctaatcagaaccaccttcgtattcttgcacaaatccctatacaagtttcctatttatgtaaaagtttgattactctgatgattctcaatatggagaagatacttgaggttgtttttttttgaggtggagtctcactctgtcacccaggctggagtgcactggtgcaatcttggctcactgcaacctctgcctcctgggttcaagcgattctcctgcctcagtctcctgagtagctgggattacaggcacgtgccaccacgcctggataatttttgtatttttagtagagatggggtttcgccatgctggtcaggctggtctcgaactcctgacctccagtgatccacgccccttggcctcccaaagtgctgggattacaggcatgagccactgcaactggcccagtttttaaaaagtgagtgctttgtccttagccattgtgaaagttgattgtatggattgggttgggtcatttttgtcatacccaaccaacacagggtcaagatgccaggtgggaaaaagcacacagggcacatggcattgctctaagaatgtaattctgtgtaagcctgactgctgaaactgcctgctgtaacctgaaatctgtgttatctaatagctgctgaaatcacctgctgtgatcctatgggtatcctatgggtagttttactcattgccttaacttaccaatcaaaacttggcagctcccctaaacctttccagtgtcaatgaactttcttgaagagcaataaataacatttctcttttttatgcagattctaaccttctcttcgttctttggacatactgaaaaaccacctggtctgtgtgtattccttgaattgaagtttttggttaccacctaagatgttttaaattttagagatttgtctctgtattttatttaaccttaatgccatcgatcaacttttgtgaatattcagattttccaactcctacgtccactttattgaaaatcagaaatacttaagccattaccatgaacaacttcagatgtttggaatacagaagaggaagaagtatagaataatgtaagctggaagagcccaaaactgaagtttattgcatgtgaatcaatatttcatgatatttcatgatatttcagcctacctatgtgtcattttataacttttattcctgtagaaaccattttgctttataattgaaataaataagtaaataataaaatattattaatttgagaaggatgccctcagttaaagagatgatagataagtattctccaagatttgcttaattgtgtattcatactttgaaatagcaatttttaattctttctttttaaaaataaagttcagatgatattgtcataaacatttccatagaaaagagtgaggttatctagttttgaatccaacccatttactacgtctgaaaatcacttaacacttctgtgtctcagtatcctcacctatagtttcttccactgtatacaagtctgtctcatagtttttgtgagcattaagttaatatatttaacttaataactttcatataacttaatatatattagcttacttataacttttctaaattctttataaatatgtgtatttgtataatttatatttatatttttatataaataaatttattatatattgtataatatatattta

SEQ ID NO: 916593 - DNA, 4001 bp, Homo sapiens
gtcaatagaaataatttgaagaaatgttttattgctatgtcaaagcccacttttgatatttaaaataaataatccctgagtttgtaattcagtgaggttttttttcaattttcttgtaataatttaatcttcatccttttcagcctgtggaagtaattatttctttcagctctaaccttttaaacttttgaatattttcctctattttccacttgatcataattctattttttttacatttttagtttcttcttttctctgtataaaaaagaatattggttggttatcctccatatcttcttaaccctttaattacttttatgttgtggtaaatagttatcttatttaataagcacttaaatttcggtgtttcaatttgctcttatgcattcattctgattttgtaacccataataagtgattttatgtttacatttgttttaaattaaatgtatacattttgcatgagtttcctctcatgtaatataaagcaatagctaatatgtcttgccagagattttgaaggtgtttccatttcttcaaataggattaattttaactcctgttgatgtcttctttcccagttatcctgatagacctggaataccttatttgatttaatttatttttaatatatgtctctcattgctttctattttttgttttgattcttagatttacaatattaattttgataattttgtattagagaaagaatttttattactacataaattaacttgtagataatgtatacactgataagtattcttacttttttcttccctagagaaatgaagaaaagactagatcagaagtggagaaaaccttgatttttggaaatgtaatttttagtttcacaatgagggaaaacacaatgtatgaccttggttcgaaataataaggattttgataaagatgggattaggatgcaatattaaatgtcattgagaaggttcacatgactaaactgtagtcaggaagcaatgaaataagttaaaagctgtaggatgacatttagggagccttcttcattcactttatgccaattcatcacagcttctacttctttgagagaaatgcaatcctctttatagagtcactgaaagcttgtttcacttgcttgttcctcaaggtgtaaatgaaggggttcaacaagggtgcgacagaagtagtaagaactgaaactcctttatttatggccacctcatcttttgcagagggcttgatatagatgaagatgcagcttccataggcaatggaaaccacaatcatgtgggatgaacaggtagaaaaggcctttttcctttgctgaacagaagggaacttcagaattgttctgactatgtacaagtaggacagaatcacacaaactagggtgataatgagtgcaaatacagccataagtataaccatctgttctattacccatgtatctgagcatgagatctttaggagaggacctgcatcacagctaaaatgatcaatggcattggagtcacagaattcgagctggaggcctaagctaagtggtggaacaatgatcatcaagccagccacccaacagcagagaactaataaggtacacaccctgttgttcatgatgaccacataatgaaggggtttacagatggccacatagcggtcataggacatggctgccaagagaaaaaattctgttgctccaaagagaataacaaagaatatttgactggcacaagcattgtaggtaatggtattgtcccccattgatatattgtacaagaatctgggaatgcagactgtagtaaatgagacttctaagaaggaaaaatttctgagaaagaagtacataggagttttaaggtggtggtccaccaatgtgagggtgataatagtcaggttccctgttacactcaacatgtaggtgagaaatagaaagataaaaagcagaacttgcaggtgtgggtcacctgtcagtcccagcaggataaaagttcttattactgtgtggtttttcatcactgttctttgatatctacccaatcctcctttaaaaatcacggtttatgagggggtagatatttgaattctatagcaaaaggatatgcatctagaagccaagctgaccagcctacttttattttctccctttatagaataatcaatgttgccagtgttccaataacctttctaaatttcacatatatgagcagtggatatctccttaagaaatcaagttttgtaaaacaatccaactttttctttgatcattccttatccatcagaatttacaaatgcagttgattgtagtttgttacatggaatggatttacaaatgggttagaaagaaatgatgtcattttataggtacttaaacattttttgtccaggacaaactctgaatataggatatatccaggtaattaataacattaattctcttcagttgttatcatctgaggattgtattaagattaaattacatttttcctgaaaaacaaacaaacaacaatgacaacagaatacaaccgttgtccctgagcctttccccggtctttttattcttctctgctggcattccttattctcaaccctctagtacctgtagatgggttgatgtacaattattttatctataatgtgagaaaaagttgtgttcaaggtttttacaaaatgaatattctcataggctttcatttgatgttcagttgtgattcctttcctttcaagctccagaagcaaatctacatttaacaccactaaatatagtcttctaggctgcgtctttttcaatatatctttaggtcctttagaaagacatcgtatgttctcacttattcgtgacatctgaaaatcaaatcagttgaactcatagacatagagagtagaaggatgtttaccagaggctgggaagtatagtggggggttcgggggtaggtgggaatggttaataggtacaaaaaaatagaaaggataattactatttgatagcacaatagggacactatagtcaataataacttaattgtatattttaaaataacaaataatataactgaattatttgtaactcaaaggataaatgcttgaggggatggacaactcattctccatgatgtcttatttaatattacctccctgtatctaaatatttcatgtggcctataaatacatacatttgctatgtacgcataaaattaaaaaaaatttaaaaagacattaacgtctcctcatctcacccctactcaatttatgctttaaccctctgtgtcctcactttcacctccaccccctgaagaatctgcaaagacttcattactgttgaagctaagggcacatttaggtttttaatcctgcctgtaattgctatagtatttttgttttaaagttcaataattctttcaatgggcttcatgtctaatactgatattctttctatatctgtctttttattgtttctctttttagtctcctctttctccatctgtgaaatattggtattctcaataatcttcagacctcctgcttcttgttttctgtttgttactcttcttaccctctactcttcaagggtgatttgatgatcatgtatgtgatgtagccaaagatcaggtaaaaagcattgctaagtatacatcacaagttgggtgttccacagacacctcacataccacatgctctaagtcaagtcatgctccttctttgagatttctgttccactggtgttacctattgcttgttacaggttaatcactttcatgtggactgccaggctcttcatgggcaggaccttccttgattttcccatctcatcacttaccattttcttacctttcttcttcatagctcaagttgccttagcattgactacttgcaattcttcaattttctacatgctcttgtctgcacaggctaatcttttgactgactggtgcatacatattgattcttcaaggaaatgttcatttacccacacagtgaatgtgaaactatgctcctgtgtcttttcccaagtactt

SEQ ID NO: 916594 - DNA, 4001 bp, Homo sapiens
ttgagattagggagtggtgatgactcttaaagagcatgctgccttcaagcatctgtttaacaaagcacatcttgcaccgcccttaatccatttaactctgagttgacacagcacacgtttcagagagcacggggttgggggtaaggttatagattaacagaatctcaaggcagaagaatttttcttagtacataacaaaatggagtctcctatgtctacttctttctacacagacacagtaacaatctgatctctcttgcttttccccacaatagcagtatacaaatttacagataaagtgtgctagacctaaagtttttttatcaacatcattcgggagaacatgagagtaaaattaacatttgaaggtggaattctccgatagtccagccattaatcagtgacttatacctcaagcctaatgattaataattgaattgatattcatataattttaaaaattactgtgtttttaaaatttattcttgtattttaaataaggaacttaatttataaagaaaataaaaatggcatgcactaaatttcatgaagtaaagctctacatttaaagtacaatgcaatagagcatagtacctctagggactgaatttaatgaacatgaaaaagaacatgtagagtctaaaagtgttatgacattatcaatatttatcttgaaaatacagaagaattaaagtttgaaactacatttgaagtacaacatgatgacatatgtgcctttaaggaactcatacacagaattaaaattactttagtaaaattactttactataaaatcatacacaagttgagttttaaataaatgtatataattccagacaattttgtaaggaaaataaattttactttatttttaagtaggtcaataaacaatgcagtggagaaacttgtatagaagtggaagaaatggactgggaaaatataaaattaactataacatagcatataaagaaactaggagagcaaggatacttacagagatattgagaaatttcaaaattttgcttaattgtttttttaaagtgctctttatttttgaccaaaaattcattgatttgcataaaacacaactttgtggaccacatttttgaaggcttgttttacttgctggtttctcagagtgtaaatgaaggggttcagcatgggggcaacagatgtattgagaatagctattccttttgtcaatgatgccttttcttttgcagatggattagcatacatgaatatacagcttccataagaaatggaaatgacaatcatgtgagaagaacaagtggagaaagccttttttctttgactggcagacgggattctcaaaatggtcctgataatgtacatgtaagataaaatcactaatgccaaagtgaacagcaaagtaaccaaagcaaagtaaaaaccaattacttctaggagccatgtatctgaacaagatagttgtaagaggggaaaatagtcacatgcaaagtgatcaatgacgttggaagcacagtaatccagctggaggagaagcataaggggtgggaaaatggtcagaaacccacttagccaggcacacagcacaagtagagtgcagagtttcctgttcatgatggatgtgtaatgaaggggcttgcagatggcaacatagcggtcataggacatggcagttaaaatgtaaaattcagtcacccccatgaagataaagaaaaagagttgggctgcacagttgttataggaaatagtcttattcctggtgataattgcccccagaaatctggggatgcatacggttgtaaatgagatttctaagaaagagaagttccggaggaagaaatacataggtgtctgcagatgggagtccacaaaggttagggtgatgatagtcaggtttccagtaacacttaatatatacgtgataaataaaaagagaaaaatcacaatctgaaggtcaggatcatcagaaaggcccaggaggacaaactctgtgaccattgtgtggttcatgtctcgtcctttctctctctccttcttccactctcctttttgttcttttaaagatattttggtagaatgataattaaggaaaatagataaaagatataattcatcatgatccatataattatcaatacaattctaaaaatcttctacagtctgacagttttgactatcttgtttgcattatgttttaatatttttttctaagtccagcctatttactagttctcttactttaaatctaacagaaattaggatatcttcagacaataagccacatcactgagaaacagctaataaaatgtataatacctgctttgtgtcccattaatgcaaaatatcattatcttttttgttgaaacaatcacatgaaacatacatttttctttttttcatcatgtatacattaaaggatattaccacctaaacataaaatgggtgctcttaacttcatcaaaagataaaagtgaaaattagaagattgttaataacccattattctttttatgatatgagaaaccaattaaagatttttagcaaataaaacatatatttatattaaaataatgttattttatttattcattttatttttaatattaatattttggtctaattgtcaagataatagaacatcttatatatgatgtatatttactataagatagagtaaataatgtaattattttactcaacaaatagggaacatgttcgcttacttattggtttgtcttataattccatcaaaatctttaatgtttgatgtcttctatgactcacaagaaatgtgtatatatattctacatacagacattttaattttgagcttaagggaacatgtgatatttatctatttttcattttgctctgaagcataaattggaaaagtaactacttgccttagatctcagcaactctctcacttggattatagcttagtgcatcttccatttgaacatcttcctttcagagctttacggaaaaagttttatttcctagtaaattttgtcccacataagaccattcttccttatgcaaccattcattcataaggatatccagaattgtataggaaaccctctcacattcattctaacctagtcagttaattttcagctattcaagaactgctggatgttctattctatagatgttgtctgctaaaatcctgatagttgtctcctccatattttagattgtcaaatttctgctatgatggatagaatgtaaaattattgcttctcttctggacactaccaaagttcacactaatcaaattttattttatgtttttctctattttataatggtttaagggatatatttcaggaaataaaaatggaatgccagaaacctttggaagatgtggaaatacattatattcctcttcaataatgttgaactagaagttcaaaaaaaatttattcctcttcaataatgttgagctagaagttaaaaaaaaatttaaagagaaaataggtaaatatatgacacattggatattatgagttagattctggtatctgggttccccctggtcatacttatatctacaatatttcaagtttctttgttttgacctcaaaagatttgatctcctgggaacaaagcaaagtccaggccacatctctgctgtattatagaccatgaaagatttctggaagtcgcctttggatttctcagtagcctcctaactcttatctgtagtcgatctcccttgagagcagttaggttcatcttttagcccacagaggacctcaaatattgtcttctgtggaatatttacttccattaactgcaattaatatattatgcatacttaatatttcataagtaataaaaatagctatgacatctattttcttacaaaactaaagctcaatctaattgatatttaagcatctttttgagattaaaaaagttttctacatatcccatttttgttttttatacttaggctttgttaagtgttagggcatcaagaagcaaaaggttatttcataatg

SEQ ID NO: 916595 - DNA, 4001 bp, Homo sapiens
atgtgtaaagtttttggtaggatagtctatttctagttgtttttcaagactcataatttggaacattctagatataagattgcattgacactttatattctttttactttataaaatggtcatccatggtttatgttacaaacgaaagcaaaaatctgggggaaagttaaagaagtagagccagataacagaattttcttttctaatatctaataaagtgaaacaaaaggatgaaaataaaatcatgataggaaggaaaaaattaccagaaactatcaaagagagagaaaacagatctcatgccattaacttaaaatgtcacctaagaaaagaaacaatagattttgtctaggagaatgaaagccttctaaacttgtctctagaaacctgttttaaccataaactagaaaatggacatattaagttgacaaaaatcttaaaaattttctcctcatttggagaaaagtagactaaatatatattctttcattttcctcttatgaaaggagggaagttgcaatggttacatttgaaatatagatgaaaaaatggaggagaagaaaaattattcactcctcgatggaaacatagtctccagggctccatgctgaagaacaatgctgatactacattctcctcaaaacaattctgaaaatttcttgactcatgaaacccagctaactcagtagttgtaattacttacttttatgatctggtttcctttttcactctaaattcttatcctcctactcttctaaataaacaatctgttttgcttcttaaatttcaaataatttatggaaaacagaactaattctttccaactgttccttttcagatccccattcactcttctctaataacaattaaaatattattttgttttttgtaaatttattacataaatttaccatttatatatctttccttgattctagactatagttttcttgaaattaagacatatacttttcctattttaatcttcaagggccaatttagcacttgaaatatagacattcaatgcatatttgttaagtgaaaatgtattttgaagtgtaatctccttttttaaagtttcacaatctttttgactgagtccttgaaagcttgtttcacttgctgatttcttaaagtatatatgaagggattcagtaagggagtaaccgaagtaatgagtacagctattcctttgttgaaagcacctccttcttttgcagaaggattaatgtacataaacatgcagctgccataagagagggagatgacaatcatgtgggaggaacaagtggaaaaggcctttgtcctttgctgggcagaagggatcctcagaatagtcctgataatgtatgtgtaagaaagtgtcaccagcaccagagtaaccatgagagtcacaacggccaagaggatgaccatcagttctaagaggcttgtgtctgagcaggcaagctccacgagaggcccatagtcacagtaatagtgattcagaatgttggagacacagaaatctacctgggtcatcaggatgattggtggtaagattgctaggaatccccccaaccaggagcagaacactagttgtatgcagactctgctgctcataatagtcaggtaatgcaagggtttgcagatggccacataacgatcataagacatggaggccaggaggtaaaactcggtagctccaagaaatatagcaaaaaaatactgagtcaagcagccagcaaagctgataactttatttcctgttgtcatgctggtcagaaatctgggaataaaaatggatgtgaaggaaatttctaagaaggagaaattccggaggaagaaatacatgggggtctggaggtgggggtctagtaaggtgagggtgataatagtcagatttcctaggatacttagcatgtaggtgaggaacagaaagatgaatatcatcacttggagttcaggttgatttgtaaggcccagtagaataaactcaccaaacatggttctgtttttcattgttgaccttcggaaaacctaaaggcaaaaggtgagaatgatgaaaattgaagagtttcttagagtaggagacataaagcttatcttaatgaacagaatcaggtcatacattgctcaccatccatatggcccaaaccagtgtcccattggggtgcacttggctccatgcaagccccatatcttttgtttaagtgacctttttcatttctcaagttgacctgttcctgggcacttaagaaaacttattatagaataactcattttttttcagaaaaatagaagtttttgaacctgttgtttcctttcaaatgtttatacaatcttcacaagtaaagcacttactcttgactgtattataagctctcctaattctgtgcttttggcacacatctctctacctcattctgttttctgtgctttcctgtttctttctttcctttctctgcactatttgatgcctcactggatatctgctatagatccttatctccattactgtccaaatctctgacatccttgtttcagaaacaagtaggaatttccctacacaggcaatgctgaagatcatctcattttgtattgtgagtcttttcctctacatgaacaaggttcaagcatcaatatgtcatattaatttacattttatgtttctctgccacattcagagtcttccaggcactgatttgagatatgtctcggagaagagaaattttgagaactctgtaagcagcatcacggaatggatttttctcagtcttagagtccccagtggcaactaaggatgacagtttatcatgacccaaactctcctgttttctattcttgtcttacagaaaccagaaaaagtttttgataataagagttctttgtagataaagtggtaattctcagggaagaaaaatttggtggtagtattgtgagtgcatctttagatttttctgattaagaggcaaatataatataaaggggtccctctaatttacatgcacatggattagaaaaattatgttattaaaatcattcttgtcaactttccatacaggttttggaggtcttagatgatgtgacctgggtctcctgcagccctcttttccttgtttatactaacctgtggtctttggcaagtactgcattttcttccagattttcacagttgattcatttcatgatccacatttatagaatgataaaatcagtgactttaaaaacatatgttgctcatacctttgacaacctgaatgactatagtatactgtttaccttgttgttcctaagaggtaaatcaaagatgagatgtgccacgtgaatctttgagtagtatatactttaacatgttttctattggcttccatccacattttacctttctcttaatagaagtatccaaacttatggaacttaaccagaaaaaagagcatattattttccattctaagaatccaatccagaatcaaatcatagttcctgagagacagagaacttcacataggtaataaaaaataaaaacaaagcccatagcagttattgaattggaagaaaatactttgagagacagaaaatttctgaaaatttatgttctaagagagattatgttgaagttcttagatggcagaggatgggcatctctgcagtttctgtgttagctagagcaacacaggttttatctgctctttttagagcaggcacatgggatcaatttcctgaagaagctaaagaagccctgtggacccacgttcaaaaggggctaatgaacctcagtcgttggcaattttgagaacaaactgtaaacatatgactgagaagagaggttccagagagaccattgagataaaggttccatgagagaatctgccacagccatgaagtttgtggagaaatgtagagcaatggatggacactccctggggatgggtgtgcctggccttgtcattatttctattatctctcctttaataatcctgtttggccagtgctccaacatgatgtaaatgaatgacaac

SEQ ID NO: 916596 - DNA, 4001 bp, Homo sapiens
tacaattgcctatagtatttaatacagtaacatgctgtaccagtttgcagcctagaaacaagggctatactatatggcataggtgtgtagtaagctatacaacctaggttcctggaagtacacttggatgtttgtacaacagaatcacctagcgatacatttctcagaagtatccccattgttaagcaatgcatgatcctattttgtttatgtgtttatgtcctttaaacaatgaaagcttcttaaaggtaccgattgaatccttcacaatgtctgcaataacatagattacaataaatatatggtgaattagttatcaaattacatatgccaagttacatttatacaaggcatattttattcaaagtcgtggtttctgaaaagtgatatgccataaagaggtgttatttaaaagttggattaaagaatcgaggaaagtgattgtagtagtgtgaaacatttcatgagaaagaatataatgtaagagtggaactgagctataaagttcttcaagagactaccctatgtgagataactcttaaggtgggagaacatgatcaaaataaatgtataaaacatgttttccagtttttcttccttatcagttatcagttataggatagtctcttgaagaactttatggctcagttccactctaactttcttcgattccttaatccaactttttttatatttatttttatttatttatttatttatttattttttgagacagagtctctctcttgtcgcccaagctggtgtgcagtggcaccatctgggctcactgcaacctccacctcccgagttcaagctattctcttgcctcagactcctgagtagctgggattacaggcactctccaccacgcccagctaatttttgtacttttaagtagagacggggtttcaccatgttggccaggctggtctcgaactcctgacctcaggtaaccaccctcctcagcctcccaaagtgctgtgattacaggcatgagccaccatgccaggccgttttccagtttttatggtaaagttgtaatttgtagcagattcttaaaatggtcttttagaaaaacacaaattcttttgtaatacatcccagaagacttctttcacctgctggtttctgagagtataaatgaagggatttagtaaaggggcaattgaggtatagagcaaagctacacctttggatacagtcactctttcttttgcagatggtttaatatacataaagatacagctaccgtatgtcatggagacaacaatcatgtgggaagtacaggtggaaaatgctttgttcctttgctgtgcagaagagaatttcagaatggtcttaataatgcaagtgtaagagagaatcactaataccagtgtgaccacaagtgtcaccacagctaaggtaaaagacatcaattctaggacatgggtatctgtgcaggagatctgcagaataggagaagtttcacacataaagtggtcaatagttttggaagcacaaaaatccagcttgagtcccatgaccaatgggggaaatatgattaagaatccagttacccaagagctaagtacaagttggtagcagactttgctgctcataatgattggataatgcagtggtttgcagatggcaacgtagcggtcataggacatggcagccaggaggtaaaactcagtaactcccggtaaaaggataaaaaataattgagttgcacaattattataagaaatggttttgtctctagtcacaatggttatcaagaatctaggaatacacactgttgtgaatattacttccaaaaaggagaaattacggagaaagaaatacattggcgtcttgagccggggatccagcagggtgaggatgatgatgattaagttccccatcaggctcaaggtgtagttgagaaatagaaacaggaaaatcacaatttgcaactgtgggtcatctgtcaatcctaggagaatgaactctatttccattgatttgttcttcatttctcttttgtgatccttatcaaatctacatagaaagggaaaaacaaaatttatacatatatatacatatatgtatttctaaagcagaaaaaatatatctttttaaatttatccatgtgcaaatggtttctccagcctgaaattgtagatgacacataattacataccataggtgaattcaaaatttgctctaatctactagttctctttataatattcctcacaaagtttcttccagaacttgaataatatatacttttggtaaatatgaattttagcttatcactgtcagatgaactctactctgcatttgtaatttaaacaaaatcatattaatattttaaatttttttctctattatttctaacatatctgtacaaattatactattagtttgtctttttataacgagtatgaggatgatgtttcaaaaccaggatttagggttaaattataattcctgtactgatcaatgactatggcagcactgatgcaataaatagttaaagatcctcatttcaatagttttgatattttatttgcattgagaatacaccatattattaacattatttttattggcacttttctatattcaaatcaacagtcgtttaagagcttatgggacaaacaaatgaaaacatgataaaataaagaagttatatattttaataaaaaattgtgtcttcttttcaattaacctttttgaaatgtcattttattagtgtggctacataatttcggctattttttacttcctccatattctttataacaccattgaaaatccctgaagacatattactttctatcctttctacatataagaattctatttagtcccagtttgtaatatttttctgttatattaaatgcgtcagtctacttcattatattgatgcaacagtatatgaataaaacagattacaacactcattagtatataactataaaattaatgtactattaaaacacatttataaagcatgaaaattcagtagccaaatttaactccatgagttgcacttactgtacatttgccttaatttctgattttagactaagttaaaattatagttgacttaccttttttggatctattattcatttctttctgtgtgcacggaagagatgcatgctaacataattagtgacaattctactcattttatgaccacattttattatccaataggcacatttattaccaatgatttttgtggggagaggcaatgtgtacgtattgtgtttctgtagagaatttccacatttcctcaacttcatcctcactataaagattgatactcagatattaataattttaatggacatctatctttcattccaagtaacttaaactttgtgaaattttgttattacaattgagattgccaacactcaaagcctcaaacaagatagacatatattctttgaaataaaataagattgggaagtgaaaattaaaatcaagaaattatttgatgaaagataaacaattattgcaagaaagagatattctatattaccaattgtgcatttataaaatgctgcaattttatcgtttttacttactatagactcaagggaatctattgaaataaaacaaagacaaacttttctctgggggtcagtgttacagaagcactaattatcagcaataaaagacaccactctaggctactttagctgaagaaaaagtatcccagaggaatattgtaagtgatttagaaaaatcaatgagatatttaacagtaacatcagcagttcactgtccagggcaacatcggaccatctcaaactggtttacacatatatcggaataaactactgatacataaaaaacaagaatcttaaaaatggtatgctaagtgaaagaaacagatacaaatgatttataatcatataaaagtactatatggtttcatttatatgattctggaaaagactaaactacgggaacagatatttgatcagtagttccagaggcagaaaattagctac

SEQ ID NO: 916597 - DNA, 4001 bp, Homo sapiens
tgtgcatggtaaaggggtgtatatcaaacctgcattaattttcagcaacttcatggattgcatttttatgacctcctaccttcatctatttgatggtggattgttatgataatatatcacaaaatgtaaagtcactgcatttagtgtaaaagcaatcatttctaatatctctgcttgcagcactttattggagattgttctccccaacagctccagtctctcacacttccatttttgcttaacagaacatgtgaaatctggaaagacacagataaatctttctgatgaagcagagttggcaaaacttggatggcttgaaatagcccattttcacagaagattattgtttctcagctgtttttccatgtacagattctgaatatcaggttcaatagaatacgggattacaaagcacagttttctcaacgttgaaattaggtgctaatccattcattaattgtgagttgctgttaattttttataaaatgatttattttcaggtaggattggaataggctatttagagcttgctatatatctttttaaagcaaagaccaatatttatttaatagtcacacctcacaatcttgatctgcttgataaatataaaacagatatgataagatggaaaaattacagaaaaaaaggaaaagattaagaacaaacctgcacgttgtgcacatgtaccctagaacttaaagtataataaaaaatatatataaagaatacagaaaaacgtgtgtgaatatagaaaaaaaataaaagaagctttaagatgaccatgaaatctttgaccaagctatttaatttgaattctacctgccatattactttctataccatatttcttctattttttttaaatagcatttgttccttactaaagtactaggtaattttctattatattgattgttccatatgtgtgttttatcactagaagtaagctctacaatggtgtgaatctttgcatgtgtgttcctttgtgtatacctattacgtagaaagatgctttgtgtttttattggcttatttgtgtttcagccacagatttagttatcattattgcttgttcaatgataatatttttttggtgaattccctaagggcctgtttcacctgctggtttcttaaggtataaataaagggattcaacataggagcaacagaggtattaagcactgctacacctttgctcaaagccataccttcttttgcagatgtttttacacacataaaaatgcaactcccataagaaacagaaaccacaatcatatgggaggaacaagttgaaaaagcctttttcctttgctgggcagagggaatcttcagaattgttttaaggatgagtgtgtaggagagaaccaccaaggccaaagttaccatgagtgtgaatactgctagcaaaaatgccataagctctagaaactgtgtgtctgtgcaagcaatcagcagcataggggaagaatcacagatgaaatggtcaatagtgctggagtcacaaaaatccagttggaggcccataatcacggggggaaaaataatgagaaaaccagccagccaggagctgattacaagccaattacagactttgttactcatgatggttgtataatgtagaggtttgcagatagccacatagcgatcataagacatgacagccagaagaaaaaattctgttgatcccaaaagaattaaaaaaaatacttgggccatggaagcattataggaaatggttgtgtctcctgtagcaatgttgatcagaaatctaggaatgaagactgtcgtaaatgaaatttctaagaaagagaaattcctgaggaagaaatacataggagttttcaaatgaatatttgacaatgttaacataatgatgatcatgtttccacttacactcaataagtatgtgatcaacataaagaagaatatcacaacttgtaactctgggttatctgtaaatcccagaagaatgaattctctaattgatgtcatatttggcatggcttagttctgaattctgataggtctgtagataaaaagaagagtgaatgtcaatacgtgatttgatttcaaatacactaggattgctcttattctgcatcaagaactttaagacccattcaacaagaagtggcagaatatccattagaattgcaagttcatgacagaatttatttagtagtgaaaagattaatttgtgtttcattactttaaaaaacatttaagttttatctttgataattctctgctgtatagttttgattacttaatgtacagaaaggttttttatagttaaataataataaatattttgcttgctttgttctgttggtggaatattgaacaagttatcagaatacatagtaattttgaaaacttaaaggccataaaatacaaatgctaatattgtcattagaaaacagactttcggccgggcacggtggctcacgcctgtaatcccagcactttagggggccgaggtgggcggatcacgaggtcaggagttcgagaccagcctgaccaacatagtgaaactccgtctctactaaaaaagaaaaattagccgggcgtggtggtgtgtgcctgtaatcccagctactccggaggctgaggcaggagaatggtgtgaactcaggaggcggagcttacagtgagcccagatcacaccattgcactccagcctgggcaatagagcaagactccatctcaaaaaaacgaaaaacagaaaaacaaaaaaaaaaaaagaaaagaaaagattttgagttatttcaattttaaaaatgagccttgatttcttttcatagcaaaaacaaacaaaaacacagaaaatactatatttatgggaaattaattgaactccatctcctcttgctgtaggcaaaactgatcctcttagctcctttctgattgaagttgacataaacacaatgccgacctttattaatgaacaagatcacagtataaaagttccaatcggactttttaaatatagtcaatcaatccagtgtttgttttagttctatgggccaaactctgcatgcatgcatcaattattctgaattagtccattttgattgatacaggtacctgtagtggtctatgccaacaaaacaggaattttagtgaagtacataatcaacatcccgaatatgaattgctcagcatgatctgttgctaccagtactagaaacagagaaaccatcttgacaaattttgagtgacccatgagagtaatctgatttaatgaacagagtcaaagtgtgagatattaggaagggtaaagatgacattgaaatggggtcatgcatcctgggtctggcatccctgcaataagtcataccagctgaggtttatctaagaaaatgctgtctaactccttcctgaagcaggtatttgtatgcttctgaactaagctgtgacaaatttaaaaagactcggagatctacgttgaagtttaaactgcatccatgaagttttgttctcttgtgacatctctctcatttttatagacaatttcatgtaaaatttggtgtcaaaggttcctggctaggtacttggctattgaatattgtgaggtacttttctgtcatacaacacaaagttattttcatggtcttgatgggatcgtctttaaatttcaaattcaaatgggcatatttgatgcttcaaggatatctggtgaccagttgaaaatcatgctgtggggaccctgtgattccctgcacaaaatataaggagttccttcaaacagaggggctaggatgctagtgatgctcttgatcaagcagctagctacctggctggccacatgttaacatcacaaaatatgctcaggcaatttctcaatttatctgctaagattgttctaggacatttttttcatcatctttgattagagcaagtataccagataacatgcaaaagatacaggatatgactcctcaggattaagaaaacatccatgctaaataacggtgctctcagaaaaggaagtaatgatg

SEQ ID NO: 916598 - DNA, 4001 bp, Homo sapiens
aggtgtatgttttactttaagtgttagcatactggctaatattgaacatacgaaaaatttagtttgtgcaaatatgatgggtgaaatgtatatcatgactttaatgtttaaatctgtggctaataatgaagttgtgcatcccttcctattgctataggtaattttattttttagtaaaataaatatctaatattttcttggtatttatagtaaatttgttgccttttttgattcatagaaacttcctacatatttattatattaagcctttcatgttaactgtaccataaagctattcttttacttatgttttctctttaatatttttcatgaaattttctctttttgctgtagatattttaaagtttgttacttaaatctgactttttttcagtgaggcaaggaatttgtatcttgattaagagtgaattctcatagaccaggtgcagtggctcacgcctgtaatcccagcacctttgggaggccgaggtgggtggatcacttgagaccaggagtttgagattagcctggccaacatggtgcaaccctgtctatactaaaaatacaaaaattaggtgggcgtggtggcgcatgctcttagttccagttacttgggaggctgaatcatgagaattgcttgaacctggaagttggaggttgcagtgagccaagatggcaccatcgcactccagcctggacaacagagtgggaatctatctccaggggagaaaaaaaaaaaaaaaaaaagaatgactactcatagaagttgggaaaaaaataacttcacacccatattttaaaattatcagagaaaatcaactggaaagaaggaaaaaagagtggtttaatctggttaaggattaaaagtgatatattttgtctatcatagaatattattcaataattaatttctcagtacgtaaattaataaaaaattaatgattaaatggctatgcagtcaacttgattgctctatagactaagaaattacaaagttggttattggctttatgaaaaatatgaagcagatcttttatattgatttatcaacttaggtacactttacttttttaaacgaaatgcaatttttttgagtgagtcatgaaaggcttgtttaacttgctcattcctaagagtatatatgaaagaattcaacataggtgatatggatgaaataagcactgacacacctttattaatgtttacctcttcttttgcagatggcttgatatagatgaagatgcagctgccataagtgatggaaaccacagtaatatgtgaagaacaggtagaaaaggcttttttcttttgttgaacagaagggaattttagaattgttcttatgatatatgtgtaggacagaactacacatacaagagtgataataaaggttaatacagcagaggctacaaccatctgctcaattaatgatgtgtctgagcatggtattttcagaataggcaatgcatcacagccaaaatgattgatgacattagagtcacagaattctagatgaaaacctaagctaagtggtgggaggataatcataagtgctgccatccaacaacaaataaccattgttttgcacactttgttgctcatgattgccatataatgcaagggtttgcagatggccacatagcgatcatatgacatggtagccaaaagaaaaaattcagttaccccaaagaggtctgcaaaaaatagctgaatgacacatgcattatacgttattattttgttcccagttgagatactgtataagaatcttggaacacaggtagctgtaaatgagatttctaagaaagataaattttggagaaaaaaatacatgggtgttttcaggtggggatccaacatggtgagggcgataatggtcagtttccctgttacactcaacatgtaggtgataaatagaaacatgaaaagcagaacctgcagctgaggatcttctgtcagtcccagaaggatgaatgttgttattgctgtgtgttttctcattactgacttctgcatttttccaaaactacatgtaaatgtcagagaaatttgaactgcagcattcaataaaaaaagcagctaatgatgaacactctcatgcatgtttcatttatccaacatcataggttttacttgttgatctgcagaagtttatagtgagaatataaataacatatatgtacatgttttagtacgttgagctcccttgatctatttatacaaaatggccaaataagattattttataaattttagtcaacgaactatagaataacttttctttattaatcttctatagtaattaatttatagtgtattaaacattttaactcattctgagttgtgcctttttattggattgcattattttttgaaatatgactgttttttatgctgccaaatgtttttctgcaactcataagctacattaaaataattcgctttagtttcatctctgttttaaaatttgggaattgtaaaaccctaaaataaaacatacatcaggttccaaacaaaacatttcaattccctctaagatgtatatttatttgctttttgactgctttttaattgttggttattcattttaagagaaaaccatcttttgaccctaaggcatccacgtttataattttacatatctcttctaagcttcattatctaaatcttatatctactccctggatagtgctgtgtagtataatatgattatttttcagtgcccttttatcacagtgcaagacagttttgattataataaatgaactgctgaaaaatataaaaactatgtcttcctgcgttcagttagctactcagattagaacaagttatacaacatggataaaagtcaagacaaaaattgctgaatatcctcgccatgacacaatattctctcctttttcatttccttcagatctacattctttgactctatttccacagtacgcattcgtttctcaatctgttactctcttatttttcacctcaccagatttttaaaagtgcttaatcagttaacttcctgtgacttaacccagtataatcataatatgacaaacacaaatctcttgctatgcttcaggcaaatctcttgctatgcttctcttttaagtatattacatatataattaatataatccttaggacaacctgtgaagtagggaggtatattatctccacttaaaaaatgaaaaagctgatcgacaaagaggtaaagtatgtggccattgtttcaggatagtaagtggctagagaaaccccagagtcccagttctttaatcactgcgctgtgtttgtggtgaacactttacctgaatgttttaatttcatgaagataatattctgtctattggtaattgaaacaaagctggggttactacatagtttattatctaaaccaagatacttgagaagcacagcgggggcagttaataattacgttgatacaactggtgtaaacagggctatcaagagcaaaaactaaatgtgtgccattctctatacaattacttactccttgattcaggtgtaatattagggctaatggagattaaactttgccaaagtgcaactggctaattttccccatcttattgtttatttcttttagtatattgatccctcaatgtttcctcaatatttctttcagtgaaataataagactgaagactagggactctgttattctgggctaagttcaatagctaggtagaagttgctgttgtgtattctcaatcatattgttagatattcacaggtttctaatttgtaagtaatgtcttaagagcttcaaattttcttacctttattaaatgcaagagagatataaaataaggcattttcttatggttttagaatatttccctcaaaaagccctaatgcatctactacaagagctttaaacaatcagtgtttttcccttttttgtctaatcaagtaagcactgtcttctgctagtatacacccaatatactgagcaaaatctccatggtagaggaaca

SEQ ID NO: 916599 - DNA, 4001 bp, Homo sapiens
attttaagacactgatattcaatataatgtactgtgggaaacttgggcaaaagttaaactaataatcatgtgacaggtaatacaattcattatatattcccatttacttaacacattaattgacatgttcaaaaattaaacttgcttatatggtcttgaaaaacattgtgtgtgaaatcaactgcttgtgattaaagccatattttattctctactgcaatttctaaaatctgtccaacataaataataaatatcacatacatgaaatgtatgattcccttcaaaggaaattacgcttttctgtgttgacaattgacagttcgaaaagttcactttacaaaataattttctacattatttttaaggagtaagctttcttgaaacattttaaatatattttttaacaatgacaatatttgatttatctaagacttttaaagaacatggcatttaactaaaacaaggtacatttctttaaattacttagcataagatctactatttaatagcacaacagggagactacagtcgataataactaaattgtatatttttaaataactttaaaaatgtaataggattgcttgtaactcaaaggataagtacttgaggggatgggtacaccattctccatgatgcatttgtttcacattgaatgcctgtatcaaaacatctcatataccccataaatttatacacctactatgtacccgcaaattttcttaaataattttttaatttttataaattatttagatcaaactcttgaagaacttatattctataatcactgaaaaccactcatttattttattctaacatgcttttagagaaaatcaattttgcaattgttttctttctaatacagaaaggtttgaatactgaaaaagagaaaattaaagtcagaatggatagaatgaaaaacgttctgattgttggacaagctaaagtcatacaaataattgaatattgggtatcaattcttaaactagaagagtcaaattagtgttttgttcaaagatccttttatgttttcatgttaattatttcaacaagttgtattacttgtctgaagcagaaaatatctttctaaatacagctttgaaggcttgtttaacttgctgattcctcagagtataaataaatgggtttaacaacggggcaactgaagtattgagcacagttactcctttgcttaaagcaactctttcattcgctgatggctttatgtagataaacatacaactaccataagtgatggagacaacaatcatgtgagaagagcaggtggaaaaggctttcttcttttgctgagctgaagggaatttcagaattgtcttgatgatgtaagagtaagaaaggattactaaaaacaatgtgacaataagtgtcatcacagctaataaaaaggcaatcagttccagtaaatgtgtgtctgagcaagaaagttgtaggataagagaaatgtcacaaatgaaatgatcaatgatatttgaagcacagaaatccaagttaagacctaaaatcagtggagtgaaaatgatcaggaatccagttacccaagaactgaatacaagctggtagcaaactttgttactcatgatggacatataacgcaaaggtttgcagatggcaacatagcgatcataggacagagcagctagaaggaaaaattctgtaacccccaagaatatgtaaaaaaacaactgagatatgcaaccattacaggaaatggtcttttccctggtaacaatggtgattaggaatctgggaatgcaagcagttgtgaatgaaatttccagaaaagagaaattacggaggaagaaatacattggagtcttgagctgggaatccagcagaatgagggcaatgatagtgaagttccctatcatgctcaacacacaatttagaagtagaaataagaaaattacaatctgtaactgagaattatccgtcagtcccagaagaataaattctatctgccttgtatgattcttcatttctctgttgtgatttcaatcaaattctaggaataaaaaggtgcaagggttgagctaggtccaggaaaagatacaggaaagtttccacacttacaaacatatacatttaagaggtagtactccatggatgttgaagatatgatatagaactatgcaacagaaattgtaaactaggggtttaaaagtacaacaaacatcatctcactttggaaaattgatttgcaaagcccttaatagttgattttcaagctagtttttttcatgcttccacttcaagattccacttaattgtaactaattccaggtttgtcaagttgtaaataaattaggtaaagatcttggttcaggattcaaaaatagttcattcattttaaaattattaatttcatctaaagaaaatgatgccagtgtaatgaattaagacctaagttaagggaaggcacagtgactcatgcctgtaatcccagcacttgggaggccaaactggggatcgcctggggccaggagttgaagatcagcgtgagcaacatagggagatgccagcttgggtgacagagagagaccctgtcttttttgttaagaattaaaagacctacagtcaaattttgaaactttacattatattatattaaagtgacatttgtttaaagccctgctatacagcctttttcaacttctctatgaactacatatgaagatacggaaaaatgcccctaaaaagtatgagttgataccacaacaaaataaatactagttgaatctaggaaactcaaaacttaatattatgcatatattgccacatttacaaaaaaaaagtctatttaggacttaaaaattttgtcttgtgtaatcaagaccataggagtaagaaagaaaacagataaaacattgcatctcttccaagtcgctacagttacaggtacctacagtctaaacctactttctagatgtaatactgtgagtgaaaaatcagtgctttcttgccacactatctgagtccccaacaattattcatgcaggtaaccaacgactattaatttagggaaataatggggtaggaagggtgtaatcatttgaatgggacaaaaggattctgatggtattttaagtttgttattgtaggtttcccagagtatcaggttgccaatgaaaaaagtgaagtgagtaatagtacagaagtaaagcaaaggtgacagactgctaggaattagaaagtggacttaaaatccagctaaggatctgagaaataacttatcaatggctactgagaaaaaaggcaatccactctcagggttaaagtttgggaagcttctttattgtttaataattaatttttaaatgttaagctgagtatcacaaacaaacgaaaaaaataagacataagaaagtgtaaaatggctaagttaacagtttaaagtcaaagatcttgaaatttttagaaaagtttaataaaatttggaattttctccattattattagttatatggtcttgggaaaactaactttcttactttagttttttcatctacaaaaaaaaggtaaaataattctgatctcagttagaaggattaattgagatgtatacacaacacatgtctaataactttaataaccagtgaagagattaataaaaattaaggccgggcacagtggctcacgactgtaatcccagcactttgagaggccgaggcaggcagatcacgaggtcaggagttcgagaccagcccggccgatatggctaaaccccgtctctactaaaaatacaaaaattagccgggcatggtggtgggtgcctgtaatcccagctactcaggaggctgaggcaggagaatcacttgaacccaggaggtgaaggttgcagtgagccaagatcatgccattgcactctgacctgggtgacaaaagcaagactctgtctcaaaaaaaaagaaaaaaattaaaaatgtagttagagtgtccattgttttagtaagcttcaaatagctgcagatatagcagag

SEQ ID NO: 916600 - DNA, 4001 bp, Homo sapiens
gatagggtactattgaaaggaaaagtttttaaatactctgcacatgatcagtcattatatctaattttaatgttcaaaccacttaatttgaaaaataaggtactctgtggagctgtaaggtcttaattttatctatgacatccataaatctatagaatgttctacaaaggtcttactgttcttttgcattctaagtgacttaagagcagagagagattttcacttcgttttgctaaaaatgtgtaagcggtgagtggacatgaaggcatcatttttgtcatccttgggtatttatttttgttgtcatcaacaaattatttaatccttatgacttatatttttaatccataaatggagcatataaatacctgtcttacagagttttgaagatggaactaataaatttaataacatctggcacattgtaagcaatcaataaatgctagctgtaagttctatatgatagctgcaatagcagtaatgctttaacctctctgaagtttctttcatttatttctgagagtatactatatctctaagcctggttaaaaaaaattgaagctattaaactgtgtaattaaagaaatgccattaaattgatttgcttcgagattctactaaacactaagaaagaaagcagatttcacttttgtatccaccaataatgcacgcgttaagtgatcaaacctaggtagtctactgaactctatgtagaatatatgacaaattgggtccttgaattccagaagagtggaaaagagcatggaaaaactgaagtctcactttgtcttcctctgagagaattttgagaggaaataaaagaggcaataaataacaggcaaatgattttgaccaaaaccaagaaatatcttttctatgtgatctcagcatgagggagaaatggcagtgaaggttaggctttggagattaggaaggccataatgaaaattataagtcaaaaaagaggtaatattattgaatacaaacattgaaaaactttgcacatactccactcttcttgttttattttactaataaccttaataatatcgttaaagtgattcatttcattgagaaaagttcaatctttttgactgtgtgcttaaaaacatcttttacttgtttgtttctcagtgtataaataaagggattcaacatgggggcaacagaagtgctgagcagagctatccctttatttaatgacactctttcttttgctgagggtttcacatacatgaagatgcagctgccataagaaatggacacgaccaccatgtgggaagaacatgtagaaaatgctttttttctctgttgagaagaaggtattttcagaatagtcctgataatatttgtgtaggagagaatcactaataccagtgtaaccaggagcgtcaaaatggctgagagaagcatcattaattctattatgtcagtgtctgtgcaagagagctgcagtataggagaaacatcacagaagaaatgatctacagtgttggctgcacagaaatcaagctggagacccatcaggagtggcggaaaaattattaggaagccagccatccatgaagcaaagaccagcaagctgcaaactctgctgctcatgatggtggtgtaatgcaggggtttgcagatggccacatagcgctcataggacatggcagccagaagaaaaaattcagttgcccccaagagaatagtgaaaaacagctgtgctgcacaatcgttgtaagaaatggtcttatcacctgttgccatactaacaagaaatttgggaatgtagacagttgtgaatgagacttctaaaaatgagaaatttcggaggaagaaatacatgggtgtcttgagatgcaaatccagtagggtgagagtgatgatggttagattcccagtgatgctcaacatgtaggtgaaaaaaaggagaagaaaaataatcacctgtaattgtggatcatctgtcagtccaagaagaataaagtttgctactgttgtatggtttctcatagttgatttctatttttaaaaataagaagaaaaattagaacagaagaggaaaggtctgcatgagatacccatttttcttgaaatccaccataaagacattgctacccacacccgacctcctttaacagcagcctataaaaattaacttatgtgatttttactcaaaatgttgctaaatacatgcaactttttgagtttgttctgttttctcaatggccataaatgtaagcattgcgaagggataatatgttgcatcgataaaagtcatgtcaatataaaaacaaacacaagaactatcataatatttcaacttttatattctgtatttgaattttttctgaagtatttaaattattttataccatctggtgattcactctttgctcaatgaagtttttttctgtgtttgttagtcttttttctagactttgctattcattaattcagatttcagctgagaactctgtcttttaagatcaaagcaaagttgatttaaacatctcttggcttccacagtgggaattcaataccctcaccaaacttctaaaaactctccaaggtctccatcctcatgaccatttttatctctgctttcccaattttcctgaaaacttgaatttacatttatctcactcactctgcttgttctcttttctgtatttactcaagcagatataaactctatcctcatacatgatgcttgtgttatgtagtgcatttgcagaatatttgcagtgacagaggagggtcctacaaaacaaactatttaaaaataaaatgtggcttgtgcctgtaatcccagctacttggaagaatgaggcaggaagattgctttgagaccaggaattcaaggcttcagtgaactatgatcatgccactgcactccagcctggatgacagagcaagaccatgcctataaataaatcagtgaaaatcaaatgttagctggacttccctcgtaattgtcattagtgtcactgctctgcatgtttccccctgttgccatggccatctcttttcttctgtatcttattcacatcctctctctcttttctagttcagcacatagcaattcaaaattatgttaacttttttatttttcttgtttttctatctttttccagaccatgcttaggtcctcacgtttatcacctgacaagtctatcatcaccaagtttttcttaataatgacaacactttccccaagaagaatattgtgccatatgttaaactgtatatgaacattattacattgtgtatattccagctctggagtgaaacacatacacaagcatttccagtgattataaatgattacaaaataaataaaattttgtcctaatctctcttcattttcttttgtacttttccccttcctttcccattatttttggttgatcatttttctaaaaatgtatggtcatttaaatgtagtccatattcattaggaagttttttaaaattaaaaatcatagtttatattaaagctcaaaaaacacaggaaaacctcaatcaacaaaagatgagttataagccagagaatgcagtcagaaagtaatttatatggacactgtccagcctaaatttaaattataaaatataaaaataacaagcaaaacagcaatgaaaaaactattataacctacttgacagcattaattttctactgaataccacaataaaatgcttgctgggtgatagtaaaatagtcatatgtttccaaccaccagtatagtcccaaaggcaactgcagctgttttggcaagttataggtaagatagattcctttgggatatgaaaagtagattttacatgaaatgtttaaataacattgaatgcaacatgactacatatagggaaaaattttttcaagttcaggaaaaaaattattttttcagtattatatttcacaatgtttacaaagactatgaatactagaggcatatgcaattataattacagaagggaaaatgcattcatttaataaaatgcattcctga

SEQ ID NO: 916601 - DNA, 4001 bp, Homo sapiens
aaataaaatattataggtttactagaaaaggaaaaaccaagacattaataaaccacgtcatcattcgccgaataccttataaaagggcagtatcacaccattgtagactcttactttgtcattttcttcatcatatcagtagtaaggcaattttgtatcaatataaggaatctgaacacaaatatgaattgccttcatagatcatggtttttcttttaaaatattggcagaaacagaaaagttctctgttaaataatctatttttaaggaaatattatcaaaggaaaatataagataaataatatcaactctttgattacgctttgctctttttttctaggaaagctaagacaaaaagtaatacagccttaattcaaacaacagagataatatctctgcacatttgtcttacacttttatttaatgtttacacacattttaactacattttattgacaaatacaaggagacattttaatgatgcttttagttttataacatgtttttcctggtgacattgaagaaaaaattttagatatattaattaagatacatagtttaaacatttcatataaaattaatttcatagttgaatgtggttttagtaagtttttaatttatagctacctctattttatgaatgaagaatctattttgcctttattttattattattttttattatactttaagttttaaggtacatgtgcacattgtgcaggttagttacatatgtatacatgtgccatgctggtgcgctgcacccactaactcgtcatctagccttaggtatatctcccaatgctatccctcaataaaccatagtaattattaatttacctaaaatttagttacataggtgagagagcgaacactttctatatagtttagaagagctaaatcttggtttttaggctaatttcattaagaagtgttgatgatatgtaactatgtctaactaaaagtgtgaaataaggtgtttagaaagagttcatgtagagaagggtagagagtttttcattcagctttgcctttgggggtacattttttacataatcacattcatttatttaaagaaaaaatcatcttctggaccatgctcttgaaggcttgcttcacttgcttatttctcagtgtgtatatgaagggattcaagagaggagccactgaggtattgagcacagctactcctttgcttaaagtcaccctttctctggcagaagtcttaatgtacatgaagatacagctactgtaagagatggagacaactatcatatgggaggagcaagtggaaaaggcttttttcctttgactcatagaaggaattttcagaattgtccggatgatgtttgtgtaggagagaataactaatgtcaaggtgaccatcagtgttaccacagctaaaaaaaatgccatgagttctagaaagtgagtgtttgtgcaagagagctgcagcattggagaagagtcacagataaaatgatcaattacattggaggcacagaaatccaactgcagcagaagcattactggtggaaagatgatcagaaaccctgcaagccaggagctaaagacaagaagggtacacactctggtgctcatgatgattgtgtaatgaagaggtttgcagatggccatgcagcggtcataggacatggcagccagaaggtaaaattctgtcacccccaagaagatgaaaaaaaatagctgagccacacacccattataagaaatggttctgtttcctgtcacaacagtgacaaggaatctgggaatgcagacagacgtgaatgaaatttccaggaatgagaagttccgaaggaagaaatacatgggagtctgcagatggggatctgaaagggtgagggtgataatgatcaggttcccagtcacacttaacatgtaggtaacaagaagaaatatgaaaagtacaacctgccactgtgggtcacttgtcaatccaagaagaataaagtctgttactgctgtggaatttctcattatttttttctttagaaaagtattctgtattttcgctgtaaaataggtgaagaaaccagaaaactatgacaccagtaaagaaaattattattttttttctgtctggctctttccatttaccataatgccttccaggttcatccgtaatgtcacaaatggcagtgtggcagtatctccttcttttatgaggctggataacattccattgtgtctagctatccgctgatgcatctatctatttaatacatatatatatattcaatatcttcaaagggtttaaacttgtagttatgtacgatgaataaatctagagagctaatgtatagcacaaaggctacagttagtaatgtattatataagaaggtaactatgggatgtgatggatagaataattttgcttggaggtagtaatcctttctctatatatacacatatagaaagattatgttatataccttaaatatacacaatgaaactaactgtaggctgggcgcagtggctcatgcctgtaatcccagcagtttgggaggctgaggcagatggatcacctgaggtcaggagttcgagaccagcctggccaacatagtgagactttgtctctactaaaaatacaaacaattagcggggtgtggtggcaggggcttgtaatcccagctacttgggaggctgaggcaggagaattgcttgaacctgggaggtggaggttgcagtgagctgagatcgcaccattgcactccagcctgggcgacaagagtgaaattccgtgtcaaaaaaaaaaaaaaaaaaaaaaaaaaaaaaggaaaagaaactaaatgtaaaaaaaattaactttaggcaggacacaatgactcatgcctgtaatcccagcactttggggggctgaggcagatggatcacctgaggtcagttcgagaacagcctggccaatatggtgaaaccccgtctctactaaaaatacaaaaaaattagccgggcatggtgacgcacgcctgtagtcccagctactccagaggctgaggcaggagaattgcttgaacccaggaggcggaggttgcagtgagctgagattgtgccactacactccagcctgggcaatatatgcagactccgtctcggaaaaaaaaaaaaaaaaggactttaaaaaacttcattgttgctttttgcttgtagagaaaaatggttttgtagtacatagataccaaatacattttaaaaattctgttgttaccttataaatcaattatttctgtatttccttcattatatttttatatatttcagaatacatctctgtcttctaaatgtttcagtatattccctgaaaacaagaaaaaagaaattaaaacttctgagattaaggcattttcaaatgaagctcatgagaattcatagccagcatactatggtagtctttgaaaattttttgttatttttctcttcatctgttttgttctttttcttttgaatgagggtggagaaagatatgcttattcaaaagaaaagaaaaaaagagagcatctccttctccatcctcattcaaatttttataatctactttttataattgactgagttgtaaagacaactcagtcatccagagacatgtccctgataatggtatatagaagtgtttagtggacagaagatatcatattctttacattatcttttctttatatatttcatttaaattgtgtgctttaattttacttatatataatgtgaataactgaatttatataaaacataaatataagctattaaagcaaaaattatattcctgaaaaaacatacttttatggtaaatatgaatggtttagtgtatcttatttcaaaaggtttattcattgcttaaacataaatgctgttggatttttcaagagcttttgcaatctgtttctcctctatcatcttgtatttgtaacaaaatatccaaaatattgataataaagaacaatttcaagagcttctctataacgtttacaagaagggcatacata

SEQ ID NO: 916602 - DNA, 4001 bp, Homo sapiens
aagtaataactataattagaaaatttctacactcaggaaattattcttaatgacacagtttgttatattaattgattttgttatttaagcattcacaataaattgatctaaaaacaaaagaaaaactaataaaggttattctaattcataatttgctgtcataatgacaaatgtaacttaatttttttctattttatataagatataagttaagcataaattaaatattatcactataaaaattaattcccctatttaaattattaaattcttagagtttgttcatataccagttattactatatcccagagtttcctttaagtttcattttaaagaaaaaaaatggaaagagtgaatatatatattcactcttcatatagtcacatatatgaatatacacacatatattatgtgtattataaatatatattttttatatattatatataaatatatttataatatataaagattatacataaatataatagctttagaatatatgtatatatgtgtgcatattcatatatgtgaatgtatgaacatacaatgtgtacatgtgtgtatattcatatatgcaaatatatgaatatatgaatatacacatgtatacatacacaaacattgacacacacagaaacacacatatatttgactacatacatgtgcatgtgtattcatatattcacctatgtgagttaacatagatgatacattatcatattctgttgaaataagtttggcagtgataaatataattacaattatattattttaagtatatagattaatataggaaatgactttagttccttctttgaattgtaccaaggaatgtgcatcagatcatttaataatgacttttctctataaattcatataaggacttgtaagaacattaaatacattagtatttaatttaacattaaataaaatagtagaaacagttgtgttcctgagaagacatacaaataagaagacagaaaggaactaaagctgaaatctttattggttcttcggtaaaaaatgtgtgtgtgtttcatttataaattgcattcaaatcagtgttttttttttttgtgggaaatctttctcagaacatccttaaatgcttgtttcacctgctggtttcttagagtgtaaataaatggattcagcataggagcgacagaggtattgagtatagctactccttttgtcaaagcaactccttcctttgctgatgttttcacatacatgaagatgcagcttccataagagatagagacaacaatcacatgtgaggagcaggttgaaaaggctttttttctttgctgtgctgaggggattctcagaatagttctgatgatgtaagtataggagagaattactaatatcaaagtggatataagagtaaacagagctaaaataaagctcatgagctctagagtacttgtgtctgtgcaagagatttgcagcaaaggagcagagtcacaggtaaagtggtcaatgacattggagtcacagaaatccagctgtaagcccatggccagtggtggaaaaattaccaagaaaccagccagccaagagctgattataagctgataacagatcctgtcactcatgatggttgtataatgcagaggcttacatatagccacatagcaatcataggacatagaggccaggaggaaaaactccgttgagccaaggaagataaagaaaaatagctgagctgcacaagcattataagatatggatttgtcccctgttagaatgctgatcagaaatctaggattacagacagaagtaaatgaaatttccaaggagaaattcctgaggaagaaatacatgggggtcttcaggtgggaatccagcagggtaagggagatgatagttagatttccagtaacactcagtacatacgtaagaaataggaacgagaaaatcacaacctgcagttgcggattatccgtcagacccagaaggatgaaatctgtcactgatgttctatttttcatttctgatgattgattcctgtcagagattactgataaaatcaacatcaaaaggaacaaaacaatgagtccaaagacaagtataaatatttgcacatttttttttcaaatactattgaattgtgacaagaagcacttgggacttttaaaatagtgtatatatatacatttatatttcttattttccataattctgcttttaaagatatatcttctatatttaatatcagtcactgctacatgtttactctgtctccatagtttacatttattttggggaaatgtattaatagaacataaacttttctaatgctttactatttagctaaaatgtagggggcattatgctttgcttactgtatcttttataggaataaaaatttggactgatgatgtaaatcagtgatcaacccaattttttggtgaaaattataaatatcttttttaggatgtagacactactacctctgttaatttatcttttacccctttctttgtaaaacaaaataataattcagtgggtaagtcattctaatgtgttttgaacatttaaacaatggctttatatagatagtatccacttttttttcaatccaccacacattctattttcaggtaatacaggtgcctctgaaactcctatctttattcttgattttttttaaagagccttttcattaaaatccaattaatgtagtatttttcagttgagtgttttaaaatttctagtaaaatgttttaaatgtagtcaggcacccaaaacatgttcagaaaatattttaatgaagtacacaactacttcatatatctaaatcagatataaaatgcacaaatacttcacatatgttgtctagtaactatcttggacacccacatctgtaatatgcaccagctctttctaagtgtaaatgtataaatattaagaaaaatatgctgtgttctacctatttaattgctagaaattaccatttaaaagatttttaaatctccattaatttctgaactattaaatatgcatatacataagagacagagagggaaataaatatgatatgagattaatcagtgctacagaatagaatggatagaagctaaatcacaaaaaataaatttaaaatacttacctattatgaaaatttggatggttagagttaaatattgaacagaaaataatgtgctcaattctcttaaatcaaaagtcatgtagtgagtcaattctacatgaagaaataactgttttttctcccctcctacaaagttacagatttcatcataaagatcttgatgtttcatcttaacacatccagtgaaatagtctcctcatgtttccacccaacactgtccaaaatctggaagcctgaaatattccaccaaccatcttaacaataaatccttagttaaaagttttgctgacataaatgaaaaaaattctagaattatttacgataggctattctgatacttcacagagggccatttctattaattttccctaggaaaaaagtaaataatacctttaatatattttcctttacataatttcagaaatatgctttaaggaaacaaatgcttaatgacatttgggataaacaataatagggcattagtgaatccatgtacaagtttgactccagcaatcatattttaattggttgattttgggacctgtgtcccaggagaagactgagaaaattatccagcaggatgttagccaggtatctggggaggagtgaggtctagcaagaataaaccaacaacctgcaatgtccattgtcatgtatcatccttaagactatgggaaaaagcaatttaaaatatgacaagcaaaataagccacgggtctatgaaagaaaaagtatctggtattataatctttgaaacaatgttgaaatcactgaagactattatacactatcactggtgaaacttatatagggagtgtaactcccttcatcaattgagctgactagtatttatctaaaattagaagcaactcaaatttc

SEQ ID NO: 916603 - DNA, 4001 bp, Homo sapiens
gaaagatgagacaaagatagtttcaggattcacttgagatgaggtcaaaacaagattatttgtctagggtacatagcctgcactctacaaggaaaagacacactgataagatcagctaattggaaaaaatataaatcccgtatacagtgaatgaagaccatgtgaggaatgaagtttctagagccacagagcctccttgcaatcttttgcaccggagagctggccaccaagctgcacacacagtgaagttcttgggaattttatctgagtccaagttctgcctcagtatgttgattccctctctgaagttctcttaggtgtttatgtcttctatggccacacggttggaaatctttctctttcttcccatcaagtcttatctagtgacttttctctcccacgcatccatgacactgtgttcttattaaatgccatgacttttagtgtgttcaccaaagtaaattaaaaataatgatagatttgcgacgctaatgattttactaaatgcaaagcccaagatgaatgttttagaatgagaaaaatgaatcaatatgttcataacaaaactttattgaggtaataatttaataatttgctttgtcactaagagggattaaagttaaccttcctacttgtaataactttgtaccattctctcatgcacttctaatttacagcttgcagtatcagacactgagggtagccaggaatacttactactataaacttatccagtgtcatgttgtatgcagcttgacctaaattttccaaaatcttttttttttgagacagggtcttgctctgttgcccaggctggagtgcagtggtgcaatctcagctcactgcagccttgacctcccacgctcaagtgatcctcctccctcagccttccaagtaactggaattacaggtgcacaccaccatgcccggcctatttttttttttttttggagacagggtttcaccatgttggccaagctaatctcgaactcctgagctcaagcaatcctcctgctgcaggcatgagccacagtgctcggccaacaatgtttgttttttaactcaacgtctggtatattgcaaatatttttccaaagttcttttcagagctaccttcacttccttatttttcaggctatagatgagggaattcagcatgggagtgactacagtatactgcacagagaagatcaactctatgggggaacctgagtttggcatgagatggcggagcaaacctgagccatagtaaagtgtcactgcagtgaggtgggcagagcaggtggagaaggccttgcttctgcccgaggtagagctgatgcttaggatggtagagattatacgggtgtaggataagaagaccaaaaggaagtttcccagcccatgtaggagagtggagcagagcaaggcgatgaggcttctggagatatcagagcaggacagagggaggagggatggcatctcatagctgtagtggtgaatgattttggcttcacaaaagaccatgtttacagctaggaggacattgatgagtgcgtccagaaagcccagtccccatgagccccacacaaggtgcatatacagctgtttacccatgatctgtccataaagtagtgggcggcagatggcagcatggcggtcataggccatccctgagagaaggcaggcttcagtccctgcagtgacaaacacaaagaagacctgagccaggcagccctctactgaaatggttttcctctgtgacaggaggttctccagcatcttgggcacaatgactgaagagaagcagagatcaacaaaagagaggtgactcaggaagaaatacatgggcttatggagacaagaatcagccctgatcatgagcagcagcatcaggttttccattatggtcaggaggtaaatccccaggaacagcacaaagagcagagcccggatgttggggtcggcagacagcccaaggaggaggaactcggtgatggtgctgtgattccccaaggccatttacaaaggctactccctagaaataactcgtaaaatcatagcagccaagtcaagattactccagacagttttctcatggtactgattctcttttcatatcggtcacatggaacataaaggtgattgaggtgtagtctttgctctttaaatggtccactgaagaacatggatgtgaaaacaagaaattgtaacagtgtaattaatatgaagagagctcaaattttgatttatataggggtcagtaatgataatacattgaagaaatttgaacacatttttaaagaaagcatatgattggccgggcgcggtggctcatgcctgtaatcccagcactttgggaggccgaggcgggtgggtcacctgaggtccggagttcgagaccagcctgaccaacatggagaaaccctgtctctactaaaaatacaaaattagctgagcgtggtggctcacgcctgtaatcccagctacttgggaggctgaggcaggagaatcacttgaacctgggaggtggaggttgtggtgagctgagattgtgccattgtactccagtctgggcaacaagagcgaaactctgtctcaaaaaaaaaaaaaaaaaaaaaaagagaaagcaagcatatgattgacctaggaaaataaatatcaaagagacaattaattggcatgaagaatgtgttcgaacactcaagactgaggaaaaatcaagtcatgttcagtaaaacatgggtagttctgaaaagctgatgcttagagtataattgagccacacagatcaatggctaagtggactcctgtgtcagactacgttcacattccagctgtactattaattagctatatgacttgtacaatatacacaaagctctgtatctcaatttcttagcatataaaatgcatataatagtactatgtaaggttttgaggattaagtatgagattatatataaggcgcttcaaactacctactcctaactgttcattgacatttgttattattaaaattatttattaagtttgtaagtctagataaaactcagataaattctcctatagggtgaagcactatcaaaaatcaaagttgtttctgctaatgctgctgttgttattcttactttgtgcctttagtaagaaaatcacattgaaatcattactggtagaagcccactcctgctcattacctcaattagaagaaaaacaggaggtgaggaattattttggtgtggaggctttttttttttttttaagagataagccactttgcagttactgtggatgctgtcattcagaaaggagggcatgtaattcctcctaataggtattgctagcagactccagacatgacaagtgggagagaagttggttgggactcatgtagacacctaggggaatcttcgatataattactagggaagatgtgtatcccaggaatgcctggaatctctggacaagtaagcaagaggaagacttgaaaggatttcatgatacaggaatacatgagtgggtatatagggtgtagcaacagccaggattctgtgcagtactgcagattctggaccactgtctcagacaataggaaaaaagttgggaattcatcttgtaggactgcaaagttggactctgagcatctagtttctgctggaaatgcctgctgctggtaatccctaccttacagggggatgtcctgtcccactattctctgatcatttctcccttatggccagatttctcccttatggccagaatgtgttctccctcatggccctcaagtatgtatttcatgagtcttcaggtctgggttacaacagtgctctatttccttgaacagtgaatgtttactcataactcccagctttggccttacatcctaagtctgaccttgggtcacccataggactcattatgatgtccccatcagtttcctggtcctggctattcctgatgagttcaaagcccagccaagggggacatctgaatctttactaattaaatcttaatctagaaac

SEQ ID NO: 916604 - DNA, 4001 bp, Homo sapiens
cttctttcaggcaccccactttgtgatctctatgagtacctttggcaaaatgtctggattttggttttatgcccaaggatttcagtatctcactaacttttaaactttcaaaagaatgaggttatttatccctgagcccactgtaaggccagaacatattatacagatattcaataagattaatcaaatatatacctatattaagaggcatagataagtaaattttggatcataatccgttttgatgacttccctgattctatacctttattaactattccttatcaattattaacacaagacaaaatcatgaagatcaaaattgagggcatgattgatcaaaatgtttgaagatctctatttcctattttagttctttgcactgggattcagcaactagcagtaccttagagcactccacaataatgaagtacaacattttccaaattaatgtataaagattacttatagtttgtttcttattattagtacttcctatctagcacacataaggtgaaaactgaatactcatttagcatgctaatgaaactagctataaaattaaagacatattttatttaaaaataatctgggcatctttgtcaactacccatgattgtgtgtaggagggatgggcaatcccaaagacaaacaccagataaaatcttgctgaagcactataacaaaatacaaaatattgttctacattatgccacaagaatcaatagatataaattctgtgaaataaaatgttgaagaccagtgagagggtttatcatgaaaatacttctctaatgtccaggatatctccaatatccaagattttcagaattaatgatgtcttgggaggtaaaaaagtaaaatatggaaagagcacatcacatgaaaacatctaagagtatttttatgacattcgggagagtaacttttattaatgaacacaggtgtattaaataaatagccacaataaaattggtgaaagagaaataataatcaaagaataatatttttcttctctagaaatttttttagagcctcttggacatctttgttcctcagagagtaaatcaaaggattcaacatgggagtgactagggagtaacataaggatgccactttactcagctcaggaaatctgtcaggagtgagatacataaaaaagacagcaccatacagcacactcacaactcccaggtgagagctgcaggtggagaaggccttcttatgtccctcagtagaatgtatctttagaactgtggacacaatatacatgtaagatactataatgactatgatagtaggcaagataataatacatgataaggaaaaagatatcattctatggataaagagatcagaacaagacagtctctgaagtgggcgagaatcacagtaaaagtggtcaacagcccgagaagcgcaaaaagataaagtaaatgtcatgctagtctgaataactgagctaatgcagccacaaaaataggaaccagccaccaactgagtacacagacgtgtggacatttgaacagagtagagcagagggttgcagatggcaataaagcggtcataagccatggccgccaggagaaatccctcagtcacaatgaggagggcaaagagaaagagctgggccacacagcctgcaaaggagatagacttgttttcagaccagaagttgatcatagccttgggttcaataacagatgaatagaaaagatcaatgaaggagagattgcctaggaaaaaatacattggtgtgttcagccgaggatcagtcataataatggtcatcatcccaacattccctagaaggatcatggcataaacaaacaaaaatagcaggaagaggagaatgtggagctctgggcgtaccctgaagcctgcaagaatgaagtcagtcatttctgagtgattgcttgttcccctgtcacccatggtagaaacctgttgagaggcacagggcaaaatatacaaatgaactcttggtttggatcctagcattacaaataatctcttatggtattaggatttacaaagctatttttaaattaatgttattattaatttttgcctcataagtatactgtgacttaaagccaatcaattgctgttgaaaccaaagattagttgcatttcttatttctttaagtgttagagttaggttttttgcctctgcatctaatacaatgcctttctacccaaatgcctttcacatttccaagtatcacttctttatacatttcccactcatgattcacacaataacttcaacatcatgaagcagtgactggaagagagcacaattaattttaaaaacgactttgggaagcacattagttagtttgggttgggagatatttggggttttagtagccaagtttaggaaaacagagacttaatttggagtaccaacaaatataaaggaagtgactgagttaaaaaaaaaaacctacttgagaagtgcaattacctttcacaagtcatggaaactggattctgatggaagttatgtacccactaagataaaaggtgtgtgcaaccaagcacaaaattattactactcatattcaagaatttctgtcccagatgggccatcaaagcactttcataaagaaaacttcccttcatttcttgatcccaagacttggagatctttaacttctaagttcaggggtgcaagtgcacgtttgtcacataggtaaacttgtgtcatggggttttgctgtacagatcatttaatcaccagggtattaagcctagtacccattagttatttttcctgatcctctccctcctcccaccttccaccctgcaaaaggctccagtgtgtgtttttcccctctatgtgtccatgtgacttgcagttctttaaaaagagatctacagtagaactcttccacagataaaagagttactttaggaattaatactgcaaaggatacatatgggggcattgctgattacacttttatttgccctgaatacaacttttgtagccattattaactcattactgctcaaatagattttttaacttcgtatgttaacaatacaagccactctttctctgtcctaagggctttatgtgcatgattctgtctaggcaacaataataacaaatatgtatatggcactttttatgtgccagacacttttctaaatgctttcatagtagctcatttaatccattcaataataacattaggtggttattattatattcccaagtttacagatgagtaaattgaggtacagagaaatgaagtctgctgaaattcacttacttgagtcagaatcaagatttgaagccaggaaaactggctccagaatccatgcttttaatcatcattaatgattaatcactgtactatatcaactttaaataaaggacccttcctgttcccctaccttacttctgcttgtactttagagtgtagttaaaatttcatatttccaaataaaatctctaattcttcaacctgggtcaaaacatctcatccaaagataatttgaagagaccaactgccaccatattttaatattgaggttacatattaattattcttcacttgacaataacttaagacaaaattcaatttgttctccatatattgtcagcataacgttatgtgtctggtaaatggcagttaatacatatttactatagataaaagttgaatgataatgatcatgcagaaacagagaaaaatataaaaactatccatccaatactgcagtggttagtatgggttttaggtttaaataaatctaggctccagttctgcttctctcactttctaaatgggatcttggacaagttacttatgctctctctctatgctactgtattctcatatataaagtggaaataagagtcctcaaagttttcttgggaatagaaaatgacatacgtatgtaaatcacttagcaccatttatggtaaactaagtattcagtaaatgttagccattatttttattatacgtttcagtgctcagtcc

SEQ ID NO: 916605 - DNA, 4001 bp, Homo sapiens
tctcaaagtcagagaaacttttgagtagcagccttctttgatcaattcaggaattgaggcccggacagggagagtgagttgcttgaggtcacacaggcagcaagtaactgagcagggaaggctgcttcccactccccatctcccggcctttccactgtggcccagcgtgctctgggccttaaaaaattcaggctctgctgcaaggcaaagcagggagagtttcagacacactcccttcccaagaaaacacgaagggtgcagccactccctccctcaaggccaagggcttagctcactggtggcgggggcaggagtgctctggtctacagaactgaggggcggggagcagagtccattcatggcaggctgatatcaccgagtggtaataatgtagttattatgtagtcccctgcaacggagaaacttcaatatgccaagcctgagggtatccccagagccacttctcaggcccatccgcagcctcacccaccccacacctcagaggctttgcactccagctctttgggatggtggggaaaggaaagcatgcctatgccctagatcaagaaagagcccattgggccgggtgtggtagctcacgcctgtaatcccagcactttgggaggccgagatttggcagatcacgaggtcgagagttaaagatcagcctggccaacagggtgaaaccccgtctctactaagaacacaaaaattagccgggcgtggtggcgcgagcctgtaatcccagctactcgggaggctgaggcatgagaatcgcttgaactcaggaggtggaaatttcagtgagccgagattgcaccactgcactccagcctgggcgacagagcgagactccgtcttggaacaaataaaaaataaagagcccattcaacgggaacatgtccctccctcctccctcacacgcagtgactcagtggcaagtttctggagaaaaaactgagggggactggttgtcaaacccccaggctgaggctctcggaaaatgcggtggaaaaggggtgtcaggaaatcccctctaggagctgataaaagaacacggctaacaacttccggcctcgggtgccggggcacaagacagcgcaaggtctttctccttgtccccacctcctgacgcccccagctgggttagagcttctgagtccctcctttcgctcctgaacgcacatggggcgggcttcttacagagctaacttcgggatgcatctaccactcttgctggggcaggcatggccatgtggaggcacccaagcaccccgagcccggactctgatatggcttgtcaccaccccagatcggagtactcggcgcccaccagtgctcacgtccagcacctctgccccccgcgcagcgctcaccacggtttctcccagctcttcccctcactctggcccgcccggcccgcccagagagccccgtcggggctgcgggcgggagcagccgggacagtagagggggcagggcagggcggccggagctcaccatggcgaagccggagagcagagccgaggtccggctggaggctttaagcttggcgcggctcaagtagagcttgcgccaggacagcgcctgcatggagtgctcgttgaggctcatcacctcggagtaactctggccgatccagtccgggtaggtgacggcggacggcggcggtggcggggcggggcccccgggggctccccgtccccgctgcggcggcggctccggcggctgccgctggtggtgctgccgccgcttgggggaagctcgggactgctgcggctcgggggcggggcgggctccggatgcatggagcacgccgccgaggcgcgggccggcccgggcgccgcgaggcacctccgccggaggcagccgccgactgccccctacgcgggcccggcctcacccggccggccgcacaggacgaggaggacgaggtcgaagaagtgcccgctgccccagcacgcaggcccgcggcgccgctggcaaaagcccccgggcggcagtgaccagagactgcgcgcgggcggcgcctcggatccccggggcctggacccccggcgcgcgccgcgattggccgccgccctgggctgttttgcatgctccccgcccacctgtgccccgcccaccaagaagtgggcgttgttgtgggcgtcacgtgacccgcccgctccgacggcaccgcccacggtccctggcgcgccgccgcccgccacttttcctggaagcgcccggctgcccgctccggctcctggcgccgcccctctccgcagctgctcccgtggccctgctcctggagcttggactcctgggtcgggccgcctgaggtcacctctgggcgcctcctgaggcccatatcccctttggaacaaggtggctcaaggtctgtaggaaaaagagcggctgacgtctggagttcaagcagtgtttatttggcgcccactgggtgccaacactggtctaggtgctgaggctgggtagggtggtgaacgagatggacaaaacctgtctgttaaccactttgtccacctgtgttcaccagcatctgatacgtattgaggtgaccggttcctgatttattatttttttattactgggttcaagcaattctcctgcctcagcctcccgagtagctaggattacaggctcccgccaccatgccctgctaatttttgtatttttagtagagatggggtttcaccatattggccaggctggtctcaaactcctgaccttgtgatccgcccgcctcggcctcccagagtgctgggattacaagcgtgagccaccgtgcccggccacctgatattttttaaaccagtgaatcttcaaacctattcagcaagtgtcttctgagcaactattacgtgctacgctgagggattccaggaaaatgataaccttcattgaatattttatatatatatatacacacacacatatatacacatatatatgtatatatatgtgtgtgtgtgtgtatatatatatatatatatatatatatatatattttttttttttttttttttttgagacagggttttgctcttgtcgcccaggctggaggagtgcaatggcgcgatcttggctcactgcaacctccacctcccggttcaagcgattctcctgcctcagcctgctgcgtagctgggattacaggcgcccgccaccacacctggctaatttttgtatttttagtagagacggggttttgccatgttggccaggctagcctggaactcctgacgtcaggagatccgcccgcctcggcctcacaaagtgctgcgattacaggcatgagcctccatgcccggcccgaatattatattttagtggagtgtggagaggggcaggaaataagtgagatcacacctttctgacttaggtcacatttaagctgagaccagagcccgccatgcaaacagacaggatctagctttccaggacggcgagggaactgctcatgccaagacctttaagcagggatatttggctgttggagcgttggaaggccaattttggggagcagaggtgaggtgggggtgtatgcaggactgtgctagggaatgtctcctaggaggtaaactccggggcagggacctttactatcagcttcacagctctaccctcagcatctagaatattcctcggcatacaatcggtcctcagtaattttttgttgaatgaataactatgggagagacaggaatgagtgacgagcatgtgacattgccggttggcggggtgaaacgtaactcttgtcaccactagagggcgcgcccccacccaaccgttgtgggatgaaaacctctgcccccaagaagtctctggttcccgcagagccctttcttggctttttttttaaaatttaattttattattattatactttaagttttagggtacatgtgcacaatgtgcaggttagttacatatgtatacatgtgccatgttggtgtgctgcacccattaactcgtcatttagcattaggtatatctcc

SEQ ID NO: 916606 - DNA, 4001 bp, Homo sapiens
taaatgaccagttttactgtatatagttctagattatctaaaactattccagctatatcaacagcatttactttggggttcaggagatagcacccttaactggagactgtaagtcagtatctgttaattgttaatgacatggcaaatgacggctcaagctatttcagtctgtatgactgttacagtcctctttgcttccactccctacagtgtttttgaagattaatatcagttctgcctttatttacttcttttggcagtgtaaaatcatttggttttatttggcacttatcttttctcagtcccttcatttccttactaccaaggaggcagcaaggaatgcttgattacagtattgactgtaatctacattttactgctctctgtaggcttagaactagtataccataatatcttcaaagggttttagatgagaagtctgctttttaacagcttccctatgggcctttctacctggctcttggagctctttctaacccagcatatctcatttcccccatagactcacagcacaataggagagatgctgaggaacttgcgggaagaggtaaactggagcccatagtccatttgctcccagtgtgtcagtagccgagcctttccttggtcaggagtctcaaagggtgtccctttcaccgtatgaaggaagacatacgtagcctgggaacagggaaggtggcagtgtgaggggcagaaagtagtttttcagtcaaagaattatgttaagatcccaaaaggaacacataaatccccaaacaattggtgattttattttgcttttggttgggaaaccctggggtgggtacaagggcgtggtttagtgctcaccaggttatggatgacgttggtcagggtccagacaacaggaatgctgaagaaggggatgctgagtagaaccatatgcagcaatcctaccaagatgatgtaggccagccagatgcctcggctattcatcactcgggtgttggggtttacttcgctgtgtgccacccccacattcatcctagccgtaatgggggatcaggcaggagtccagctcagttttttctcaacccctcttgagctatctcccagttgtctctcagatagccccaatcccctgaactctattgggaatgaagaacttacccatcacgcagaaaataaaaactgaagacttggggaaaactttaaaagacaagaagagtcctcactacatttcagagacatagtcattattgctctgatctttacacgtcaactgtaacatgaaggtgtatgtgtaggcttggggcactcacttcagggagcaagggaaataggagtatctgactttgctgaagaagttaataaccatgaagaggtcacgtacacccagaattccaggcgaaagtcatggaatcatcaaagaaccactaagaagggatgacagagtaaagctcactctggtccccactttgttctctggggcttgtccaccctctctctcacctccgtggcatgtaaacagtctgcatccccattacttctctcaagcgtggggcacgacaacaacttgcccacggcttctggactgggttaggaagggacctgagctcaatacctcgaaaggtggagccttggctctgactccaggggcagcagtgattatctgaactcggatctttaaaattgtggtagctctaaagctgatgatgtctggttaggaagcggctcttgcccgccccagccccaccgccagttccttaagcccgccccatgcccctcccagcttcctcctcatgttcatcggttttttcagggctcccttcagcgctcccctctcagtatttaggtcaccactccctcggcgcccctttcgcctcccaccatttttcctcagcaacccttacagtctttgcagctcctacctgccagctcagatccccgtccggctatgggcgcggcgccggctaccacacctgaagtctccaggaagtaacgcctctccttctgcccctttcctattggaggaacagaatcagcgctgccaccacccattggttggtggtctgtaatgcagaagcacagttggttgccatttctgtcgttcgcaagatacagtgcccgcccctctcccagttccaccttttgaaagaggtggggcaagctgcctagagaagtgagagcgacgtcagctattgaccaatgggaagagctgatggtatggcgtgggagcaagagtgacaacgattggtcagccttgcatctctacgcctaaggcgggagctcctggaggcggaggccgcgggtgggggcctagtggagtgaggggtaacaagatggcgaccgagacggtggagctccataagctaaaggtaccgtgaatcggggaagggctgagttggacttttctaggaactgaattctacagggtagcttgcgccttctcctacgtcttctccgtgcagccttttccacttcgtttctcggctcccgccgtagctcttttgtgccacccttccacactacgccttccctaatttcccatttctcctcacggctttactgctatatttatttgttatttctgcttccttcatcattgtatcgtccgtcacccttccccactgggttgtgtaagtgccttctacctgttatactcttcgttgcttttcagggctgcattacgtcagttggtccctcctttttgccccatgtcggagccaggatccgtttttcttccctgggatgatgtttccagtctgtcgtccgaagctgagatttccctgttagcaaatggtggcatttttgtgtatttctgtctaaataggtaccagacactcagaaaatacttccactccccttttctaggtgggattacgccccaagccgaattttgaaacagggagaggcctctcagaagatcggtctcgccttagaagcctggggttgaggaggtcttgagaatagtagaagtacagacacctcagatttaaaagttttcgagttctgtcacgcggctctcggcccgccagccttcctcacacaccatctccaaccaccagagagaactcacacctgcaatatttgggaaaaacaattccaaggttaagattatctctgttccatttcatatctcgggtgggccctgcatctcctggtgttaccattggctgacactgaatcacagaagctattttaaattgtcttatgagactcttggtagttttttcacacttagatatataaaaaagttaaaaaaatatattaaaaagaagaacattttaaaaagtattttcttttagggtaaattaagatatcttgagtaattgtctgtttgtggtttcacaagtagttttcccattagatgttttggacaaaccaggctgatatagctgaaactgaaaagtgatcctttaaagctcgaaaagtttttttttgtttttgttgctgttaagaaagcttaagggtagtaagggtagggagaggacccttctttagtcacttattagttgaccccaattagtctttctgtgaaactgatgtttttcttactcttggattctaaactctgttagtgggtttttgtgttattctggagttattgttaacttgatgatactgaaatgcatagactatatcagcggtctcttgatctttattgtgatgagttaaaaaaaattgagcaatcatctccactttgtttatatatactgtacttatagaaattgtatacttctggactgttataaaatataacacagaaaaggaatttttgaatgagataaaaaggaactatatatagaagagctaatattttcttcctatttgtcctatttttgaaatccctggagtaagtcaccagctgcccgatgacttacttgcatttatagattgtgttggtttatggagttcctccttccatcaaatctgtatttgtcaggtctatataaaatttgtatttgattggataagtaacttttacgtaaagtcctctgacctgatttcagtgttacagt

SEQ ID NO: 916607 - DNA, 4001 bp, Homo sapiens
gggaagccacagtgaagcactgttactcttaagaggaggaggaggaggagggaactggggaacttccatgatatgacactaagggcttaaggaaaatataggagtgagttaccttccatgtggtattgctggatgtggcgtccataacagaattcatatgtccaccagtcctttgtctgacaattaaaaaataaacaatcagggggatggagtgcagacatcttttcttggaaccagagtctcctggctccaagacacataacctctcatctacttacacactcaattctcttcccttcacttccactctcaattctccagactttcagtaaggagggagggctgctttccttctgtgacttggagagatatctctaaagtctgttttccacttgtggtctttccattcctcccttttaaaagattttttaaatccttatttgccctccataaagataagaaattatggtatccctgaagcaattatattagggaaacatagaagaacccaaaattaaatattaattgaacttcttgaacattcctggcactgttctggccactgggaatacaactgtgaacaagattaattctttgacctcatggagtttacactctaatgcggggaatcagaccgaaaataaacaaactgattcagtaaatatgatttcagatcatgaaaagtgctacgatgaaaataaaacaggatactggagcagagtgatagggcagggggtgactttagcaagtaggcttaaggaagtactcctcctaccccacgcagaccctcaatcttgctttagcccttttctgagatcttctatcctaacctgctcctacgttcagcaaagtgtcatcagtggttgcaggattctttgcttctttcctgtccgtgtaatctgtctactcctccagtggtcttcttaaccactacaggtcccctagatcctgcctcattcagtggactccagttcttggatgaactgctagtttccaagccctcattctatctaacccagtccctttcaccttcagcaagcagggagcatctctcattgggctcaacaactcagggatcccaggcccttggtaagcaggtgtttcctcctccctttcacgctggaagtgaatagctccagctggcaggcgacactcatagcgctgtttgtacttagaggagacaatcaccacgtccgaagattggctctgggaaagaagggagggtcggggggcaaggaagcaaagaaaggctgggatcagggagaacaacgaaatccctcttcaaaccctggggaagagatcagtcgaagacagaataagccataagccctccagctgtatttagtgggtgagaggagagggcgctcccatttctccacgggggcggagtccgggtgtttcgatcataaactgagacctgaaggttgacagcgggaagccccacctctcccaattcctggcccccagagaattggtctcagtctgcgacccccaggggtcaccgtaaaagcaatacctactcttcccgattccccgtaggctccagccccagactccggagctgcccttcttcctctatctcttacccgcttcctcttctgcccagaccctcgccccttatacgcctctcacctgccctcccatgacaggcaacggcaggatctcgatcccataacgcatctcactcagctcctccaggttcaggctcccgacaccgccggtcagacttgcgggtaacaggagtcccagaagcagcagtcctaacaaactggacagcagcgtttccgccgccatctttcgttccccttcttatgcagagaatctgtttccgccctaagccaggcagcggcctcaacacgcccatcggcgccacatgattttattggctgtacgttctatccctcccacgtaccctattcctatttgtaaacgtggctccaaggtcctggggaggtggatcacgacgattagaaatatcaatcgctgtccgtgattggtcagagaccagccaatcatcgacaagatcaaacccctcctcgttccccaatttcagaggcgtggtctatgcgcttggtccttttaagtttgccctctgtcttcgcccagctgtcatgcgcatctcattgctttttcagacgtctcttgcattatatcctgcccaccgccgggcggagtattgaggcagataggtagcgtgcgcagtgccggtgaaagttattaaatgcttgttgcaaaacaaacaattattatacggacgcttacctcttttcatatatacatattgctttgaggcaatcagaaaatttgtgtcaaaaccttcctatacgatcctgcagttgacctccagtaaaatgacctccagtaaaaatcctagagaaataatgcgggcagccagacgtggtggcacgcacctgtggtatcagctactccggaggctgaggcaggaggatctcctgagcccaggagttcaagtgcagcctgcgcaacacagcgaaaccccgtctcaaataagtacgtacatacatacatacatacatacatacatacatacatacatacatgcatacatgggcttccagttaaggtgaaattatgtattactctccaggccgtaagaaagggaaaggagacaacaacagcaacattttggaagctggaaatcaaacagaagaatgttaactggtttagcaaacttgagaatatttattacgaaacaaaggtaaacaagaggctgattatacctttggaaaaccctctctggggaatctcaccagccaaaacgaaaaatcccaaagatacccttatcagagttctcttaatgatatagataactagaatgaattccacatgtaacactttggcctacgtgccccagccctcattccactttccaatcagctttttagtgttcttactcttcaaaataaatagccagagatcattagacatttaaggaaggactttaatatacaagtaagaaacaaacaagaagggaaaagcaaatgagaggaaacataaattgcaagggaggggaaaaaacactaaaaataaaaaatttaaaaataggccgggcacggtggcttacgcctgtaatcccaaaactgtgggagtccgagacgggcggatcacttgaggtcaggagctcaagaccagcctggctaacgtggtgaaaccccgtatctactaaaaatacgaaaattagctgggcatggtggcacgcgcctatagttccagctactcaggaggctgaggcagaagaattgattgaacctgggaggcggaagttgcagtgagctgagattgcggcactgcattccagcctgggccacagagctagactccgtctgaaacaacaaagcatttaaaaataatccatcatcagacttctcaaagagatattatagagcattcataaaataacaacaggaaactacttgagagtaactactattcggataagcaaaaagagctcttggaaactaaaaccatgttacagaaataaaaattctataaaaaggctgggggataaagttgaagaagatcaaatttgttctgctttaggagaaaacataaaaataaaggatcagtccagaaggtctggactaaataagagttctaaattagagttccagaaagagaacagagaatcagaagagatcatcaaaaaaactatttaaaaggactatcccaaactgaagaacagtctccaaattgaacaggcaccctaagtatccagaacaacaaatcaaacccacaccaagacacatcattatagaatctcagagtactggacacagagaaaaaaattctaaaagcttccagagagaaagaacaagttgcatatacagacaaaaaaaatcagaacatgtgacttcatgttgttgctttgttaatacattttttaaaaatcagtataacattaggattaagaatcagaacaccattgctacccaaagcaatctatagattcaatgcaatccctatcaaaataccaatgacat

SEQ ID NO: 916608 - DNA, 4001 bp, Homo sapiens
ttataaaaaacatatttgactgtctttaaaatgcagtaacattctaaggaaaatacagtagcatctttccacagatcagagattcaataactattatgattcaatcaaagagaaataaaccatggccatttttaattaaacaggcatttctaagcacctgtgtacacggtattgctgttcaaacggttgacatggaatgtgaccgcaataacttgatgtccataattaaagacccaaaaggtagcttaagtttcatctatttcctttctcagccctttgagcaggtatattatagtcactccatacacggttaatattaaaaaaaaataaaagtaacaaacatttgaaattagttgtacttttatagagaacagttttaaattgcatggccttacttttcctattccaacctattttataaaactagcatgatcttaataatttcactgcaaaacaggttctagcaagcatagaaactgatcatagcctctcagcaaaatcaagtttagatgaaactctaggaaattagcaaaatttaacaatcaattcacccacgattctccacaattcttgctctctctagatacgaagggaggcaaaaactgttttaaaggattatttcaaaagcagcactaattttgggaaaaacttaactgccatgcaggagacactgtattactactcagacgtcatttaagtcttctagcagcagaaaggcaaaaacatcattaaattttttatttaatgcatatatacttacattatcagttaaagtttacccatctgtttacgttgtccaagttacctattatttcagaaagcatttaaataaaatgaaattaggttacgttctgcaacgcagatgtgtctcataaagaagagtgttaaatgacttttgtgaatggaaaatctgcatatactgttgcttcgcctcagccagtcttgagtgggtggttcaatgaacctaaagcatgctgcctgtgaagctccttggaacctgattccactcttgagagagggcttagaaacaaacattaaatttaaaagcacagcaaaggcttggctttcctcctacgttacaagaaggccgggagaactgaggcttagaggaacaacaccgtgtcgcttggctctgcaaaggcgggtgcggtctgcggtgcgcggcacagccttctctggggctgtcacaggaaagaaggagcctcgccttaaccgcaccgagcgacaaagcgccagctctcctgggcgcgggggctcccaacgaggcccatgccatcaacctatcaaacttcaggagggacagacacccggggcggtcgaaatgctccaacagcctcccacccccgttcccctgccgcggcttttgtaaggctgcagatgcacctactgtgggcccctaaacactccaccctgccagcctttccaatccccctactccaaaagggaacaaaggagccaaagaactcctcggcgggggtggccaggagtccccgacagcccgagctcagaacgtggcaataagggtgcgcagtcgccctgaggggtgcgaacccagcaccccaacctcaggaatggagcaacactcacccgtgcggagctcccagggaggcgggacgcaaggagccggttcctccgaggtcgccgcggcgccggggtccgaggccccgtaagcgtctagtcagaccccaacttctctcggccgctgtcgtcggcggcagctggggcgcgagcctggacgaagggcgctgcccagcggccgcggaggcactgccggctcagcccccgagcggggcgggaactttcggccccgaggtccaccagcccgggcggacccccaccttccctcagtcggcttgctaccggcagcggctactgcggcgtccaaagctaacactacagccgccgcctggccaggagcgcgtcgcggcctaatgttgtcatccgccgcgtcgccgcctttctgggcacccagaaccgcgaagatccttcacattctagtgccctccccctgccccgcccgccccccggatcacgggcttcggccacgccctcttcccgtcacgtgacggtgcgcggaggcggtggtggagttgcttcccctgctaggcgggctcgaaccgggcgggagtcactgtccaccttgcttcgccagggtgttatcgccagccagtccccttccgcatgcccaagggcagcctcaggaagcgagcccaccaccgtcggcccagcgcctgttgatcggccaggccttctgggccggtcatactgggcccttcctaacctgaggagattgcacagtagggctccctggtctggtcagggctcagttaggacccctctccagccttaggcttggtgaaagctttagcgaaacagaaaaaagaacgcatcgtggtgtagagtgtatggcctaagaagcattcggtaactaaactacttgttcctatttctagtggcacattaaccgtggcatttaatttactgctttcctcattagaggtttttttttttttgaggaaacggtgtatttcaatcatgctgggatgaaaacagcctagcaaacttatttttgttccttgttatgttcaggatcctgctgccagttttacagtcattaagttttacagtgtgttaggttggtgacagtttaaacgggtacgcaggaatttgacagtttgttccattttttaaaataaagcctaattcttgattttttttctaatgccttaatttttttttcctaattccttaactctaggacttaaccttttgctttcttttttagccatgatccgaagaaccctctagccgcctaatgaaatcctaactatacagaagtaagggaggtagaataaagatcatactcaaaccctgatcacaatgaaggcaaatgagaaagctttctgtaataattaaattggggtcataactcattttcccttgtagcccagaactaaggatttttttcttaagctattctcatctcattacattttcttaacaagaaatcagaaggcattctgataagctggatacattgaaatgaataagcaatagagtttggcctatataattattattaatatatttcatagcagctctaaaaaaatcatagacttacattgttttatgttacccaagaaagaaaacaaaggctgccaatgaaactatgccataccgctgatatgtaaggcacctttaagccacatctttttccttttttttttgagacagggtctcactctgtctcccagactggagtgcagaggcgcaatctcggcccactgcaatttccgcctcccggttcaagcgattctcctcccttagcctcccaaggagctgagattacaggcatgcgccaccatgcccagctaatttttgtatttttagtagagaggaggtttcaccattttggcaaggctggtgttgaactcgtgacctcaaatgattcacccgcctcgacctcccaaaatgctgggattacaggcatgagccaccgcgcccggcctgagacacatcttgaattcagagatgtaaacatgtcagaaacaacgagtcttagaatctctgagatattgtcatgaactgggaaacaacgagtcttagaatctctgagatattgtcatgaactgggaaacaacgagtcttagaatctctgagatattgtcatgaactggtgttccaaagaggaaaagattctaccaggttctgttctgaagcctgagagactgtagtacaaataaatgtgaaggaagtttattattctgtgacattatttcagcaaagctagtaactttggagtttgttaacagattaacttgtctcctgttttctagaggcatgtttttcaacctgcaactcaaaaatcaatttcatttttatatgaaataggctaggatgtaatacaatataaaataccagagtgcataatgtctagtaagggcaaaaattgcttcctgaaactttttgtttcaaatatggtggaaggtgagagtatgtcc

SEQ ID NO: 916609 - DNA, 4001 bp, Homo sapiens
tatttgctttataatgttttctgtttttgtgttatatttatcaataaacattttatttttaaaaaatcaaatggtgaatagaattctgcttttcattaagcagatcagtttagtccaaaaaatgattttctttatttactgctaaaacaattttttatttttatcattaaaaaatgttactctgctaaaaatgaacataatacatttgttatcaataatgtatattaataataatgtaaaggataatattatggaatataacttattttacaaacttttgaaatgaaagtaatatctttttagtaccaacagtcatcaaagactccttttataattaaaaggaaaagaaatactttgtaattaaaaggaaaggaaatattttcataaataaggaaatgaatgctagatcatttttaatctgcagaaatgttttttaaagtatatttcatgcttttttgtaaaacatttcacttatttttttcaaaagcagatatagttgcctgctgaggtttgctcattcccattaactttatgttttagaggacacgaagaacaagaaatactcactttgatgttcccatcaatatagacgatgcacaaatatattctgccagagacaaatatataagaatgaaaaaaaattatccaaatatattggctacatgttccagttgtttaaaagaacattttaacctaaattctaaaattctgattgaagtttgctgttagttttgcattttttagagggatttgaccagcaaatttcctgtgagacactgaatgactgataagctaaaaagaaagggcagtgtacatggatttacacagagacaccatgcaactgaacagacactagccttggaatcagagttccaagttttagttctagtcctaccacttactatatgccaagcttaaacaaaatgccaagcacaccataaaatgatggtgttggacaagttatctgcaaagtctcctcagctctcaagattctgtgacatcgttctccttggggtttcagtcacaactggaattggaaaatagcacctttgacctctgtggtcttttatacttaagcaatttctccaatttcccctacaagctccaaagcatacagacctttacagggattaaaaatcaacaactgaaaataaatcaattctttgcccattttgttaggtgtgataaagtgcttatctattaaaaatatataatatgtatttcatgaatttaaaatactccaagaaaaaatgtgtaacagggtaaaactagttccacaaaatgctgatagttatggaactgggtgaaggcacgtgaaggtgtgttatgtcattttaattttgtgtgtgtttataagctttccataataaaaaaaatcaaatagcaagaaaatttattaataaaattaccataaaaataattaaaatcaatttttagccccagatgttagttatttttaaacatttttttactattctttgggttgatggcatgaagaaagtttaagtactcaattgctgtttattataaaatttcaaatgtttaaattgcaaatagacaattattttaaatcatcttttagaagaaaaaagttagaatcacagcttcttctaatacaattgcatatcatgataaaagcatgatttttaaccagtcatttaaaaaagattcaagaaatgaaaactaaaaggttctagtacaattgcatatcataataaaagcatgatttttaactagccattttgcaaagagtcaaaaaatgaaaaccaaaaggtccaaattatctacattattaagaattttttaaaaggtgatctgagtatcatttagtacaattcattctaatgacttcaaagtgctttataagggaaaactatttgtataaattgtaagagaaacaaaaatacaataaattaacataaaaatttaatctgagttcttaccttgtaatgaaaacagcagtacatgaagcaagaatatactccaaggtatcattaaattgagttttcttacaatgttcatttcagtgtagcctttccccctgaaatgtaaccaaattgatggtctttattatgatggcatcttagaagtatgcatatttgtagggtactcaaattctaataaatatagctatgtaataaagtaattcaaaaaggaattccaggctttccaactacatacagcatctgaagctttagaacttgcagacaaccctttggctgagtctctcattagtgatgcatggcagcttcttacctgagcccgtattagttacacccacacctgcacatcataggcctttttagcctatatcaaccttttaccttctcaagacagcagcattaaaataaaaagaaatatctcttgatatctcctgaagccacaagagataaccattattcctaatggttgatctaatctttgcattttagaattttattcataaaataattactgtcctttgaaaaagggtgaaataaaaccctgtcaatctttcctaggatgtctacatgttcttgaataattaaaagttttctttaggaattaaaaagtacactaaaactatgtgcatctatttttaagtcccattacagtatagtttaacttgacatgttcatgggcccacagatatttctgttaaacatcctgcaacaaaagtagcaatttttaaaaaaagataatattctatacttgactttgaaaagaaaataaagtaactcacccagccctgaaaactttcccttcacaccctgtttttccatcctctgtgacaaatacccaattaaacaacagacttattacttcagcaataggggcactattctttaacagggattgactgcttacattggcatgagaaaagagctctaatatgtcataatgaaatttatagatctgagccccacaccttagtgaaaaccatgcttatatagtgggtgcacatttctacagcagatcccatgagttaactgcactattatcaaagtcatttaacagaccagtgtgcagtagtaaggaatgtctagccacacagaagtactttatgaaacaaaaaggcacagcagttgttaatatcctgttgtacccagacaactcttctgcaatgacttctgagtcttttctattaagtattcttgacatcctaactaatgttacatggtccaacattcattatataaacagtttcctgtttgtgttccaaatccaataatcatttactcttgctctagataaccataattcctttccattgccgaaataatagctaattccatgagccaacagatgtttgtctataaaggaaaaagcttaagcatgaaaatacatccaaatttcactaaaattataaagtagttatgtgactgtcccccctccagcacacacacatgtacacacacattcacactcattttgaatttttaatgaataggtttaattaattgaagtacagtatgtgtttaatattatttattaaaaggttactagtctcttactcttgaactaattagacaatcatataaatctaacataattaacttatgtataattacattccaaatattagttcaaaaatatatatttactcaaccacaggcaaaactataaaatattttagattcttaagaatatgtgactacaaagtaaattaaaagactaaggttgaaatctgtttagaagacaatacttttccccaacaaaatatttttaattaagggaattagtttatgcagaatgtttattgactttttctggaaagagttgaaatgtatataaccaatatgcattactaagtccactcctcattttacaatagtttctcttgccttcacagtttcccatataacttaacctacactatgaaaaatctataaatcatacttcaggattatttttcctaatctagtaactgtttgactttttgcttgacttaaaaatttccaaaagtcagggctgggcgtggtggctcaggcctgtaatcccagcactttgggaggccgagc

SEQ ID NO: 916610 - DNA, 4001 bp, Homo sapiens
catccttttcttctttgatatacaaaccatagttcacacatgcaatgccatttgtaacaggatacagaagtttttttctagaactgttccttcttttctcttattagtaccctcttttaatctggtcaaatatttgtaatttctgcagttttttccctcctaatgatttaaacccagatgattaaaactttggagcatccatttaacatttcttgttaatgctttattacagtaagtaaccaccacctctacccaagcactaaatccataaattatagatgatgtctgggattgtttaattcagtagaacaggaagcactgggaatcttgggacagacacacatttctgggaatcaggaagatcagtgggtgggtacactgggaggcaaaagtaagaaagggactgagaatgaacctgctatttagagcaacaaatctgccagtcgcatagccaggaatcaaggcctgacaagtaatggaaatccacaacttactcactgaggctgtccaggcagtgtgctgctgtaacaacccgatcttcttgaatcaagcttcctccacagaagtggtgctcatctgattttagggagacctacccaagaagaaagttacaaatgcagctaatatgtctccccacatatgtatctccatcggaaacactggagatcaacttttctaatctgacataatattcttaaaataccgacataaattggatagtaagatagttcctacgaagtaaactttttggtagagagctagaggggttcaggagaaaaactacatatcaacgtgcattcttgctttcgaaacaaaggaaatatttcactgttttctcattaagaaatcaatgcctttgttgcactgacctgccatggatgtccagtcactgttgaatttctccaactactaattctagagaagaatctagatcccacggcaggttccttacttttcatgttgaccatgcgaattccacacttcagtcctgtgtagaagagcatgtgtgtgtgcacacacagagccttatgtaagagttcactttaccaagatttcccatttggattttcctggcctggcacagacattctgatagcacttagctgcagactaccacattcttctctcaatattttcttcagaatatcccacagtcacctgggttgaccggaatttgcctcctgtctgctccctttcagcctgtgttaccactgggcaggaaggagccagcgctgcctctggtaggtgacttggggcttactctgggaagatgcaaatttaggttgtgttaaagataccaggagccacatgcagtggttcccgcctgtaatcccagcactttgggaggcccaggtaggctgatcacttgaacccaggaggtcagaaccatgggcaacatgacaagaccccatctctacaaaaaaatgtaaaaattagccaagtgtggtggtacgtgcctatggtcccagctactcaggaggcagaggcaggaggatcacattagccctggagtttgagggagccgtgatcgcatcactgcagtccagcctgggtgacagagccagaccctgtctcaaacaaacaaacaaaacaaaagatactgaggaatgacctatactactccggaagggagatatttgtctttaagttacttctacttggttaggtttccttggaggaggctccttagtacacacatgattagcaggtgtgcctacaaacgaactctaaaatgcaaaaaatttcaaaaaggcagtctggcccagaccttcctttggggacatctgagcatgcaccaccccctcaccctttcttcccaaatgcctcaggtgtggctataccaccccgacttcctgaggcaaggagtaatgaagtcttccctctccagcacgctcagcctcctccgcagtcctggtgcccaggtccctaggctcacctaggcttctggggtggccgatgaccagcaacagcaacaaaccagcactggccagcaggcccatagcctccacgcaccggcctcgcacgtcctccctccctgcaggctgagaaaactgtggtgaaggcgggggtctcgccctttatcccctcctgcggtgcctatgggcagcacctgccgtggcgccttggttcgcaggtgtccctcttcacgatcatttgatcattgtgagctgccgccgctctctggtcacccctggtgtcacagtgccccgccacccagccttagagactggcacgaggtggcccaaggggtgacagtggtgctcacacgtgtgcagaggttcctgctagcagatccacagcaagccaatcagtggcctggaacgcttagccctgcgaattcccagactggggagtgcggtccaagctcaggggcaatgaagctggtcccccacacgaaacacaggcaggacttctgaaaggcggagggtcaggaagcttagtacaatactgccccttctaagaagcttgttgcccttgaccctctagagttttcaaagagtgaataggaaagatcaggcttgagctgacatcattttctgggtggcagtactgtcctccatttcagcagaatggccccaaaactgtaggatccatcatttaagatgattaaaattaatctagtggtgagatatcactttttttcccatgaatattattttgtaataagttaagctgaagttagaagacaaagccagaatttgtaatggtcttatattttgtcagaaaattaaggcaaggctaagtggacattccatatatatcaaataacctggccaccagtccttcagcaccagttggaggattttacgttcaagtgctctattttactttcatgtaaaatagaaataaaagcttcttgaggtaggagggtacataaactaatgggggcaggtgggagatgagcaggtagatgggaaaacagaaggcagtcaaggtggagagaatgcaggcacaggtacaagcaggtgacaatctactggggacaatgacctctgtgactgcaggagagagcagagggtaaatggacaccatttgaagaaaagactaaaaaaagtgaatgatgcctgtcgctgtggcatcttcaaaaggtgtccatttaccctctgtggctagtggctaccatattgaacagcacaaatacagaacattctgtcatcaccaatagttttatgggactgtgctgttcttgagagtagcactattttcttttgagtatttatttcaaggaaagacacctcggatgacagtttgagtagatgactccttagtttcatgcctgggtgtctaggggatagggggtgtccagcatgctcttaaggtaagcagctcttctgtgaaaataaaacattgaacctccaggcttcagtactgtccagggaatgtccagatgtgtggctacctgaacagtggccctcaccactttcctccctgtagtcatcacacaggggtgaccatttgaaccaccatgccagctccagggccacaccgttctccaataaaagctcagagcccccacatggacccaaagccctctttctttttagcaagaggtaagatgaaacccaccaaaaagcctttactaaacaaaagggtaaggactagaaggtgaacatgtgctgtgcaagaacggtcaggccagcaatattcaagttgctggtcaaaccatggccagcccttccgtgaggctcacaggtgctgtcccctttcactcttctgcccatggcacacagctttgcagcatactctgtggtttctttgtttcaaacctgggaatctccatgcggtggggcactgtctcatttcctgttacagaacaactccctttgtttccagagttcaaaacccacagcttcaactgagaccctattcttatatacaaaggtttagtcccttacaggcctcacataataatgcctttccattaagtggaaaaagagccattcaataagaattacacaccattaatagccaggccataggccaggcgcagtggctcacgc

SEQ ID NO: 916611 - DNA, 4001 bp, Homo sapiens
cagcagccagccccatggccagtgtcaataattcagcaagcgccacaccggatgggttgcgctgatcgcatttcttttcctctgcctgagcggggccagctggtcaggagggaggagggactggtcccctgtaccccaggccctctctgtgcaggtgggagcccaccctggccccaccctgcctgcgcttgccctgccttgtgtgcgagctctgtgaagctctccccagccttctccacgataaagcccagcttgaagatggggcagtagaggtcggaggcctcgtggaacgtgcagcgcttcaggtacccgtctgtgcggtcggcgatgttgcccctgaggaggcggcaggaggcgagacctgcaccccaaataccccattcccagaaggcagccctcaggctgggccgtcaccacaccccgcggctcttacttggagaagtggaatttggggtagtggatgctgttcttgatgaggatggtgaaatttggggccatcgtacccagaaattggctgaggaggcacagaagggttgtttagtcccctcttcccgcaaagcccccgcctggcattggcccccacccctccccagatcttgtcactcctgccccgcccgtttggcctctggtcaggggaaaaggatcagaggggaggctgggccccaggccggggcgcaggtgcacctgacagaggccccatcttccaccgggcaccagccgaacacctcgcaggtcttggagggcccctggtaatagggcacacagcgcccagtcctcaggcctgggaggcagaggtcactgaggcattagcggggacgcagccctgccccacccgcccagccccagctggcgcacaccgaccgtttcccagcatgtccagctccccagccacgcagtcggcgtcggagaggcaggtggcgttgtggacccttatgctctagggtggaggcggcccagtcagggaccccgcaagggacagctggcccgcctagctgaggcggggtcccccagcgccgcgggatcccctcacctcggggcaggttccctgggtctgggagtgggtggcctcgaccctggtgatgatgctgaacacgctgcccccctgggctcagaaagagggggcggtcggccaggcggcagccgctgccccctccgcccactagggtagggtgcacggcggggcggggggcagggggcggcccgcacctcggggggcttcacgtactcctccacgtcccacactttgtgctcggacgtggtgatccccttgaccttggtgatgatggagctctcggggcccgtctcgctctcctggtagcttttctgcacgatgaatacgtacctgcgggcaggggcggcgccggctccggaggcgaccctgggaaggctgagtcccgcccgcaggcacggcaggggccctcccgcgacccgggtccgctctgcggggctcttggggcctgccccgcgccctcggtcccagccccagcccctgccccgcgcccccggtcccagccccagcccctgccccgcgcccctggtcccagccccagccccgcgcctccagcccagcaccccgagtcccagcccctgccccacgcccccagtcccagcccctgccccgcgcccccaatcccagcccctgccccgcgcccccggtcccagccccagcccctgccccgcgcccccggtcccagccccagccccagccccgcgcctccagcccagcgcccccaatcccagcccctcccctgcgccccgcaccccgcgccccgcaccccgcgccccgcgcaccacacgaagtagagcaggatgagcagctgcacggcgcggtacaggacccccaggcgccggttcctcaccacgatcaccttgggcgtctcgtagtcccagagggcggaccagcagccccgggccaggcgccgggcggtcgccccggcggggtacttgggctgggcggcggccatggcgcgggcggcccccacctccaggaaggcgctgcagggctgagggtcggccccgctgcgcaccgagagcggggggcgcgcggcgggcgggtagctcgcggctccgcctccggggtgcggcctcgagcccgccccgcctcgccccggccccgccccgccccgcaggtgtcccgggagtcccgggtgtcccaggtggggctgggagcggggcctcgcggggacagagccgggggcgcggcagcccagccccagctcttggtccaggtgggggccgagcgcggaaccggcggtctcgaagttggagggtcgggattccccgggtgggaactttttccgagctcgaggagaaagacatgggaagtcccgccggcctccgcggcgccccccaccccgtccaggccggttcctgccgcggctgccggggcttcgagcgcaacctgcactcccgcctttgccagcagacgcctcgcttccagctcctgcctccgccgcagctccagccctcgagctggagagggatccacggccgatccgttttcttctttgcaagccagagttttctttctttctttctttctttttttttttttttggtaacttttcgaacctccaccccacccacattattttgaagcaaatcccaagcatcacagtttttcacaaaataattttaaaatagtttattatgataaaatcagcatagcatgtaattaactattttaaagtaaacaattcagtgacattcacaacattgtgcaaccaccaccgcctctgtttcgtccccaaacactttccccaccccaaaataaaactcccatccattaagcagtcacgacccgttccacactcctcccatgccctggcaaccactggtcgcttttctgtctcagtgaatggacttgcctgttctggatatttcatatcaaggaaatgcaatatttgtttctgggttaatgccttttctgtctggcttcattcactgagcatgttttcaaggttcatccacattgtagcatgtgtcagggcatcaccccttcttatggccaggagaaatgtctaggctatccaaagaaggaatttagattgctttcaaactaactctgtgaatagtgctgttataaacactggtgcataagtatttgtttgaactgttaaattaactcaattaacaggctgcctctgtgccttgagtttctaggtaacaacaaactgcaacctaatgtaccacagaaacaagctaaaagcttaacctatgagtatattttggaacaaatagctgggtctcagccagtcacaggctgctaactgatctgatcatgccatataaggcaaacatttcaagcagtaacaaaatcaagctaattgtgatttttttttttttgtatctcacttctgtgttctatctataaaaacttcctgcccacattacagagtggagctctcgaacctcccccattggttctgagtgctgcccaattcatgagttgtgttttgctcaattaaactctgttggctgggcacagtggctcatacctgtaatcccagcactttgggaggccaacatgggtggatcacttgagatcaggggttcgagaccagcctggccaacatggcgaaacctcgtctccactaaaaacacaaaagttagccaggtgttgtggcatctgtaatctcagctactcgggaggctgaggcaggagaatcactggaatctgggaggtggaggttgcagtgaactgagattgcaccactgcactccagcctgcatgacagagggagactctgtcacacacacacacacacacacacacacacacacacacacacacaaactcttaaatttaatttgtccaaagtttttgttttaacagtttggtgtcagaagtgggatctgaagtagacctccagccaccccctaggagcactgaatgctcagtagggcctgtgtgcctgctgatctctcaaagcatctagagtcataggtgagttctctctgctggatttgtgctctatgaccatgtgttttgagccctctac

SEQ ID NO: 916612 - DNA, 4001 bp, Homo sapiens
ccctactaaaaatacaaaaattagccgggcatggtggtgggtgcctgtaatcccagctactcaggaggctgaggcaggagaatcgcttgaaccagggaggtggaggttgcagcgagccaagattgcaccactgcactccagcctgggcgacagagggagactccatcaaaaaaataaaaaagggtctggggatgggagccaaagatttccagatggttccaatgtgcagtttggagaccactgcactaggcaatacgtgtcagcccagcagctgtagacaccagaacaccccaggtaagcctttaaagtggccccaggtggcaaggtaattatcatcttctctctcgcgttgtattcaattgtaacaggtgccagccccgcgtgggggctcacgcctgtaatcccagcattttgggaggctgaggtgggcggatcacctgaggtcagttcaggaccagcctgaaaccccgtctctactaaaaaatacaaaaattggccgggcgtggtggcgggcacttgtaatcccagccactcaggagactgagacaggagaattgcttgaacccgggaggcagaggttgcagtgagccgagatcgtgccattgcactccagcccgggcgacaagagagaaattccgtctcaaaaaaataaaaaaattaaaaaagtaacaggtgccttcaagtacaatggcacattcagcgaggcctgagggcggtagggcatctctagcctaagggggcagcatggggaatgactgactaggctagggcaggtaccacaaaaagccccacaagcccagaaaacaaaggaagcaaactttaaacactcgctacagtctgacctcgctactaccacatagtgacaccgcatagtgatcaaaagaaatgaccaaaagccacccacccagaaggaaccaagcggaaattccaagctttggttttgtcagcaaatcagcaggatgggaagtggagagcgaagattgagacgttcagggcgaagcccctacagccaaggggcactatggggggtcaggcaggagagggtaacagcctagccaggctttgcctttatttattttgtaaacagacgggtctcggactgtctcccaggctcgagttaagtggtgtgatcatagctcactgcagcctcagcctcttgggctcaagcgatcctcccacctcagcctcctgagtagctgggaccccaggcgcgcgccaccaggcccggatgatttttaattttttgcagagacggggtcccacgatgttgcccaaattggtttcgaactcctgggctcaggcgatggtcccgcctcgggctcccaaagtgctcggattacaggcttgcgccaccgcgcctggcccaggctgtggttttaaaacagcagcaagcagcctcccgcccccggggccccggcgcggcggctggggcccagggaaggtgtcaccgcctcggctcgccgctcccggactcgcccaggtgaccgaggccaggatgagccgccgcacggcgcggacgcgagggcagcacccgccgcgccccccgcgcggccccacgctcacccgatgacgtaggccaggatgagcagttgcacggcgcggttcatgagccccactttgcggctgcggatgagcacgatgcgcggcgtgtcgtactcgaacaggaaggccgccagcgcggcgcagcagcccgccatggccgcgccgcccgctcccagtcccctagtcggtctgggtcccagtccccgctcggagccccgcccagtccgcctggcctgctggcggcgccgtcatcgcggaggagggcccggaaggaggcagcacgggcggtcggggcccggggcccgggggagggcgccacctccccgtcgggaacgatgaccctctagggggcatggaactcgcggggggggagtggcctcgcccttgaggacgaaaggctccttcaaaaggcgggcgaggggccgggggcggtggctcacacctgtcatcccagcacttgcggaggccgaggtgagaggaatcttgagttagagaccagcctggacaacatagcgagacctcgtctctatcaaaaatacaaaaaaaaaaaaaaaaaaaaaaaaaaagcgggcgtagtggcgctcgcctgtagtcccagggaggctgaggtgagaggatcgcttgagcccaggaggtagaggctgccgtgtgagctgtgatcgcgccactgcactccagtctgggagatgaagcgagaccctgcctcaataaaccagaaaccaaaaaacaacaaaaaaggcgagttggggagtaatgaccttctcaggagggccagagagaacaagagaccctttcggggaagatggggtccgcgaagagagagtgacctcccatttgggacagagttcaagtgaggggtaacgagcgacctcccttaggggtactgataggtgccagggatttccgtagaggaccccggggctgtgcggagtagccatcgctcacgagtgcgggctcctaaacttgggcagctgtggttgggggagctggggccgcgctgtccttagcctcttggggaacagcctaaatatcaggtgtcctgtgagccctgggtgagagccacacgccctgtaaaatacccctcctggatttgaagcctggtcgcattctcactccaaatacttccttagttgcagcccaggggagataattctgtggtcatcctttccactgagaaaatgctatcacaactttaggagagaaaatagtgaaagggggggaaacagccaccgttctaccccatgaatacaattttccgcatgtgtatttgttcattcccttcagatacgttttttctttttctttttctttttttttttgagacggagtttcactcttgtccagtctggagtgcagtggcgcgatctcggctcactgtaacctccgcctcccaggttcaagcaattctcctgcctcagcctcttgagtagctgggattacaagtgcccgccaccacgcccagctaatttttgtatttttattagagacaggttttcaccatgttggccaggctgatctccagctcctgacctcccatgatccacccgcctcgggctcccaaagtgttgggattacaggcgtgagccactgcgcctggcccagatgtgttttcacaggtgaatgttatatttagtttcccagaaaatattcataagcacatcctttatgccaagtactgtccagtgaacaggacaagcaaaatatcctgccttcatgcagcataaattccaacaggtaattggtataaagttttggtttgtaatcatagtcaatggctgtgcttttcattttctgattcgcactacgtggtttctgtgttactgcagactcatcataatgacaatttttaatccatggaccatttcttccggaaaatataccacgatgtctctaaccgctctcatctgcttgcttcttagtttgtggatcctatgcataatctttgatacaacatttttagctcatttcctggatatgagattcctaagtaagccacaccaacttgtttttccaaatatagaaaggtgaataataaaatttgcagaaaacaggcagcatctgcctctaagagatggaattcttaagttagagggaggaacagagatgcccatgccagccttggtccaaaatggtctcaggaaaaggtggtggtattttattcattcatttgacagaaatttactgagtgcctgttgtgtgcttggcacttttcttgatgctagggctatggagtggacaggtgaggtatctgcccaaatggagtttggtgcaattgggaagcctcaaattatctgtagaagaagaaaactccattgctaaatcctcattggaaggggacttaaaaatcatttccttaagaatcaaaacatggctgggcacggtggctcacacctataactgcagcactttgggaggccgaggcaggcggatgatcatgtgaggtcaggagctggagacca

SEQ ID NO: 916613 - DNA, 4001 bp, Homo sapiens
acaaattgccttcatcatcattatcaatcagcacagagaataagaggcactcaccatcagggaaattcaaatcacaaccacaatgaactaccacttcacacccactagcatggctataataaaaaagacagacaatcagccgggcgtggcggctcatgcctgtaatcccagcactttgggaggccaaggtgggcggatcacttgaggtcaggagtttgagaccagcctggcctacatggcgaaacctcatctctactaaaaatacaaaaattagtgaggagtggtgacgcacacctgtaatcccagctactcatgaggctgaggcaggagaatcgcttgaaccggggaggtggaggttgcagtgagccaagattgcgccactgcactccagcctgggcaacagagcaagacttcatctcaaagacaaaaacaaaatgacaacaacaaaacccaaaaagacagacgataacaagcgttggtgaggatgtggagaaattggatccctcatactctgctgataggaatgtaaaaaactgcagctgctgtgaaattcagctccacattccccccaaaggtgaaacatagttaacatatgacctagcaatttttactcttaggtacatattcgagagaaaggagaatatatatccacataaaaccttgtacacaaatgttcatgtggcattattcatgatagccaaaaaagagaaacaaccccaatgtccatcaatggatgaatggatagaaaaaagtggtctatccatgcaatggagtactactcagccgtaaaaaggaatgaagtatcagccgggtgcaatggctcacgcctgtaatcctgacactttgggaggccgaggcaggcagatcacttgagtccaggagtttgagaccagcctggacaaaatagtgagaccccgtctctttaaaaaaaaaaattgaatgaagtatcaacacatgctacaacatggatgagcattgaaaacacgctaagtgccacaaaggaccacatattatgtgattccatttatatgaaatgtccagaatcggcaaatccatagaggcagaaaggaaattgatgggtgggaaggaggaggaacagtgttggaaatgatggtgaaggagtgtgggattccttttgagtcgattaaaatattctaaaattgattgtggggatggttgcacaactctgggaataatctgaaaatcattaaatggtaccctttaaatgggtcaattgtatggtgtataaattatatctcagtaagtttcttttagaagaaacaaaaaccaaaaagcagggccttcctgacgttggtgaggacctaaagttataacacattttcaagcctggtcctattcctcccaagcatggtgactcagatgccagcatgatcaccaggcgtgccctgagatcctcgcctcctccctggggatccagggtgttgccctgcgctttcctaccttccccaggcacgccctgccctgcgcgccctggcgggcctgaagtagagcagaaaggaatcccgcttgtcctgtggcttctctctgctgcagcctggcaccgtttcctcttgcctgctgctgcttcctccctcccgcccagctggctgtgagagcacgtctcagattcgaaaaccatgtgagattcagaatgtgcacctgaagctgcccgctggggctttctgtgctgtcggccactgcagagatctgggtcctccccagatcccacttaccaaacgtaggaaaagatgatcacgtggaagaaccacttaatggtgccataattcatgctctggatccgagtgactttgttcgtctcatactggaaaacatcactgcagctgcagcaggccggcatggtgacagcctccctccctgcgcggagctggaccagagctctactcttcctgacagggccacagcaagccccctcccagtaactgcaaaatgaaacgtactggtttttagcaggagtctttaacttcaagctcctccaatgactgcagagttggggcgggccctggcagtggccccacatgtggctgtgataaacaagaagcgccaagtcctacgggcctggctggcagatgacctcaccccagctggcctcccccagatgcctacacaaagatggtgttcagaggatgggcatttttagaattctcccttttcccccctttcctttcacttttttggtctcatgtctcttgggagaaaggggcagccttgcaaatgtcacaagactgggagcttccattatgcctcagaaaaggactgagatctttccattgcctgaagccccactcagagattgattcattcatttctacaaccctttattcagcccctgatgtataggagctctgggtaaatgaagatctccccctcttcttccaccgccccttataatactctggtctgcagttggtgggggaaatcagatttgcaggggtaggggtggtgggggtggaggggctttatttttctgccagatctttcatgcttgaccctctgagttactctccaccctcctctgcaccccggcaggtcgatctatgacctagaccaatcagccaaagatcaccagggacacagtggcagtccaacaaagttaggtttgttgacctattcagtgagggacaccacccaccagaagagctacgcacatcaccaaacaaaggaaaacagcaatttattataggattccgaggaaagtggagttgagataaaatctaaatgaagtcatgttttgatggactcaaagcaaaacaggtttgtacaaagcagtcaacttcagtctggattgcaaagaggacccagggccctgtttcctaggaagcaacatagctaagatacatgtcaaatgtgtccagaaaatctttatctgaagctctgctcctgagttgtaaattgaggctgcttctctgtgtcaagatgacttaaatcttccaggcaaaattggaatatttcagtcttagtcatgtaatttcaaacagcaaagtttctgaaggtctctgattttaaaggacaatgtttcagcagtcactcaaagatgcagggttgtattatcactttacagctacagagaattattgttccctgttatctttacagctggcttgatccctttctgttattccagcctgctaagtggccgggtagattttcagtttttcagtctaaactaattgtactttctcacacatacaaactgcatcagggttcccctcaccttctggcttccagttcaggagactggagagcagtgaggatggacgtgactccctggccctgcccttctcagttgcatataggcagggcttctgggcaccactccctcctttagtcctgggagtggtaagggctccccactcttaccagccccaggaagctcactatctcctattgctttttcttaactctgtccacacctttgtaaatggttccatcattagttaccccacttgagtatgccattgctttcctgccgggaatctgagtgatacggtcatcttcatctgtaaaaagaggagattcacaggtaaagcctgatgcttagaacataggctctaggggactaatggcctggcttccgatcctggcttcacatcttaccagctctgtgaccctggacagctctgtttatgctattcattcactcattcccaagagcaccaggaatagtagatatggcagtgaacaggcagacaagtcaaatgtccatcagctgatggatggatacacaaaagcacgaaagcccatacaagggaatattattcagccataaaaaggaatgaaacactgacccatgctccaacatggatgaaccttgaaaacactacgcttaagtgaaagaggccagacacaaaaggatacatcttttacgactccatttataggaaatgtccagaataggcaaatcacttcagtgttgctcttgctaccactcaaagacatctattttcttgtctttctttctttctcttttctttctttctttt

SEQ ID NO: 916614 - DNA, 4001 bp, Homo sapiens
catggtatccccacatacacgcaaagactagatgaaatttataggcatcagggacaagaaggtagacagaattgctgactcgaagccgatgcactgttaaatgttaccgcattcctttctcagacactctaattaggtgttaggaatctcaatctatatagacttatttcctcataaacaagtgcataagccaaggaaacttaatctaaggtccctgggtttcatttcgggggatcatggcttatctaaaagaaatatgaggccaaagttataaactgtaagagattttctgattcaaaccactagtatctcaaatactaaaaggcaccaaaaaccagggtacgatactaaatgtccactgtgatataaagcacaggtttgacttttggtatctcagttttggtgattctttgaaagctggtaaaactcagattttcacccacaggacgggaggcatcctaaatacctgttccccaccatctttgctgttaaaaccatttaaaagcacaatgacaagcagtttgtatctccctaactggaataaaatggaaaggctaactggaaagagagaaaagagaaagtggcatctgcctagagtgacaggcaactgctgagatcgtcagagcacacctggagtaaggatgacttgtgaaaatcctaaaatcagtcctcccttttccagtaatgttcacaagcttgcctagttgggataagacggagaccccaaaacatttgagttgtcaagtcactgagaacaacaaatgtgaatgctaactaagactatctgcacagattggaaaggtggtagtaatgagtaacttcaagaaaagccatatatatctccaagacttgcattagaagctccaggagtgctctccaacggtctccttagctggcccaaggtagaagggggcccccaccagggtaagagctgaagtaaagaaggaaaggctccagcaaagcacgtggtggggaagctggtggtggggaagctggtgtcagggacactagcggagtaagaagggggccagccatccgcaatgggacccagcaacacgtgccggcttggctcctgacgccccggagacgctacaaaaacagaggggcacttctgtcgccaatagctgggcgcttccttttcgaggtggcctcgccgctgccagaatcagaggaagcaataatcgggaatgaaggataggaacaagagaaaacacgtcttgcctcctaacaaacggcctcgggtcggagcctgccagggtcccctctctgcgctcatcctggtcgccgacccgcacctccatagacttcagcctgggcctgcccgctcaggtcccaggcgcgacaccgggtcttcccaccacgccgtgcccagcggaccggtgcgggcccctcagtagctcagtccgcatgacccctccgctccagccccttccgggccagcctgttacctttccctatcagccttgattccccgacccccgaggccgcactcactgttggcgatgtcgccccccatcttatacttggtcacgaccaggtcctcagcgatagtttgctcctgttgctcgtcctcgcccgacatcttcctactaccaccactgcagcctcgtttcccctgagccgccgccgcctctgtctcccttcccagccacaggctgtggtcagagtcccctcgatcctcgaggagagggcgagcgaaagcgcgagcaagcaagggagcgggcaggcaggcgagagcgagaagctgcgagcgcgcgggctgaggcgcagggcacgctgggacaactagtcctctcggccgccagactctagccgctctcgagggccttcgaactacaattcccagcctgcctctcgcgctcctaagccaggccctggggccttgccctccaagggcctcgcacgccggaatcgccgggcactctgggaagggtcaggctccggcgggaaggcggagccgttggggagcttgaggggaagcgtggtctctcccggaaaaaccacttccaccgagaacgctgagcgagagccagtaacagagaggggcgggctgaggggagaggggcggagctacggcggggaaataggtttaaagtcgagcgggcaggggtggagtagagtggagccgcagcgggtgggcagtgtctacacctaggtcggggaggctgggtgcgcccttcttcggatccctgggtcggctggcgaaacccgcccagccggtccagtcgtcctccgaagctgggagaacagggaggggcagacaggtggaagaagaccaagggtgctggtaacgggggctaactgggcagccagacaccggagggatcatccatttaaaggcctcgcaatctagaggccggactcctaatgaagtaacatgactttattgttccaataacaggcacctggatggagcacctaagggaagtgttcagaaagacatgtttgttgagagttcttaccgtgaaaaaataaaaagatttgatgacttttctaagataatgaattcagaagcatctggaggtttcagtgtttggcctctgaaggagggcttatagggctttttataagtcctaaagcacgtaggttctttttgttattcccaattggttgccttgtagattcctactaaaacccttaatgaaaaggactatgcgctatggttgttctaaagaaatagaagtaatagtaggactagagaaagctgcatgggacagagtagcactgtcagaacacagaaaggtgagtatccactgctgaggagcagatctcttatctaacatacgaaatgtcttcatttgacagacaggaagctgaaaaaaaactttggcatttttattcagacacgtataaaaacaaaacaaaaaacttcagtgatacaacagacgttttcccttagttccccatccaaggggacagaggtgtgcagctgaagctggatcttttttctgtcctacctggaagcttctcactgctggatgagaatggcttctaaaagtggatcttggggatccttgtgaatttgccctcggataaggagtgaagatcatttacggcacatgtggattatggtttacacaaagatgtccagttatttttccttctgactacccccaccaccacttcctgagatgagatgtctaggtataggaggatgtggctgttggggttagacttgattcagtgcaaaaacaagaaacagtgccccttaaacaagggctgtaacttaaatcagtttttcttggcaccttacaataagagcacatgcacaggaattgggaggattttgcatcctggatctactgcttaatttatttcatctctttaaggctcagtttcttttttttttttcccctgtagagacagtgtcttgctatgtttccataggcttatctctaattctgggctcaagtgatcttcccatctcagcctcccaaagtgctggctgggattacaggcatgagccactgcacccagttctaaagttttttttttttttttttttttttttttaaagagatgggggtcttactatgttggctaagctggtctcaaactccttgcctcaggtaatccttctgcctcagcctcccaaagtgctgagattacaggcatgagccaccatgcccgacttccctttgtgtaaaatgagataatatgtatgtcacagaattgttttaaggatgataaaggactaagtgagataatgtaggtgaagtttagtatgatgcctggctcatagttaagtgctgaattatgatagtaatcaatatctactcctaacctctttcttcacagattttaagcttctgtctttctagggggttaagagtcataaaccaaaattacactttcctctgctaggtttcctccctttcctcttcttgacagtctgatgggaaacaaaggcacacataagagcctagttccaagtagtcaagagcctgagaggaagggatatggagagtaatccttcatatctccaggagtgcctgtgaaga

SEQ ID NO: 916615 - DNA, 4001 bp, Homo sapiens
ccatttctctccatgcactttgtaaatcagtgtttctcaatgagtgttccttggatcttgactccaaaattacaggtgattccttcttataatgcagttccctgggctttacctaaacctgttgaatcaagttgtcttagaatctgccatttcaaaaccatcccaggtgattcttaaccatagaaaattttggaaccattgatatatatacagcctatttttttaattataacttttccctaaatgtgtctgcaaattcacatttactatataacacgacactactttgtttgttattaatataatttgtggattctcaatcttctaagtgctctataaagaactttaaacccctatgctttcctgatgagatccctgcccctaaccccttcccacagttgtggggaccgtattgccagcagcaccaaaactatgtgcaggatggagccaggacctgttctgggatcactctgactctcacgctgttcctctgtacaataagttctgtctcctaagagccatgtactattttcataagaaatttttttttttaaggattcaaataaaaatcagtcctaagttctgcagtctttctagttatattaacgttaacattaaccattcttttctctccagcctccctgttttctactgagaactcttctccctaatcctactgatgacaggggcctgcagacttacattatttccctggcctgggctttatgactgaatctcaagagtccaggagcagacttcctcccatgggtaaatatgtaggtcacattaaagaatgtattctgcaattcttcacctcaagaaaatgccaacaaatcccggagaatggaatataccttgggcattatttccaagtcacgtttagggttctttcacattccatgcccagggctaactcttggtcattttcctctctgcttagtttctgcctcccctggtctgagtaagtttctgtctgaattctcttcatgcctcatcttcttcccaaaatgaaaggaggatagttactcacaattttgccattttgataccttgctgagagcactttataaatattacaaaagaaatctagaaggattccacatcccatcccagatcattagggaccagccccttcagtgtacagaagagtaaacagacaacagagagggacagtaacttgtccaaagacacacagctaattggtggcagttctggaggccagatccccaaccccctaaagcaatggtcattcattcctgtgaaagccaccgaggacagatgttctcctacttagaaacaattgttgaggacatttgtctgttgacttcctggatattctcatcagcttccaacgaattcagacttcttactgagcttatgaaaccaggaagcaccagcagtcttcggatctctttctctggaggcccaaattcccctaactgagcagctcaggctgccgtggctcacctgtccaaagtcagagagtttcctgcccaagcctgggttttccaggaccgcagtggacatgctggctccccgggagtgaggtctctggctttttagggcctcaggtacaggcaggtttgcaaacagcacgtggggctgaaggttttaacctcgcactagggaggagaagagagttacaaagggtgtctcttgcgtggtgcatctccgcacagtaacgcccctcgtgggcgttgtcctgacgcaggaggccagggcagcctgccggatgctccaggtcacctgcccaggacgggccggaggggaggggctgagggagggtgtgggggacgcaggaggcaccacttcgctgcccgccctgggtaaagggaagaagccagggagcgacgggccacccaagccccgtcgattagacaggtttaggcacttccgggactctcagaagcctgggaagcgagttctctgcaattggactaagcctgcgaccgtctggtataacaattatatgaataatccgccccccttacccccagctgaaacagtcaggattctcatttagatttttgttgttgttgttttcccttctgttaacctctaagcacactgccttgctgtgcgctgacttcagaaaactacagctagagggcacgtgaacgctgagcacagcaggtaaagagcaaatgtaagagcgatctgggtttaaatccagcctggtgttctccagctattcgcacaactgctcctgaagctcggaaaagagggtggtagagccaccttgctggaaggttttaagaataggaataaagaaatgcattaaaatttagtacagttcttccacataaacactcagtaaatggaagatattgtttaaaagcaaatccacataaatttgacaataattactgagacctgtaccgtgtgcttggtggtgttctagtctttgggaatacagcaatgaacaaaacagactctgcctccccagctatgctgccattctggtgggcagaaaataaacatataaataagtttaggtagggctaagtcttttgaagaaagtaaagtagggggatggtctatgagtgagctggtgggatttggccagtggtcttcaaatagtcaggaagatgccattaaccacacttttagagaagactgagggtgaggcattactgaccaggaggtaaaacaaagtataaaagaatgctggaaagcaggttcagaggttcagaaaggatgtgaaaactcaggggcctcaagccttgagtgcctgcttaatattttcccaagagaaagtaatgggctgtaagaaaataagccaataataaaggttgctggaagcccatccctctcctcccactgttctttgaccaagcatctgaaaataaataaacaaataaataaataaataagtaaaataaaactcaggtttaggattcaaaacaagtggtttaactcttggttctaccactgatttggtcaagcccatgcctcagtttttttttgttttttttttttgttttgtttttgtctttaaaatgagaattttaagggatatttaggattccttaagcctttatgatgtgccaggctgtctactgtctgctaagaatacagatataacaagtgcaatttctgtccaaaaggaacctttaggggcctgatgaatatttcccatagtaagttggaagctcaatgttgttaaatattgaaggcgaagatcttgatttccatcctcaggagaatctgtattctttatctgactccggcatttttcagtgtagtagacataaaacatgttgtattcctcagcctcaggattttcttacaaacataatttcatcccttgatgctacttgagggcaatgaatgtgacaactccaaaaatattacaggcatgcaataaagaaaagcaaagaatattatctacttatttgcatgcacactctgtcttagacactgtgccacgctctccacgtgcatggtttcacttcttcctcttaacaatcccatgaactatgcactcccttttaataggcaagaaactgaggcctaggaagtttaaacaaatggcccaaattcaatctatgtttcacccaacaccaaggcactgcactggctctcaaatacttttgctttcctgtttgaaatgaggacaacataatttttaggacaacaaaatgatagcttttctttcttctccccataacagctgaaaatgcaactcttttttctaatgtttaatttttgtgggaacatagtagatgtatgcattcatggagtatgtgcaatattttgatacaggcatgcaatgtgtaataatcacatcattgaaaatggggcatccatcccctcaagcatttatcttttgtgttgcaaacaagccaattatactctttcaggtatttttaaatgtataattaaattattttgactatattcgccctgttgtactatcaaatactaggtcttattcattctttctatatttttttgtacctattaaccatctccacctcccctccaggcccctactaccc

SEQ ID NO: 916616 - DNA, 4001 bp, Homo sapiens
gtcacccaggctggagtgcagtggcgtgatctcggctcactgcaacctctgcctcccaggttcaagcgattctcctgcctcagccttccgagtagctgggactacaggcgcctgccaccatgcccagctaattttttgcatttttagtagagacagggtttcaccatgttagccaggatggtctcgatctcctgacctcgtgatccgcctgcctcagcctcccaaagtgctgggattacaggagtgagccaccggtcccggccggacagcacagtatttcttacaaagtctttgggcaccatagcatattggcaatacgggtacagattttaaaaaattaagattgataactgctctgagagatattaaaatcagccagagaagacaaaatgattcaatggaagatatgcagaatcattcattaaatattctataataataaaaatagaaaacacaggtggggcaacagcaattgagattagatttggatggctacagactaagtgatgggtacaactatcaagataaatcaaaacactggatgggcaattgtgacaaaagtgggatgctggccaggtgccgtggctcacacctgtaaccccagcactttggcagctctatgcaggaggaccatttgagctcaggagtttgagacaagcctgggcaacatagtaagactaaaaaattttttaaaaattagctggtcttggttgcgcatgcctgtagtcccagctacttgagatgctaaagtgggaggattgtgtgagcccaggagattgaggctgcagtgagccatgatcacattacgccattgcactctggcctaggcgacagagcaagaccctgtctcgaaaaaaaaaaaaaaaaaaagggatgcctcctgagaaagaatatgtcatttactcctagatcctagattctccctttatccctccaaccagacccagctgtctcatcactacaactcctcggtactggctatctgcaaagcagcttccttgggttaagaccagataaagaccttcaacatctttcaaccctcacaaaggggtacagttcttaccccgtggctccccacccacagcatctcctcgtgcaagtcaaagtgggagacggaaacaggtacacccacttcagccaccacgctgtgcaattcagagtagacaccttccattatgtgcactgattcctggacgggaagagcctccaaggccactccctctgggtccagctccacattctgtagcagacttgggttcaggtgggcatccaagacagggtccagggcagaatgcatggctggggcatattctgccagtccagggtccagaccctcaaagttcatgatgacgatggcagcttacacctgtgtcacaccctcccttaccacagtccctttagatgcctgacccaaccttcagcaagacagcaccgatgggcctagaatggacatcctggcctgtaaggggaaagaggtagctgagtcaagggtaggcccaggtactggtacttagggtcttctaggttatgggggcaggagggagatgaggcaggcatgagggatgagactgccagccaaaggatgaagcaggcgggggagggatgggcagtgggggtggaggtggtagaactgttgtccctatccctcctccgctaggccctctgtactctccaccaccccattatctaacctaatccttgacttccctttcttctcacttcggactgctcacttgccttgttcagccctgaatcatcaggtgaagggagcgagaattgcgggggttggagttaggtagagggatttaaggtgctttctcccagaattgggggtgaaaacgggtggattggacggtggggagaacgagaagtcagtttcctagaatcctctccaatagctacccaggattctctagaggaaaacaataatggccagttacccacaattggggcgggggcaggggaaggtgacggaaacggctagttacccagaattctctgggggaaccagaaaaatcggttatctagaattctcccacggcagcggtgaggagggggatagggcaagggtcagatgtgttcctgggatgcttacggggaatgggtcattaccaagatttctccatggcggatattttggagcgcgtggaattagaacgagtagggggagcgcaagcgctgtcagctccgcgggaaattccagtttccccagttctcccccacgcctagggctcaacctaaccactacggcgccaaggaccggggtccgaggcgcttcttccaatcaagaagggctcggggcatattttagccaatcagaagggctccgggcgcatctaagccaatcagaaggagccaggtacggcgaccccaggagagagcgtgtgacgcacgcgccggaaaaagaggttacggggcgccggtgggacaaacgcagccagacgccggacttgttgggtggcgttagaaagtaactctgtttttagtcttcttgaacaaaattacgtctaggtttgaaaaccaaacttttatgctttctataactttaggaactctaaaataagggacacacaaggcaaagcactaggagtcgctgttgggtattcccagcggggcttagtctacctcctcttcctgcggtgccctagtgagccactccgccacctctgaccctgttgcccccaaaactcgctggcatttcctattatttccagatatgggagagaaaaaaaaggaagcgggagccggactcctgacacagtccaagtggctgcatcttctacaggcatccatctgaaactcccatccgtgattgttccctccccagagaccccggtaacattcccgggtaacaagatgcccctggttatcaaattcccctagctcttgaggctggctggacgttatccctcagagggggatgagcatggcaaattgggacttgttattctgaaggattcgtgggtcctgtgaactctaattactttgaaatgggtctaggttgtgagatgtctcagagcactttagctcagctgttattactgtttctaaaggccacataaagggactctgatgggagacattcctcatggaggattcaattctataacatttctctcaataaaggctggtaaatagaccttcattaaaggaaccaagaatttaaatttctaggactcagaggggtggggtcctatacccagtcagagatcctacctagagcctagaccaagagaaaaacacagatggtctctcaaactgatttgatctgacttcgcaggtcattagatatagaatctccgaaaaaggtggatgctgagagacatagacagttcctacactttaagaaatctccatcttgaggtctcaaattgagaaagacttaacagacccatgagagttacagatccctaataacctgggctaaataatccatgtctgccgggcgcagtggctcacgcctgtaatcccagcactttgggaggccgaggtgggcggatcacctgaggtcgggagttcgagaccaacctgaccaatatggagaaaccccgtctccactaaaaatacaaaattagccgggcctggtgacgggagcctgtaatcccagctacttgggaggctgaggcaggagaatcatttgaacctgggaggcggaggttgcagtgagccgagatggcaccattgcactccagcctggtcagtaagagcgaaactccgtctcaaaaaaaagaaaaaaaaaaagaaaagaaaaaaggatactgtgaggagacacaagagcatccatgacatagattatttagctcagctgtaattactgtttctaatacagtaatattagatggtgatctgcctgcctcggcctcccaaagttctgggattacaggtgtgagccaccgcgcccagcctttttttttttttttttttgagacaggatctcactctgttgcccatgcttaagcgcattggccctctcactcactgtagcctcaacctcctgggct

SEQ ID NO: 916617 - DNA, 4001 bp, Homo sapiens
catattggcaatacgggtacagattttaaaaaattaagattgataactgctctgagagatattaaaatcagccagagaagacaaaatgattcaatggaagatatgcagaatcattcattaaatattctataataataaaaatagaaaacacaggtggggcaacagcaattgagattagatttggatggctacagactaagtgatgggtacaactatcaagataaatcaaaacactggatgggcaattgtgacaaaagtgggatgctggccaggtgccgtggctcacacctgtaaccccagcactttggcagctctatgcaggaggaccatttgagctcaggagtttgagacaagcctgggcaacatagtaagactaaaaaattttttaaaaattagctggtcttggttgcgcatgcctgtagtcccagctacttgagatgctaaagtgggaggattgtgtgagcccaggagattgaggctgcagtgagccatgatcacattacgccattgcactctggcctaggcgacagagcaagaccctgtctcgaaaaaaaaaaaaaaaaaaagggatgcctcctgagaaagaatatgtcatttactcctagatcctagattctccctttatccctccaaccagacccagctgtctcatcactacaactcctcggtactggctatctgcaaagcagcttccttgggttaagaccagataaagaccttcaacatctttcaaccctcacaaaggggtacagttcttaccccgtggctccccacccacagcatctcctcgtgcaagtcaaagtgggagacggaaacaggtacacccacttcagccaccacgctgtgcaattcagagtagacaccttccattatgtgcactgattcctggacgggaagagcctccaaggccactccctctgggtccagctccacattctgtagcagacttgggttcaggtgggcatccaagacagggtccagggcagaatgcatggctggggcatattctgccagtccagggtccagaccctcaaagttcatgatgacgatggcagcttacacctgtgtcacaccctcccttaccacagtccctttagatgcctgacccaaccttcagcaagacagcaccgatgggcctagaatggacatcctggcctgtaaggggaaagaggtagctgagtcaagggtaggcccaggtactggtacttagggtcttctaggttatgggggcaggagggagatgaggcaggcatgagggatgagactgccagccaaaggatgaagcaggcgggggagggatgggcagtgggggtggaggtggtagaactgttgtccctatccctcctccgctaggccctctgtactctccaccaccccattatctaacctaatccttgacttccctttcttctcacttcggactgctcacttgccttgttcagccctgaatcatcaggtgaagggagcgagaattgcgggggttggagttaggtagagggatttaaggtgctttctcccagaattgggggtgaaaacgggtggattggacggtggggagaacgagaagtcagtttcctagaatcctctccaatagctacccaggattctctagaggaaaacaataatggccagttacccacaattggggcgggggcaggggaaggtgacggaaacggctagttacccagaattctctgggggaaccagaaaaatcggttatctagaattctcccacggcagcggtgaggagggggatagggcaagggtcagatgtgttcctgggatgcttacggggaatgggtcattaccaagatttctccatggcggatattttggagcgcgtggaattagaacgagtagggggagcgcaagcgctgtcagctccgcgggaaattccagtttccccagttctcccccacgcctagggctcaacctaaccactacggcgccaaggaccggggtccgaggcgcttcttccaatcaagaagggctcggggcatattttagccaatcagaagggctccgggcgcatctaagccaatcagaaggagccaggtacggcgaccccaggagagagcgtgtgacgcacgcgccggaaaaagaggttacggggcgccggtgggacaaacgcagccagacgccggacttgttgggtggcgttagaaagtaactctgtttttagtcttcttgaacaaaattacgtctaggtttgaaaaccaaacttttatgctttctataactttaggaactctaaaataagggacacacaaggcaaagcactaggagtcgctgttgggtattcccagcggggcttagtctacctcctcttcctgcggtgccctagtgagccactccgccacctctgaccctgttgcccccaaaactcgctggcatttcctattatttccagatatgggagagaaaaaaaaggaagcgggagccggactcctgacacagtccaagtggctgcatcttctacaggcatccatctgaaactcccatccgtgattgttccctccccagagaccccggtaacattcccgggtaacaagatgcccctggttatcaaattcccctagctcttgaggctggctggacgttatccctcagagggggatgagcatggcaaattgggacttgttattctgaaggattcgtgggtcctgtgaactctaattactttgaaatgggtctaggttgtgagatgtctcagagcactttagctcagctgttattactgtttctaaaggccacataaagggactctgatgggagacattcctcatggaggattcaattctataacatttctctcaataaaggctggtaaatagaccttcattaaaggaaccaagaatttaaatttctaggactcagaggggtggggtcctatacccagtcagagatcctacctagagcctagaccaagagaaaaacacagatggtctctcaaactgatttgatctgacttcgcaggtcattagatatagaatctccgaaaaaggtggatgctgagagacatagacagttcctacactttaagaaatctccatcttgaggtctcaaattgagaaagacttaacagacccatgagagttacagatccctaataacctgggctaaataatccatgtctgccgggcgcagtggctcacgcctgtaatcccagcactttgggaggccgaggtgggcggatcacctgaggtcgggagttcgagaccaacctgaccaatatggagaaaccccgtctccactaaaaatacaaaattagccgggcctggtgacgggagcctgtaatcccagctacttgggaggctgaggcaggagaatcatttgaacctgggaggcggaggttgcagtgagccgagatggcaccattgcactccagcctggtcagtaagagcgaaactccgtctcaaaaaaaagaaaaaaaaaaagaaaagaaaaaaggatactgtgaggagacacaagagcatccatgacatagattatttagctcagctgtaattactgtttctaatacagtaatattagatggtgatctgcctgcctcggcctcccaaagttctgggattacaggtgtgagccaccgcgcccagcctttttttttttttttttttgagacaggatctcactctgttgcccatgcttaagcgcattggccctctcactcactgtagcctcaacctcctgggctcaagcgatcctcccacttcagcctcccaactagctgtaactacaggcactggccaccaaacccagataattttttttttcctgtagaggtggggttttgccacgttacccaggctggtcttgaactcttaagctcaagcgatcctcctgcctcggccccccaaagttctgggattacaggcatgagccaccatacctggcgtacagtatccagtgtaatgcagtgattaaaaattcaggatccagaccgggatggtggcttgtgcctgtagtcccaggggtggaggttgcagtgaacggaaatg

SEQ ID NO: 916618 - DNA, 4001 bp, Homo sapiens
ctatgctgtacagatttctaggttaagagcaataggctattccatatagccttaggtgtgtagcaggcttatgaaagtacactctatgacgttggcacaatgaaaaaaatcacccagcaatgaacttctcagaacatatccccattgttaggaggcgcacgactgtatttagtccaacaacttgctgaaatgtgattctaccatttttccagtcaactcctaagttttaaataccatacatctgccaccttaccaggcagtttcaaccataacaacagaagaatactcttggcaaatagatcccactctctgagggttgtgttggggctcagaaaatactaccccgaagtatgacactttggcatgctgaatactttgaactaaaagagattggaaggcctcagaagcagcctcggaagcagtctctccctctgatctcctgcccttctgtctcctgcccatctttcgtcccagaagtgagtcacagaaaccagaattcttccccaaggtgagtgatagaaactaggatccctctcctacaaagcaagccataaaaactggaactattaagctttccctgccattgtctataggaactggccataaagaaattctctaatctaccttgcctgatagtaggtcgctaagaccctcattccagaagggaccttcctcctccgtaggaggaagaaatgatacacagagaggccaagaagaatctgaacaaacagaccttgctgggcttccttcctcagtttattaacattagagtatatcctttgtccagtcacatttttacacagttgtctattcttcatgggtcctacgcataaaaatagagatctccctggtctctgaagtgcctggtggtgtaaaactttgattagatttgctctgcttttaccttgttaacctatcttctgttttaaggagtggtggctgtgatccttacaatgggtggtgaggaaaggtactaaagttttcggcccctacgttgcactttaaataaataaatgtataaaagcaaagtagacaaagacacatgaagtcataatgaaaataccagagtcagccaaggaagaaggcagacttgcagttgaaatgctccagatcactttgtccaccgaacgaaaacatctaagaacatacagtccatactccaagttttaaacgactgtccaccaagaagggaaaaggagaactgatggctcctcttaggcccattcaagacaagggggtcccaattcccttgctttagactggtgggactggcaggtaaacctgaggcaaatgactgactacaggttccaaggccagttactccaattagaaagcaaaacacaaagtttcaaaaaacagtgaaggcagtcgggaggctgaggcacgacaatcgctttaacccgggagacggaggttgcggtgggccgagatcacgccactgcactccagcctggacaacagtgcgagactccgtctcaaaaacaacaacaacaacaaatggtgaagggatgaggctgaaacatcacgggaagtaaaataaataattgtaacaagaaaacaataaagcattggagaatccacccaggcacttccactgcttaaaaaggtacagactacagaagccaaaaggcccgggaactccggtcccggaactcaacacccagactgaagcgagcgcggggaagcagttccggtgaccccctcccgcccctctctcatcaaccccgccccctgggcccgccccgtcccgcccggctactcactggattcgcttcccacataacggtgacaaaatcgagcggagagagcctgtgggaaggggctagccgcggggcctgggtgttggatttttttttttcccgcgggtccccgggagcgaagggacggagatgcaacctttacgaaggccttcctcctccccctccctgtcacaagccagcgtttacagaccacccaacctcccgacttccgcccgacgttggccagtcagatctgtctccgccccactcctacaagctcgccccgcccctgcacgcttatccatacgcgcgcgggcggtcgtcctgggcggggcttgcgagtctgtgtctgacgaaggagtttaaagggtttctggtccaactgtatcacccagtgatcttaaagccacggctggctgtatttctttcctatgaaacaaatttttattgatcaccgtgtaacgaccaagagtcacacaggcctggcaatggcatttgggagaaacttcataatctttcaatatcttcatcctcaaaatggagatggtagtaatatctccctatgagtgagattattgaaagcatttagcacagtatttggcacacagagttcaataagtgacggttatttgctcacaagggaacctttacatactatccctgccctcaagattttataatctagaaaagaaagcaaaaagtagtttagaaaagttaaaaagtgcaatatgatttataggtaatatggtgaatagagagtgctatgcgagcatatttacctagagtagagtgtcaggaaagctccctcaagatgtttaaaaccatgaggatgtattcctactgatgtaaagagagctaacagagtgaaataatcttccatgcaacaaaggatctaccccataggaaatgaaaattaaacagctcattatagatccttctggacttttctatgcctctacacattgaaaaaaatgtaatcaaagaatacctatagatttagaacctgatttttttttcactttaaagattatgtggctatccttccattccattaagtttaaatctgtttcatcattttatttatttatttaggcagaacctcgctctgtcgcccaggctggagcgcagtggcgccattttggctcactgcaacctccgcctcccgagttcaagcgattcccgtgcctcaggctcctgagtagctgggattacagatgtgcgccaccacgtcccgcgaatttttgtatttttagtagagacaggttttcgccatgttggccaggccagtctcgaactcctgaccccaggtgatccacctgccttggcctcccaaagtgctgggattacaggtgtgagccatcttgcacccggccatattttaaagtagactcatggcattccataacttatgcgtatactacgtacacacaaatagacacacacatttgaaataatctactgaatagacgtttgagtggttttctatttttcactatcccaaaaaaatccttcaacaggcatttcttcacatttgtccatttacttcttggaattaattcctggaaataaaatagtttactaagagattatttttgccaaatggttgaccagttgcccccatgtcatttagtgaatattctttcctcactactttgaagtgccactgttaattacaacctaaatttgcatatacatatacataggtatacatacacgtatatatctgtttctgaacattctcctctattaattatctgcttattcctaaaatatgccacagttataatcattacatatttaatatatttgccttttcataaaggaacctctcctaattctcttctttttcaaaattttcaatatcatgggtctttccattcagaaatacttgttttctgtatctttagatgcattaacaattttttttcagatctgcatcagcatctgtaaaaaaaaaaaaaaaatcacataggtttgcataatccttgggaagtttgttcctagatattttatagtttttttgtaagtgagatatttcttattgctgtaatttaggaaagctattgacttttgtttatttaccttgtatcctaccacactatgaaaaaatgtcttgttagttctaatagcttgacagctcatctctatgaatttgtacacagacaatcattatcacctgcaaataatgcgtttctttcttcctattgcattggtcaaaacatcagaaaaatgtttaagactacaggacaagataatggatat

SEQ ID NO: 916619 - DNA, 4001 bp, Homo sapiens
gaaatacatttttaggagtaaattacttactggtattatttaaaggtagtattatgagatttgattgctatgaatgaagactcacttgggaattaggccattctgaaatgtggctccaccacttactggctgcgagatcttggccaagttacatcacctttccctgcctcagcttcctcataatgaaaatgaaaaccctatcccatagggttttatgacaagtcaacgacataaacacaagtaaagcttttagaacagtgcctggcatgtataaaagcacattagctattatcatgcattatgagtttctaagttgttttgagttaaaagtaaaagagcattgcctgggcatggtggttcacacttgtaatcccagcactttgggaagccgaggctcacctaaggttaggagttcgagaccaacctggccaacatggtgaaaccctgtctactaaaaattagctgggtgtggtggtgtgtgcctctaaccccagctacttgggaggctgagacaggagaatcgcttgaaccagggaggcggaagttgcagtgagccaagatagcactactgcactccagcctaggtgacagagtgagactctgtcttaaaaaaaaaaaaaaaaaaaaaaaaaagagcattactatggtgacagaaaaccaagagtctcattcagggatcagctaattttttctaaaggaacaaacagtaaatatttgaggcatgcacaactactcactttgaccttctagtgtgaaaatagccatggacatacataaacaaacaaatgagtatagctgtgctccaataaaactttttttatggacactgaaatttgaatttcatgtaatttttacacatcacaaaacattattcttttcattttttcccccaaccatataaacacgtaacactccttcttagctcaggagctggctgcacaaaaacaggcagcacagccagtttgccaacccctggtctagtcccagctcttcctgtagctagctggctgtgggagcctatgccataagccttacacgtggttcctaggtggaggcatcatcacacagaaatacttgccttccagtcccttgtgagaagtcaatgagacaataaatatgcaagcactctgaatggcaggctgcactatacaaaaaaacagtagccaaaggcagcagcgataacacttgtttttaaaaaattggattccaagttgctctagagcaaaaactgtgagacagaaaattgtcactgggcaggcagtgtgaaatggttgaaagaactacacttccgagtcagatatcacttccaggctccccctttatgacctgtagtccttcggtatttaaaatctctaatgagcataagtttcttcacctgcaaaaccaggaagggaattcctacctcacagaatgagacgttagtgaaacaagtacataacccacctagtgccaggcatttagtaggtgctcaatttaaaaattgcactcaacatcattatcagtgttcgagtgcaagtcccaaaggttccttgggaggctgtaactaatcaggagtaggagaaagttgaggaattggagtccgtgtacatagtgggactagaacccaggtttcctgcctaactaatggaagttaagcaggcctctacgggcctgtcttccaagctgcagacgaaccctcaggacctaccagctccatcgctagatactgtgaactccgcctacagcccccaggcccaaccaggctcgagcgtcaagtcactgcaccataatacttcggtcccacggcactttgctacgaccgaggtattacagtgcaaaacaccctcaaaagccacagcctgaatcaccacttaaaaatgcgacagggcaggtagggcagacgcgagacttacgtgattaggggtagacccgaagacgtactcttcagtgtgcggaaggatccccaacgggatgccctcccgcggccgccgcagtcgccgctgtcgccgctgaatacagttcaaacctcgcgggaggccccgggagccaatcgctgcgctcgccctccgacccggaagcagagccacagcgcgtcgcggcagcccccaaggaagaccagcctgcctctggtcggttcctggcgctctgcggtgcgtatcgagctgggagcccgagaggccgggatgcttttctgccggccgcccagccttgccactctattcccaggagttcttccttcccacttcgggccccgggaggtgggagcggggtcttgaggaactcgcctggcccggggagaggtgtcggcgctcattgcagagacttatcttgttccctcccttcttctctgccgttgtagttttacaggggcaagtcctgtccaacgtgtacggtgaggccccggccactgctttaatgagcagtaggtgtagggacggaacaatttcgtgacctcgaatctcttgcacttctatacctctctgtctccgtgtccataacacttgctggtcacccttcaaaagtctccagtccctgatgtccattcctaaagttactagtttataagcgtctcgaggtgggactcattctcagtacatactcttaaggtgcttgatatgtttgttactgagtccagctgttttcaggacaacccttgtgtcgaattttttaaaaaaccaaaaactctaaaacccataattctcatgtgggaatgctacttccagaatgcacactagtccctgacaggttaaggtcttctgcctagttttaagaatattattattttaatttttaagttccgggatacgtgtgcgggacgtgcaggtttattacaaaggtaaaacgtgtgctatggtggtttgcacacccatcacctaggtattaagctccacatgcattagctatttatcctgatgctctccctccgcccaaccccctgaacattatttttatatcacacattttggtactccttaacaacagatcctgtattttctatctgtttatattatagcccttttcacgttgagtcataactatccctaaactgtggtctccttcaagccaggaggctgtttttttcttcattagcgctggttctccacacacaatgaagtcttccaaatcctggccctgcttatgagcttggcaagttagttaacctactgaagcctcagtttctccatctacaaaatggagaccagaggtagtacctgcctttagatttgtacagataccagatgtgatcatgtcagtaaaatgcttaatatggtacctacaaatagtggttcataaaagttattaatttttattaacatttgctgttaaaatgattccatcttcagatgaaatactatttgttttagataatctaaacagaactttgcagtgttattgtctgctagaatcacagatatgggaaagagctgtggagcaaatgtggaaccattaataactagatttaatatttttcctgcagtttctgtcccttgataagtactttaaatgtttcttttgagctttctgtctcattgtaacaccacaaccttattttgatgcatttgctgaatgactaacatattgaccattgtaattgtacctgtgctctaatccacagtttcgtgaccttgtccagtagaaggctatttaattttcacaactgcttgaattttgacatacaagatgaagcaagatgcctcaagaaatgctgcctacactgtggattgtgaagattatgtgcatgtggtagaatttaatccctttgagaatggggattcaggaaacctaattgcatatggtggcaataattatgtggtcattggcacgtgtacgtttcaggttagtctacaaaactgcaccgaatgacagtgaacatatttcactactaagagaacttacacaaaccaaatctaaactttgaaagtatattgagtttgaatgttaaaaaaaaaaaagataagatccatagagaaagatgttcccagttatatgtgcctgagatttatgtaaacattatatagata

SEQ ID NO: 916620 - DNA, 4001 bp, Homo sapiens
caaacaacccaaaacaaacaaaaaccctaccacatgtttttcagacacagtactcaaaaagagatcgtcttagcgaacagaattgtgggttactaaatcatccctattgtcctaagtatcactcagaaaaacactgtgtgtttaggagcacaacttataaacagctgatttatatataaaatagtgcacgtattcatttggatatactcatcttgagctcactgtaagataaagctgtcttggatattgctaaggcaacattttctttacagatgttattaaacattggtaagaaaggagaaataaactggtaacttcacatgggcacgtgagaccctagagaatgtcgtcaccattaatcaatttttctaactgatcaagcataaacagccaagtccaggtggccaagtcagccaagtccaggtgggcaagtcctggagccataagttgtctttctaccacggtaaaaaaggatcctggatctgagacctggccaggaagcctgaaaagcacgtgtcctactctgagtttggggaacttcccaggaagcatttgttcagagtaaaactccatcaccccctgcctgcctaactcggtgaagggacaagtacgagccaggggaggtaaactctgcgccccgggtagctcccaggaggaagacaccgggaggcagctgcccgccccggcccggtccggctgcggcccccgcccggctcacctctgcggcagggatgttgaccacgccggtggagcgccgcttctcccgcagcttcctcttctcgatctgccccttgcctttcctggcactggggcccgagctcttgcccttctctgggacgccgtccggctcctcctcgtcacgctggggcggcggtgcagccgaggcagaggcggctgggggctcgtcctccgaccgccgcgggccgggggccgcccgcgtcagcatggcggagccgaccgcgcagttcacgcccccgggaccggggacggcaggtgcggccggcgcgccgcccgggaggttgttgttgagctcgttggcagcggcggccgccggggtgcccagagcccccgcggggggcttcccagcggcgtcgctgctgccccctcccgggggggccgggcccggggggttctgcttggcgcgcatcttctcgcgtttcgccttccactcctccaggaagtctgtggtgctgccgccgaggccgctgctggtccggtagccaccggtcgccatattcccaaaggggccggtcgggctctcacctcaggccgcccaccagggctccggccgctgcctcctcttccttcctgcggccccgaggatgccaggagacgacctccaggagagggacggccgccgctcccacagcagccggcggggctgaggtgaaagacaaaagggggcgggtaagggaagcgtaagatccccgcccgacccaagggtctgcccccgggctgcgccccttggagtcctcgagcgcgcccaccagtcactaccggccagcagccgccgggtccccaccctgcaaagtttctcccacgcacctacagtacggaccccgacgatcgccgcccctagaagggaggagagaggactgaccccacccccaagtcggcccgcccgccccatccccaccaaggtccgcgccggcggcggtcgagatactagggctagacccgccacctgtcggctcgtcgtatcgcctgctccgcgctctagccaccgccggtccgaggtccccgtcagctacaaccccactcccaaggcgaggcgcggagctcctagccggttcgcagaggaggcggggacccagctgtcccgccgagcgtggaaaggaccgggtgtgagcgagcgccttaccttggaggagcttgtaggggacgaggcgtagggctgggatccggctcccaggtgtgccgaagctggcgcgcgctcttccgccgcgcggaaagtgccgcggcaaactcgcggtgcggagctccaggcaatcccaggacaggagggagggagaagaaggagggagggagggagggagggagccaggggcgggaagggagccgagcggcgccgaagcacgagcggaaaaggccgaggcggcgcgcgaggggcgcggcgcgcggtgggaagggtcgtggccgctgacgccccgcccccggcgctcaggtgcgcggcgtcgcgtccggcccgccgctgcagcctgccctgcgccagccgtcctctgccccgctcccgccgcagaccacagcgcgcccgccgcgctccgcccgcggcctgcgagttagacggcacattcctgggctagcagcttcgcggcgtccggcctcccggcgcctccgactccggggcgggaacggcactccacgcccttcttgcttgtcttctccgcctctctcttctcccaccactcttccttttaagtacaagaccgtattatttgagagaaagtctcgaacgctgctggctaaggggaaaagtgcgataacttgtgatgattcagggaatgactagacaggatgggaaaatacccacgtgtctcttttcctagtcgctgctcccttttcagatgtactagggcagcgggcaggagaatagaaagacctgagacaaacccagcaccctccttctaagaaaactgcggtgccctggtgaaaagggttggctaagaggaaggacttactagtatcttagggttgcgggagaaaaaactcagttcgacagtttattgtattggcgattccagtcttggagttttccccttaaccctgtctctgcctctcctctttacagagaatgaatttagcagcaaagctccctaccaaagtactaacgctgcactgatgctaatttgagatgagctggggcagtgattgtctctattttttcattattaacatgccagaggcttatcctctgatgcaagtcatctgaaatttctggatcagagcggggtgggctgtcactgacgcacctaagactgacctttctatatccaagtaatgtcagggcacatcattgtgggaggctacaaatgccaggtctccattttgtaaaaaagtaggagagccctaagtcacgctcttacctaacataaacctttcttcctacttaatattcctgttttgcccaggtagcacatgatgagtgagcaatcagtgtttgcctgccacagaactgggaacagaagaaagtgattcacatgctctatatttctcagggaaagacagttttggtctttggtctggctgttgtgggaaacgtatggcgagagctctggaaaaatccttagaaaattaaaagcttttgttgggaataggtctaaaaggctgagcggctgtttacctaagctagtaccaaccccagtgtgccacctgaagtttctcaattacatattcattagtttgttttctgagttttaaggagagtaagggaggctgggacattaaacgtattcacattcatatgctttgtaacttatcagaggacttttctcctggaagggctgcaggatatagtggaaagagggtatagtcagctagctgagagatcttgggcatgtttacattatctggtactcagctttctgtactataaaatcagcaaaaattacattttttttttttttgaggcggagtctcgctctgtcgccaggctggagtgcagtggcgggatctcagctcactgcaacctccgcctcctgagttcaagcaattctcctgctctcagcctcccaattacattatatttaagctgtcttaagaactgacactgcacataaaatgtgcttgattcgaggaaggcactcagtaaacatagtcccttctaggggcttaaagtccttggtctctaagaagtgtatgggagaagaggaaattataacagatggggtattgaatatacaatatcagcctaaaaacgatagactttgaatgaactaggataacaccccacataaatttatcactgcatggcttagaccagttctcttagtgttaataggttc

SEQ ID NO: 916621 - DNA, 4001 bp, Homo sapiens
aaatgactcgatacattaagtacacttgagtctttttctcctattcctccttccaacccaacttgttactcagatttgagatgttttccttgcttttgtgtttaccatccagtttttatttcaagtctattaaatcttaaatttccttccaaagaaaacaatcaaaataaaactggcattgctaaaattttttgtttttaagaacagcagcaaatgcacctttcctatacaagatggcccttttcccacctatgaaacaattcctaacattgttcctaacatttctgctttagagtaactagttatgtgtagaaagaaaatttgtttttttggatatgcctttgccttcaatacctcctttagcacctaatcgtaacagctttagaaaggacctctcccaagttgtagaatgtccccaatgacattttaagtatccatccttttaaaactcaacatgtcatctctctcctcccacagctagatttcctccttcacaaaaccagccactgtgttaactttcctctaacacaaagcccataccctaaatatcttaggtgcttaagtgtctgtcacaccattctgtatatggcaaactgtcctctggctactccaagaatgtaagtgattatataagtgcatccccaaagcacatcatttccccattttcagaatacaattaattgctggcaaaatcccagaattcaacacttttcactcatggaaaaatagtgcttggtgggggaagaagcgttaggtctgtaagaatgactttctttttttaataagatgtggtaaagacctggtagtttaattccttaccctcttgcagatgtaataggaagccctttacaaatatcacaataacgcaacttcgaaaaggcaaaaaaaaaaaaaacaaaacaggaaacctatttgaagccatttcttgaggtaaagtacaaagatgcatttctaactccaaaccaagtaatccaagaaatttgtcgaatttccctcctgactaggtcaagataaaggtaccccattccagcaatccagctgctaacactgctgtccaataccccttccataaatagctcggtctgggattacatcggcaggcattttgtaatttaaaaattcgttaccccgagaaacgtcctgattaactcggcaactgggagcccgtctaccctttctttaactccgcagccccctctcccctcggttatccaagcattttccacttaagaaaaaaagcccccccttccctcgactagaaagaggggggaaaaaataaacggttcggtcgggggggggcgctgcgatacagggggaggggccggactaatagcgcctccccgtgtggctgcgccagcgcctgacccccgcggggagccgcgctcacccgcccggccagcaagccggccatcgcctcccccaaccccccacaaccaacaaatccaccgccgccccccctaccgcgcgcgcgccctccctgactcctgcgcagccgccaccgggaaaaggcggggggaggggggaataggccttgcgcgaggcctactaggccgcgccagagccagggcctcgcgtgaatgaccggcctggcacagtgaggtggtaggcgctcacgcgggactacgcgagaccgcggctcgtgactaggacccgagccggctaagaagaagacaaaagtggaaattgtagccatagccgggggcgcaagggaaatttttaggcttacctgcaggcgcgaggcgactgaggggaaaaggggagcgggcgggaaggggaagggcgggaggccgggggcggaacaataggggcgggcgggaaggcgaggggggccccgcgggcgggcggaggaggaagggggggtggaggaggaggaggaggaagggggaaagagaccccggggcgggtggagggcggcggagggcgggcgggcgggcggagggcgggcgggcgggagagggcgcaggctgcggctgctccggctgctgcctctgctggtctgggagggggacggggcggagcggcctgctttcaaccccgcgcacccttcgaccccggaagcgctaaccaccccgggggccggcgaggcgattgcgtcgtccaagccttccccacgcaatgcagacggcctcccaaaagcctagagcggctcctttgacagcgtaggcaccagcgagacaacggctgctagcaagcgacgaattgcgatagagagggagcgtgggggcagaaaggaaaccagtggcccctagtggactggctggaaagttcagatgttagtgcggagagggagcagtcgccatgcatcaagaagtggagaggaggaaaaagggatgggtggaaagagaaaggatgaagatagtaatctacagggatactcaaaaaagaaaaggaaaaaaactaacttgccacgttagaggtgaccattgtataaactccttactcttaaaaggaaagaattaagcatttaactttccttttaggaagaactgtatatagttcatctgtaattgataagggaaagctcttttttaaagagttccatgtaataaatctagaaggaatgaaagaaataaaaggaatgagagttgaaaagtcaccattttgcaacccagaatgaaataattgattcaggcaagtgtatcaatcattaaaattttgagaaaggttgttagggaacgggatactatcatgacaccaaatatcaaatatcaccacacagatttgcaaatatatatatatatatatatatatatatatatatatatatatatgtaattttttttttaagtaacttcaaatgggccaggggtagtggctcacgtctataattccaacactttgggaggctgaggcaggcagatcgcttgagctcaggagtttaagataccatctctactaaaaatacaaatattagctggcgtggtggcacatgcctgtggtcctagctatttaggaggctgaggtggatggatcacttaagccctagtggtccaggctacagtgagccatgatgacggccactgcactgtagcctgtctcaaaaataacaaatttttttttgagacggagttttgctcttgttgcccaggctggagtccaatggcataatctcggcccaccacaacctcagcctcctgggttcaagcgattctcctgcctcagcctcccgagtagcaaaaataacaaattttttaaaagcaacttcaaatggagagatctagcagttaccaccttacccaagtacataaatgatcaaactgcatcactcatagtaggacaactttgcaccgtgtggtccttggaaaaatgcaacaagtacaccacatcatctattaaatattcttgccaaaagtgcttaatcttaatctaatcaagtcattagatctgatttgcaatttataggaaatttaatacaacacaaggagatattttgcaaacccacaacattccacaagacagctagctggtcttgtcaaaaaagcaatggaaaaaaaaaaaagaaaaaaattggccaggtgcagtggctcacacctgtaatcccagtaatttgggaggccgaggcggacggattacttgaggtcaggagctcaagaccagcctgaccaacatggagaaaccccacctctactaaaaatgcaaaattagccaggcgtggtggcgcatgcctgtaatcccagctactcgggaggctgaggcagaaaaatcacttgagcccaggaggcggagtttacggtaagccaagactgcgccactgcactccagcgtgggcaacaagaacaaaacaccgtctcaaaaaaaaaaaaaaaaaattagttgaacatggtagtatgcatctgtagtcccagctactcaagaggctaaggcgagaggatcacttgagccgaggaattcaaggctgcagtgagttatgatggcaccactgcactccagcctgggtgacagagcaagacccatctcttagttagtaaataaaacaaaagcaggaatttaaaaatgcttaa

SEQ ID NO: 916622 - DNA, 4001 bp, Homo sapiens
ctcaacttctgcctctcccctttaagtacacagtaagaaatgcttgcatgaagcattttaggctgtgttcttatgataaaattcaactttcatgaaataaattaatctgaatcaagttgtcctcatctgaaaatgcctagatttattagtgctagcccggctttattccacaaacaattctatttaaattaggtgttggtctaacaaatctgcctgaccacagcaatgactcacggaccatgtaggaaacaactttcactaaattcaagattgctcaagtgaaaaggtgcgcgggggaggggaggaagagttggttgtcctcatcatttttatttttaagtaatattacaagttatctatcctgccccaactgtttcctcaatttggttgcttttcattccactgtggttggcatcttttgtcaaggcagtaatttatttcttttaatccggatataatggccaaatgggcgatctgactcactcaaatcccatcgttaaaacttatcttggaattaaacaaaaatggatttttaatcgtagagctcatcagcctcatagtctccacctcatttctgaatggccttgttcggcttgcaccttctgtgcttgctgaaccaaagcgcgctggtcggccgcggcatctccggaagggatgaagagcctccgcgcacacgccccttacttccctgtcccgcacgcgccacgagcacgcttgcaaaagacggggaggtggcggggacagagacagaggaaatgagagagagagaacgaaagagaaaggagagagagggagagagagagggagagagaagaggggaaggagaagagagaaaaaagaaaaaaaggtctgctctgggattattattattatttgggttaatactcttatctttgcattccagccggaaggtcggctccaagccttctttcctgccctcctccttcttgaattggacaccatccctgttgccgcctcctgagtcaggaaagggatagaactttcccagggaggtgaggggtgtccccgtggcgatttcccggttacttcctcccagcagatatccctgtggagaggaaacgttcccgacttccctccccgcgacctcctccctagaaacgagcggagacgtcaggctgcttctgggtttattttgtaaacccagacagtcaactgcacttggcgcaggcaaagcctccttggcccttgccccaaagcaaagctctaagaggtccggggattccttggcctgggtggggagagagacgtgacctgtgcggccgccgcgaagtgggtctccaagggtgagacccctccctcggtggctgggcgtgtcccctttagccttcctggaccccattaccgcccggcttggagctggacgaagggacgtaattggtaggcgagtgggttgggcatcttgactcaaggaccagagtctgggcctctggtgtggacccctgccccctccccgctctgcgcggccgttctagaggtccgggtgggagctggaggaggaaagcgggaggaggcggcgaggccgcggggcggtatgagggggcgccggccgcctctcggattggctgcgccgccgccccctccgcatcgcgcgccccccaccacgcgcccagcctgctccctcccgcaggctccgagctgctgcccgcaggaggcaggacgcgcaggggtgggaccggcgccccagcccgtctcccggccccgggcgcgcgggaaccccgggtcctgcagcctcccgagtgcggagaggcggggccgcccgctgccgcccggctgcctgcgccccctcccgcggccccggctctgggagcggggcgccccgcgcgcgggcacacggcggccagagcgccgaggcggtaccttcagcctgcaatgagaggaacccgggagagcccccgggagccagcgaagagcttggctgctgcgtccagggctgctgctgccgccgcggctgcttgaaactcctcaaagttgagagccggctagagggtgccgcccgccgggagccggagggaaaggaagtcggaaggtgcaagagtgacagacacggacagacggacgcgcagaccttcggaaggcactgcgtaggcagcctccccggagcccacgaggctccccagcaccgtgagttttttcctggatgggtggttgctaagtatttccgtttaattgtttgtagcgtacgtttgcgtatagttgtgtctgttggagggagtttaaaacaacaacaacaacaacaacaacgcaggatgcaccttaggaaaaaattgagtttctgatggtgggtgagacggtgggttgtatggagagaatgtgactgtacatttttataagcaggactaacccaggaaagaggaaaaaatacatttaacagtgaagaggcaacacagagctccctattgtgaaataaaacccatttcaaaagttattggaaagaaagtaaggtatggctcttatgggttaactagtggtagtcagtttctgctttttactccctctgaattattaattgtttgccaggttcactggtgggaggctgagccggtggaaaagacaccgggaagagactcagaggcgaccataatgtcgttacgtgtacacactctgcccaccctgcttggagccgtcgtcagaccgggctgcagggagctgctgtgtttgctgatgatcacagtgactgtgggccctggtgcctctggggtgtgccccaccgcttgcatctgtgccactgacatcgtcagctgcaccaacaaaaacctgtccaaggtgcctgggaaccttttcagactgattaagagactggacctgagttataacagaattgggcttctggattctgagtggattccagtatcgtttgcaaagctgaacaccctaattcttcgtcataacaacatcaccagcatttccacgggcagtttttccacaactccaaatttgaagtgtcttgacttatcgtccaataagctgaagacggtgaaaaatgctgtattccaagagttgaaggttctggaagtgcttctgctttacaacaatcacatatcctatctcgatccttcagcgtttggagggctctcccagttgcagaaactctacttaagtggaaattttctcacacagtttccgatggatttgtatgttggaaggttcaagctggcagaactgatgtttttagatgtttcttataaccgaattccttccatgccaatgcaccacataaatttagtgccaggaaaacagctgagaggcatctaccttcatggaaacccatttgtctgtgactgttccctgtactccttgctggtcttttggtatcgtaggcactttagctcagtgatggattttaagaacgattacacctgtcgcctgtggtctgactccaggcactcgcgtcaggtacttctgctccaggatagctttatgaattgctctgacagcatcatcaatggttcctttcgtgcgcttggctttattcatgaggctcaggtcggggaaagactgatggtccactgtgacagcaagacaggtaatgcaaatacggatttcatctgggtgggtccagataacagactgctagagccggataaagagatggaaaacttttacgtgtttcacaatggaagtctggttatagaaagccctcgttttgaggatgctggagtgtattcttgtatcgcaatgaataagcaacgcctgttaaatgaaactgtggacgtcacaataaatgtgagcaatttcactgtaagcagatcccatgctcatgaggcatttaacacagcttttaccactcttgctgcttgcgtggccagtatcgttttggtacttttgtacctctatctgactccatgcccctgcaagtgtaaaaccaagagacagaaaaatatgctacaccaaagcaatgcccattcatcgattctcagtcctggccccgctagtgatgcctccgctgatgaacggaaggcaggtgcaggtaaaagagtggt

SEQ ID NO: 916623 - DNA, 4001 bp, Homo sapiens
gcttcatagagcccagcaaattggattggccagaggcagccaaggaggaggactgagaagtacatttggattccaagccttgttgcccactatgcctcagttctccctaacgcctctccaagtagctagtgtataaatcagacccatctgccataaaaaggtgtcatcttatcaccataggtgaagtatttaaagaacaatacaacataagcatctatccatcccctacccccatctctccctctcccagaacccagaaatagaaagcttcggtgctcactatggagaacattgaggaggaactgggttcagggctatgtttactgtgtttcctctctaaacatccatagtctcctatctgtttcctctttcctggggccatggattcatctcggagagagggacatcttctcttgttccctgattaagaatcaacagactgcggagatttcccaatggcagcagctgactgggagataaacatggtgcatggcttgtctttgacccaatcctcttttttttctaaggagcaggggaaaagttcctttcctcccctgggactggagtatcagatacctgagttcttccttcccccatttattcctccccacatgccctggtactgcaacaataggaaaagatgcccaaatgtgcttggagatcctggaagaccctatataaacaaaaagcctctgattaagccagttaccttgcctttgtcaatcaatatttcttcaccatcatcacctccttcagcttccaggtgggggctccaaccccccctccagattccacgtgggtcccctcatcattaatacatagagtgagtttccaggccccaagagatgagcagctcaggcatggggtaacccccaccccacttcctgtgcatgaggcagaaactaccaatcccaactgagatacatatgacccacaggttggcacaagtattcccatgcagtagatctacagctgtgtgcaatcactccacatacctctgtgacccacgctcactcatgcacacacatgtcatgtggctcacatctgcacaactctgcacatggatatgtgtgagtcagcctggcacctctactgccctcctgcagccctgccacactgcatatactgtgctgcctctaggcgctgcgtgtgtcagcctggggtccacaggcacaggcacatcgttacctttgcaactcctaagcccgctccaactggccagcttgctccgcacatgccttgcacatgtggcctggccacgcgtgtcagggccgtgcttcctcgcacctgccaacatctgtgccaaagagaatctaccagcccacagccctgctccagttatcccccctcctcctcccgctcaggctccctaaggtcccttccccccattcccgggccggggacttacagagaccgaagcttaatccacatcttcttgctgggggctgacttcagctccaggggtgacgggcaatccgactcctccagcatctccggaggactgcggggggacagctccatgctcagccacggtctacggaacagaaggaggagacagcacctcggctcagcttcagccccagccgagagaccctcaccccccatcccaggcccttcccacctgcggctggcgtggaccagccaggccggtgtctctaggctcggcccaagctggcagagctgcagctcctgcggctcctcctctcccgctgcccagccgagctttgggctcccagtccaagctctccgcaccgccgctgctgctgccgctaccgccgccgccgccgcgcgctgccagagccgcctcctcgcctctctcctcctcccccggccgggttcccccctccctctgctctccctcccttctcctcagcctgcccgccagtctctcactcctcacagccactcctccccctcccaaaggaacgattggaagccgggggcacacacagacagaagcgcccaagggcgagcgcacgcacacaggcgccggggacgagtggctgcgtgtgccctgtactggcggatgtgagtgcgtgtttacagagtgcagcggaggcggcgggctggacttcggtgtgggtggttgtgtgggttctctccgtgtgttttgagtttctgtgtatgtggttgtggttccatgtatccacgtgtgcctagctgcctgcgtgtcccatgtctgagtgcggggtaggggatgagcacacatctttccctgctagatctggactcggaacccagtcggaccagaccccacctgtgctcctgtcttggaaaagttcagggtgtgccctgagctgtgatggcatcccacacttggcctcgggtccctcagcttgatcttccccacctgtctccaagactgtggccttctccatggtacttctgcctgcccgcctagcagataggaatttcttccaagttcaaagctctccagagcaggcatctttttttttttttttttttttttttttttttttgagaaggagtctgtgtcgcccaggctgcagtgcagtggcgcgatctcggctcactgcaacctctgcctccccagttccagcgattctcctgcctcagcctcctggagtagctgggactacaggcgcgggccaccacgccggctaatttttgtattttttagtagagatggggtttcactatattggccaggctggtctccaactcctgacctcgtgatccgcccacgtcggcctcccaaagtggtgggattacaggtgtgagccaccgcacccagcttaacatcttcttctttgactaggtaataactctacacagccaggaaagcattcctgatatcaaaacccctcctgaagcacttccagctcattttttctgttctgtcttcagagaaagaaatctaggagctaaaggcccagcacaaaacagcctagctggttaataaacatttgtggaaggagtgaactggaatttgaactcaagaccttgtaaaagggcaaagcctcctccatccaaccgagtcctacctaggactcttgcaggaaccacctctcttgctccatattgttctctcccttaatgaccacctgctttggcattggggaaactcctatgtcaacagaaagtggagatatattcactaactactgaatccaaaacaggccactaatccaggatcccagaatgtgaattttaatttcaaaaaattctggaggttggaaggaggagtgatcaggagaaggtatttactctgttctaaatactgagtggaggctcctcctctcccagtcagagaaggagaaaagaagtgaaatggaagggcgaagaagcggatgaactgtcacagctaagactcctaacataaaagaattgccaagttaggtcagcatttagattcagcagaagtatcagcagaaccagctcccagaaagtacagaggcagaaagagatggcagagtcagagatggagaaaaaagtggaaataataagggacttcccaccctctgtccatctacctttagcacacatcccttggcttttccccagacccagccaagaaatggctgcatctgagaccctagtcacactcctacacagtccatttctgaaaatttgggagcaatctcctccttatcaactgaaaatgaaatgggctggaaactacaaaagaattgcaaattaggatggtgctaaagagctctaattagtaaattaggattagagctaaggagtttccaaatttaggcaggtctttaaactagaataggtgggaaagaggcaagacatacatccagagggctctctcaacatttcttgttaacacagtgtcacatcctgctctcccaagaccccctgctcctgattcattttaaggctaattcacacacacacacacacacacacacacacacgcacacacacacaaagttattcgtgaaagagacattagagttcatccactctaattcccttcatttaataaatgggaaaacttcatagacaacacagtttgatggaaaaag

SEQ ID NO: 916624 - DNA, 4001 bp, Homo sapiens
ttcacaaactccttatcagggaggttaagtgacttgtctaaggtcacacaactcatccatctcagtcaggttgtcaaggcctacaactcaagctaatggaacctaaccgtgtccccaaacaatgaagctgttaaggcagaacaaacctaatcatgcagttagcttagagagaggctggaacccattccaccatagcttctgcagtctcagccggtccaaccttaattaattctgtcggttggcccataggagactgtgagtgtcttgatgacgctgacagtggcttgtttatcttggcctccatcctcagagcacacagaacatgctcagtaaaagttcattaaataaataaaacggaaaggggaaaattaatcaggtgtgaggctatctcccagagctcacaatggagatttctgagccagggtttctaaaaataacagtgagcctgagaagagtaaggttgtaggttgacttcaagcacaggtttccctccgagtttctccttctgtcacttacagatcttgtccaggagctcttgtatagcttctgttgaaatctgaaccaaacacaatccagacaccagaaggaggcagggagggaggggaaaaaagattaaagaataaatttgacaaatgggaagtctaagaagaggacctggactcaagcagctgaaagcaccctcttgaaggtgctgaactgcaacctcctgaagtcaaataacccactccacacacacaccccatactttctggcctgccagggccctctcttattctaaagtcctttagagttaggatctccccagaccactcaaagtcctcacctcactgttcttctgcaggaagtccttctatcccaccaacatcagttttaatccaaaccctctgtttcagccatcaaggaatctggcacagtaaaggtacctttccctgtagaacaggatgctcaaccccgtccagtccacatctggccccaaggaaaactggcagcttcccccaactttccttcgaactccatccctgcccgtttcaccaccaccacttctttctgctttaccttcagtccctgcacgattggaaaagcctcagatcccaacttctggaagtccacagtctctcctagctctaggcagccattgggaggaaaagactctggcagttataaccccaacacctcagaagagctcagcttctccagcttctacagttcatttctttggctcaccatggctggtgttctggggatttccaaagtcccctgcctccgcttccagcacccacattcccaaaaagatcaccataagtagggggcttaggacagggaagccagagaaggacttcctgcagaagaacagtgatgtgaagattttgagtgcgtctggggagattctaactctgaaggactttagaataagataggggatgggagtcaagagaagaattctatttccagtttgggttcttaagacaagatgaaatttcgaaggaatgtgaggtcctaaggatgttggcagtcaggaaggagagaaaaggaagaaacaatgataagtcacctaccatagtcaagaagaagcaatttttacaaaggtggggggggatggaaatgggaggagaataaggtaaagggcaagatggacagagtaaaaggtgaagttggcacgcgcacacacacacacacacacacgcacaaaacatatgggggactgccaggtcttgatctctccacttcactaaactacaactggtggatccatgagcaacctgtcctttccctcctcccccttcctcttctcatccctggcacctacctgagaatggggccctggaggtggctcctctgaacaggaacagggtttgccatgggaatcaaagtttcctgcttcagagtatcaaaatcctgaccccaggagccccagggcccccaagaggggacaacttcctctttggcccctgccttcctcctccaggtcccagtagaactgagcaactgaccagagagaactttggggaggggcctggctgcaggaagaagagagtggggaggcagagacccagcctaccggaactgggtgagaggggaggctgcgggaaaagtttcacatctgaatcagacggaaaacaagaatctgttctcagaagaagcccagaaaggacagaaatagcacaggccagccccttgctctgaggaggtggggctcctcttttgggaaaaagggggttagcaagaggcttaagagtgcagggacagggaaccatcctgaatctgtcacagagaggaggtctgtagcgggaggggaaggggccctgcaagaacccccaaaaggagctaagcagattcagctccctttcagggtctttttctggggccattcttcaaaacgagctttaacccacctcacagaatggaagcaagacagggggatgaacttcccacagaggataaaaaactgtagggaggggcttcctgaagctaggtgtcaggggatccttatccagagaccgggctcaacagggagggaagggccctccacccgcaagcagagaaggaaagtcaagagaactcgctcatagaaaccaagggattgggcaaattaacacccccagccccagttttctcatttgtaaaatggaaattggggaataaccatgaattaaccagagagaggtcaatcggctcagaggtaaggagaagcgatgagatggcccaggaggggccaaaagaggcacccagaaggggtctgaggaccaggaacccctctcccgccttcagactttgctttcgccaaggttggggagggaagaacccagcctctgcagctccaagtggacgtgcgcacacagtcccagcccgcctcctgattggctgggagatgtcgccaccaatacatgtacgctggggccgtgattggccagctgaggagttgggcggggctaaggagaagagctggcgggtgaagcccaacgcattggggaaaagagttcagggatctgcaatctcttagatgtaggtctatggctgcgggtgatgtggtaaagaggaaaaggaactaatggggttgagtatgtcagcagaaagggaaaagagaagacacaggccaagagctaggattttataacaggaagttttccctttaccccaacccgtcaaaagcaggaagaaatgaaaataccttgtcattatgccaaagccttgaagaatcagaaataaatgaagtttgggaacctgctgtttctcagttccactgagtactgggacaagtggaagtgggcttcgatctcaacaagaggagtggaagtcaaatatcttaaggctgttctctagtgaacacctggtagccgtgaagcagggctgctgcagatcttgggagggaagaaacccactctctctgtatccatctctttctgtgtcccaccaccaccctccccacaatgaccacaagctgatgagtgtttttagagagaaaggactagacccagtgtcagagaccctgaatgccacccaggagatgaggacaggtcatttggcatgttctgtggacatgcttgcgttgcaggatggggctgagagtgggggcagatggcagcacacagcctgaaacactaataacctccaacccaggccaacttccctgcctcgtcttgtaccctcactccagaccctgccactctagccaagtaagtgctaacctcaactctcctaatgaaaagtaaagatttcttagactagaaaagcctcgaagaggatatcttgtccattcctctcctctcttacccattagaaccaaagctggttggacgaatggctgctcaccacttcagcccaggtatgcatgctgcatactttgccctagcctgttattattatttactcttcctaataaggagggataatgatcaaccatcatcccttcctgaggaaaaatttcacacatagacacttacacacacatatacacacaccccacactctacctctaaggagactgtcacctggctggcagg

SEQ ID NO: 916625 - DNA, 4001 bp, Homo sapiens
ctctgctttaaggacgtaagactgggaatctattcctgccaattaataatccggagattgtacttttttgggtaagttatattacatgtagctagctttattttttacttgtaaatttattgtacaaagctagcattcttaaggaccagactgctgaagtgagtgaagaccagaatgatctaatcaataagaatagggatccttgtccaccctaatctcatgtaaggacatctcagctaaggcactctggagagacagatgcctctactcccttctcttcccaggtttcatgcctccttctgggaatcctcttctctcaccactgagcacttctcacactaaaggaagaaacaacaattcattttcaggaaaggcttttggttagaaatgtgtgggagatagtgaaactagtaatacccactctttcgcagggccctgttacctggaatacaggcaaggtaagtatgatgagccactagtgttaggggagccatcctgaattctcccatttatggacctggggcccttctttacctttcaactacttccttatctgcccctttccccagctcatttaccattaacgcagcgtcattttctatcaagaatcacacagtgctcctcccaacaaaaatcagttcaatctggttttccatttcttcatcccagaactcattccaaggctgtgcttcatagagcccagcaaattggattggccagaggcagccaaggaggaggactgagaagtacatttggattccaagccttgttgcccactatgcctcagttctccctaacgcctctccaagtagctagtgtataaatcagacccatctgccataaaaaggtgtcatcttatcaccataggtgaagtatttaaagaacaatacaacataagcatctatccatcccctacccccatctctccctctcccagaacccagaaatagaaagcttcggtgctcactatggagaacattgaggaggaactgggttcagggctatgtttactgtgtttcctctctaaacatccatagtctcctatctgtttcctctttcctggggccatggattcatctcggagagagggacatcttctcttgttccctgattaagaatcaacagactgcggagatttcccaatggcagcagctgactgggagataaacatggtgcatggcttgtctttgacccaatcctcttttttttctaaggagcaggggaaaagttcctttcctcccctgggactggagtatcagatacctgagttcttccttcccccatttattcctccccacatgccctggtactgcaacaataggaaaagatgcccaaatgtgcttggagatcctggaagaccctatataaacaaaaagcctctgattaagccagttaccttgcctttgtcaatcaatatttcttcaccatcatcacctccttcagcttccaggtgggggctccaaccccccctccagattccacgtgggtcccctcatcattaatacatagagtgagtttccaggccccaagagatgagcagctcaggcatggggtaacccccaccccacttcctgtgcatgaggcagaaactaccaatcccaactgagatacatatgacccacaggttggcacaagtattcccatgcagtagatctacagctgtgtgcaatcactccacatacctctgtgacccacgctcactcatgcacacacatgtcatgtggctcacatctgcacaactctgcacatggatatgtgtgagtcagcctggcacctctactgccctcctgcagccctgccacactgcatatactgtgctgcctctaggcgctgcgtgtgtcagcctggggtccacaggcacaggcacatcgttacctttgcaactcctaagcccgctccaactggccagcttgctccgcacatgccttgcacatgtggcctggccacgcgtgtcagggccgtgcttcctcgcacctgccaacatctgtgccaaagagaatctaccagcccacagccctgctccagttatcccccctcctcctcccgctcaggctccctaaggtcccttccccccattcccgggccggggacttacagagaccgaagcttaatccacatcttcttgctgggggctgacttcagctccaggggtgacgggcaatccgactcctccagcatctccggaggactgcggggggacagctccatgctcagccacggtctacggaacagaaggaggagacagcacctcggctcagcttcagccccagccgagagaccctcaccccccatcccaggcccttcccacctgcggctggcgtggaccagccaggccggtgtctctaggctcggcccaagctggcagagctgcagctcctgcggctcctcctctcccgctgcccagccgagctttgggctcccagtccaagctctccgcaccgccgctgctgctgccgctaccgccgccgccgccgcgcgctgccagagccgcctcctcgcctctctcctcctcccccggccgggttcccccctccctctgctctccctcccttctcctcagcctgcccgccagtctctcactcctcacagccactcctccccctcccaaaggaacgattggaagccgggggcacacacagacagaagcgcccaagggcgagcgcacgcacacaggcgccggggacgagtggctgcgtgtgccctgtactggcggatgtgagtgcgtgtttacagagtgcagcggaggcggcgggctggacttcggtgtgggtggttgtgtgggttctctccgtgtgttttgagtttctgtgtatgtggttgtggttccatgtatccacgtgtgcctagctgcctgcgtgtcccatgtctgagtgcggggtaggggatgagcacacatctttccctgctagatctggactcggaacccagtcggaccagaccccacctgtgctcctgtcttggaaaagttcagggtgtgccctgagctgtgatggcatcccacacttggcctcgggtccctcagcttgatcttccccacctgtctccaagactgtggccttctccatggtacttctgcctgcccgcctagcagataggaatttcttccaagttcaaagctctccagagcaggcatctttttttttttttttttttttttttttttttttgagaaggagtctgtgtcgcccaggctgcagtgcagtggcgcgatctcggctcactgcaacctctgcctccccagttccagcgattctcctgcctcagcctcctggagtagctgggactacaggcgcgggccaccacgccggctaatttttgtattttttagtagagatggggtttcactatattggccaggctggtctccaactcctgacctcgtgatccgcccacgtcggcctcccaaagtggtgggattacaggtgtgagccaccgcacccagcttaacatcttcttctttgactaggtaataactctacacagccaggaaagcattcctgatatcaaaacccctcctgaagcacttccagctcattttttctgttctgtcttcagagaaagaaatctaggagctaaaggcccagcacaaaacagcctagctggttaataaacatttgtggaaggagtgaactggaatttgaactcaagaccttgtaaaagggcaaagcctcctccatccaaccgagtcctacctaggactcttgcaggaaccacctctcttgctccatattgttctctcccttaatgaccacctgctttggcattggggaaactcctatgtcaacagaaagtggagatatattcactaactactgaatccaaaacaggccactaatccaggatcccagaatgtgaattttaatttcaaaaaattctggaggttggaaggaggagtgatcaggagaaggtatttactctgttctaaatactgagtggaggctcctcctctcccagtcagagaaggagaaaagaagtgaaatggaagggcgaagaagcggatg

SEQ ID NO: 916626 - DNA, 4001 bp, Homo sapiens
tgttcctttatgccctttatagcaactgttctatagttttaaatcacttaatgataataaggagactcatccccaaaagtgactaaagttttatttacaactttataatcccaggttcctcctcctcccacgttgtgggaagatatacatctccagcaatcttagaaatggcctcccgaattagtatttcctgtaaaatctgcataaatccatttgaatttataaatatccacttaagtatgcacatactaaagagaactgttttgtttttagttgacactaaaacgcagttgacaattttgaacaattccaaagttcagacatattattccccaagttgaagtttgtgatacaaaacacactagcatgtaataatgtatgcccctaaattatatttaaaaacaaattgggcaccatcagctgcagtctctccaaataaaacttactgcaaaaccagaaaatgtgtatcaattcctcaccttcaagcacagcttgctttgctctagaatctttttactggttttcataaatgtttaatatcatttcattaaaaagattttactttttaaaaagtagaaatctagtaaaatctatgtgttaaaaaaatcactcattgctaaaatctaaacttaattctaaaatttctgctaaggaaggaaagcgtaagagtactgaaaagagtaggcaagccatacaccaggtgtagcagatctaaaaagttggcccagctgtggaagaccctacacatgccatctagttttgttaattgtgtttcagtcgttcaggttataaaactactgtgtgaaagagagggcaaaaaaacaaaaaaaaaaaaacaaaaaaaacaaaaaaaaaacctgctagtttcttaattctgaagttagaccagttttctaggctatcttccctttagttcccagcgctcggattctctccactctgcgccggttgccaagtgtttcaagtttccaagagccgagagaggagttgccagtgcttacctgttccctcggtatacagggcagggaggtcctccgatgggacttgctgctgcagccggacatctcggcggacacgacggagctggaccgcctcctcctcttaaacaccgggatatcttccttggtcccagcaatcagctgggaccccaaatgctcccttggagccgcctccgcggactgcggcaagatttgttccacgtacctggccaagaggatccccagcacgccggccaggtacgccaggtaaggtctccaggcgaccttgaacctctctaaggaaatgagggacacggtcctgaccgcgctagtcaaggcgatcatgaggacgcccagcctcagcctcagcaccagccatgtcgcggcggccaagcagctgagcaccacccccgcggcggggagtgagagtaagtgatcctccccgacgcccagcccaatctggacgagcgcttcccccccgcagcaggcggccagcagcgcgacagccagaggcaggcgcaccccggcgcgcaggaggtacaagcccatccagaagaaggcacacaggagactgaagagcagcgccgagggctgcagccaggggctgagccgcgcaccgcccccgggagcacctccccgaggccccgggaagacgcccccttctgctcccggggctgcttcctcctcctccgccgccgccgcctccttacactgctccaggtcacagccgacctccccgcggaccagcctcaccagcagcgccagcagaaaggacagggagcccgcgcacagcgcggaggaaagtttccgagagctccggagcggctgcagcaccaggtctccccagcagccacggcagcccgagtcccgcggcgatgcggggtccgcacgatggtggcagtcccggcccgccgtgggggcttgactcaccccactgtggacgggcttgtccctgactcgtgcagcgtcgccgggcactgccatggtatagggtgccctcttcactgaattcccagtggccccccgacgcccccgccccgacccacgcgcgcgcgcgcacacacacacacacacacacgcacgcacgctcttcccaattccaccctcggaatccttcttctccccaggcccacaatccactgaaagtttcagctttcgaataactcctggagaatgctagatgctccaatgagacttcttcaagttaaaggctagcacgctcaagttgaaaacaagcacgggcagaaacgatcaggattccccttttctctctttgaatatctttcacagattctctgctccacccccacccccgacttatatcctccggggtctcttcctacttcaggatttcaaaaattgcccaatgcatcccgcgcgcaggagccgctgacgctggaggagccgggggcgcagggcgggctccgggccattccgaggcgcagctcggcgctgcgctgcgctgcagcgcgccgggcccgcggcagatggaggtctcccttctcctccttcctgcagctctttttctatcactctttctttctcctcggccgattctccccggcacggccccaggacgcgaatcgccattccctggggcagaaagcaaagcctcccccgcctctgtcaatccaattcatggcaaaggatggaaaaaaaaaaatggacaaggggctgagaaataagaagttgctaagtcccgtcggagagagagccagaccgagagactagcggcagccgcagaagggagggagggagaaggagcgagtaagagaggaagggagggtgagaagaaagggagggtgagaagggagaaggagatttgctttttttttccctccccacttctatttgatgcaaggttggtggtgatttgcagttttgcaaaggggaaacgagtggcgacgactgcttaaaattgtataaaactggcaactggagtgatcgacaattccgctttctttctttaaggcaactccctaggaaagctttctcagccgagctcccgccccctcctgcggaggaggcgctaccctcagctcgattgctcctttgctgggaaagcggccggttcaccctacaggctggagcaggggctgctgaggctgatccaccgcgcagcccaccgcagccccggggtgtggggggctgcggctagccctgaggctgagctccctagaacgttggaaggaaaaaaaaaaaaaaaagattgtgtttgcctacttggcagatgagagccaacatactttctactgtccctgaaaatgacagccacttctactgtctgattcaaagatgttcccaagtcaggtacaacagcagtccaatttcaggtgacagtgtcatcctttggtcgctcctgctggaaggtctgctttatgagaacccaagcctggcctgttggttcaaatgatggaagaatcagccttacctagaccacaatagtataaaaagaaaggaaggagaggcagcagtcatttaaatccagtgcatgagtattacacaatagtttttgactgtggaaagtaaaattacattgagattaagtgaccgtatcctcaaaaaaggttaacaaagtttaaaagcccagatagttcatcaaaaaataaagaaaaatctcaagggagaggtgaggataggtgggttaacactaggagagatcttagaagactgtctatggctgcaaaatactacatcttcgagcaaagcatatgaaaaaaatcaggaccttagttattaatgagtaaaggttcgtgtactgcagcagtgtgatatttgagaaactaaaagaaaattttcaagctaacctttttttggcagattatgaaaaagaattcagtatctgttcaatggacttaaactctattgatgttccctgggatctagttgtctttttaatatgatactccacttttaacatggctatcttagatgtcatttgccctcactaataataatcttaataatccaattttgtcttaattatcttgacattccaggttaaagtgtatttacagcctagag

SEQ ID NO: 916627 - DNA, 4001 bp, Homo sapiens
actactcgaagattgaccttgtagttatttaaatttctgagactcaatttataatctctatcacaatatagggattatgtttctaattaaaattcaggtttagcaaataattaaataaaaatgaatttattttaaatgatcataattagcatcagtataaaaaaactgaattttgaccttatatggtaaagtgtttggatatcttcatgataaatcacatcttaaatatatgttggggaagggaatatagcacagaagagacgaaagtggctttttcaaattagaacagtcttacctcttgcgtttgtcctgcatttgaaaacagtcttgcatcttagtcttgcatttgaacacagtcttacctctttctagctcagtgacttcagcaagtcataacaactattcaagtctgtctcttcataggtaaaggtataataataatatctagaattctagaatacgagcttcatgagaaccaaaagttcatctgtcctgtttcccatggaactgcttcaccaccagcactgtgcctacacacaggagatgccccaaaaccttaactgagtaaataaattatctattctcagaaattattttgtagattaaaataaattctgtgaaaaaagtacttagcacaatatatggcaaaaatacatattcaattaatgttgctttctttttcctttaattaattcaaggtatattttaagtattttattttaaatcttttatgttttgttacaggaagcaatgaaaaattacttataaaatacgaaaaacttaccatcaaagtcagtttttaaaaagacacaagtatcaccagttaagcacttcactctcaaatgaaccaactcccaagtttggaaatttcagtgtgtttagaaatgtagactagtcatttgactggtagttactgatgaataccaatcagtacagtatggggggaagatattatatattggcatttctgatttggtatttcatacatttacaaaaataacttattctaagtaaaacataaaatacatgcacgaacttcagaattggaaggaccgtggcagtgaataatcttgtccaaagcactaaaatcacttgtataatttgcatattttatatttaaatgacttgtctgctcaacgagttattctttgaacagatgtttagtattcccttctactgtgacggggtattatatatttcattttccttcataaattttagcatgaaacctcaaaaattctaaatatgctactaatccacgaggaaaataggaaaaaatgcagaaggatggacattgtcaatctttagataaatgtagatttggtgctagataaggattataaagtttcatgatactttagtattttactgagatggaaagatctggttttcatttgggagtttagtgaacagttctaagttaataaaatattctgtttaacattctaagatagttttgtaacatcttaaaaaatcattctagaacttttactgggaagttttttggtcccaggtcatatttttataactcattaaaaattaactaaaaatacatttaataaatacactgagccagtttatcataaacttgatttggattactttatgaatttatttttaaaaggctttcaactgtccttctctaatataatttctgttgaaaatcattatagaacaaaaaggttattcataccttttcccagtagaagctccacgatttggaaaatatcgtcaccatgtataatcagtaatgagatgttctttaaagttcagattctgttagactgattctcatttttttaaaaacatgctttcatgaatactgattgcaactccagctatcctccaattaaaagcaaggccacaccatagtcaaatagtgaagtaggttaaatgaaagttctgtgtgctcaaatttcccattttatgccccactctcattcattgattcaacatttcctgaacaacttatgggtggcaatcactattggagagtcaaatgaagtactacttggatactagaagctttagtctagtgggaaattttgcatagtgttctaagttctatgataaatgcattatggatgtaaaatgtgttacgaaaacagtgcttagagctgggactcaaataatgtttcagttgtatttaagatttattaaaagttgaaacaatgtacttgtaaaggcccagaggagtgaaataacatgatgccacccagagtacaggatatttgatctactttagacagagaggtaagatactggtagaaaagctaggagtcagaaaaaaacaggccttgttttgttttcctgagagttaatcagaatgtaggattcaagtttaggctttggaagtaattctaagtacagaagtagatgtaaagggcttaaaaggatcatgtatgcagttgtgagtgttgtgcgctgcacaactccaggggggtcagcattcatgtacactataatgtaaatggctctccttagagtttacaatattattgctgtggtgccagaggctgtgagaagagagacctgtatcaatcctcaatgctgtttccctgtctttcaacacagtactcagtacccacatttattttccctcatttcctcatcaaacattattctcattatctttcatccatactaatgaatatatgactgagatcagtttacaatataagctcccacaattcatggatgaacaaacatgaagtagtaaagaaatttagctctaactctagaattttaggcagaagcaatacaaagattactttaagtaccgaaatccaatcatcatccatactgacacatttaagctgatgctatcataacatgaacacttgtcacatcacctgggaaacttcttaaaaggaagacttttctagtttcatctaaaacactgtccatcagaacgtctaataagttcactagctgatactgaatggatactgctagtccataggaatgactgctttaaaaacagctcctcaaggggagctgacaattctagtctgtacagaagacagcctagatctgagcttaagactcatggtttgcctagatttggaaatttccattaaatgaagagcatagttacaggactcttctctgaggtacactgagacacacaataatttaggagattaagattttcatatcttggtctgttcatgactgctcagaaacaaaaaaatgaatgcttacgaagttggctcatctactctaacagacacttctctatgcacaatcatttaacctatttcatatttaggaaaaccactgccttattttatttttaaatcaatttgaatggctagaaatgtattccttatatttaagcaaaatctgactgctctgtgttctattcacttgtccaaatatcaccttacagaatgacaaagagaaaaatttcactccctttacacctttttttttttttttttttttttttttttttgagacagcgtcgcattctgttgcccaggctggagtgcagtggcatgatcttggttcattgcaacctccacctcctgggttcaagagattctcctgcctcagccttccgagtagctgggattacaggtatgcaccatcacattcagttaattttttgtatttttagtagagatggcatttcaccatattggccaagctggtctcaaatcactggcctcaagtgatccacccacctggcctcccaaagcactgggattacaggcgtgagccaccgtgttgataacttaagagagcacaatttttctccctctcttgcttttcatcataagttctctttcataagctaaacttccacctcatctgggacactgtttctagacatatttattgtttatgtgagtgcatcagcttttcaatatccttcttgaaattatgtactcagaactgaattcaacactgcagaggtcatctggccagtgcagaatttattgaattaattattctgttctgtatgccataaatacgttagtgaagcccaaagtggc

SEQ ID NO: 916628 - DNA, 4001 bp, Homo sapiens
gggtcttattccatctataaaatgaatcaaacaagaccttccttttagagttatggggaaattttaggaagacaatataagtagagtggtacaaagtgttcaaaaagggcaaatatatgctagaccttctgagagaaaagaaagccatgcaaacaaatctgtggttatgacacttgttcacctggactctgcacctccttcctctgggccaactgctgaagggcccttgccatacaccagaggggcaattatcatctgccctcgctgggtaattctctgcttccttcaaacaccccgactgttaacttatttctggtcttaaaattctgtcttaagaagctttccttgaattcctttgacaccccaacagcaaccccgaagaatttaaaaatcacacgtgacatccatattccccaatgatacatccccttttttcttgcaagtttcttttgcatttttacataattttgaagttacacctctaggcttagaaagtgttcatgtctgagtatgatgcattatatgaaagaagcctcctcagaaagagttacataacagttgccaggttaatcccttgatcctaatggtgctcaggatttgcactaggtaaccggaacagtcgactaatccctatgcagtttctgtcatagatttaccctccaattctctctgcaaaacctttaggaagggtagaacacctctgaccttttcctgcattggaagccagtcctgttgtccataaacatcaccaaaggctaacctcatgctgaccacacctttctagaaattctaagggcatctggagctgagtaaccttaaatgtattatcagacttgattttagctgaaagaagtttcatattttttcctccaaaagcattaggcaatttattcttttgtgagccagaacattttcctgtatttaaagcaatgttagcccttccccttttgaagattacaaactgtttttctgcagaaataagtggatgcagcaaagtaatatttcaaggcatacttttttaggggactgggattagggtcaacttaacaaagttaaagatttgtataaagcaaaaaatcatcttctgtttctttatacagcaaagcccagctctatatagtgacagaggatgatcctctgaaaagcagttttaggaggttcctgagacagctctctgatgctgctgttatcaccttacacttccagttctctttttctcagcaaagctatagacaggtagaccagtccattgttggtggacaaagaaagaggcaggaaggagctgggaagggaagtactgctggggttgagcccataaatatcacccagggtcctgctgaggcagagaaaatcaataatttgaaaagcaaagcaagacccaaaccaaagccataaaaaaaaaattaccaaaattccagccagcaccctgcttcagaatggaacaaacacttgacctcaaagggagaaggctcagccacctgccctgccctgtggtcattctcatgctctcagctccccttctccttttcctcacactcacaccatcctgggccaagtttgcaggcacatcctgggagtaaagaactgttttctctgtggttatttagtgccacagattcctccttcttcagaaaactgtttactatgaagctgcaaacagggaggtcactattgggctccttctaaatgaattcagtaatcaagttttgcagtgaccttgtaataatcaagtttcacttatttgcttgtcccatggcataacaagaaggtctgcatgtatctccttcatgttctttcccattttcatccccagccacagcccaggcccacaggtccaacatgttttcttctgcaatttttcttttggaacctgatcaaccccccaaagcccttcaattatcctgctcaaattcaccagaagttcagaagtactcacggagctgaatgttgttcctatcagctgcccagctgccttctttgcaaaagacaaaaggatctttgcatcctgacttatctctctgtaataccctcatgctgcctaatctcaccgtcataagctcagaacagcaacccaggtgcaaagaagttaggagaacatgggttgatgctgggacaggcttaggagttttccaataattagaggccctttcaaaactgacttgggttcattccagtcaataaataggtattgtattcacaaaaacacaaaaagtgttgatatccaagggtaaatttcagtttgtgattcaatatcttctgtcttttttttattcttacctttagatttcaatacccccatttcttccctttctctgacaaacacacacctatgtgcgcaatcacacacacacatatacacagtgacataattcttatggggctctagataactggagagaagagagggagccacagtgcctcctgctatacagggacattgaacatgcgggcagtgacattgggaaacacacagtatgtctccctaactggtattgtgcgaatttcctcagagagatggaacctcagagtcaaaactgatatctgacacagaaagggcccaaatgacagctaggaattgttaactgaggacacttatttgagaatcgattgctggatcttccgtacctaaatgtttcagggtgtagggtctagggtacaatccaatttactgagactccttgactcagtcttcctattttattgatccactagtattaattattaatagattaatactttttgtattttaaatagatctcaacccatatggtagttatcagtaagctcttttgataaatttatcatagaaagattaagtgacctattcaagactgcaaataaaattaatagtggagccaggaacagggcccaaatctggaagtaccttgcatattcaattgtctttgtgctgcactacatcaaagcagacagagaccaagatgtctgtttgctggtcacttccatgccttgccagtgaatttcaatgttctttccccagttgttacctattagaaaattacactccataacattacagagaaagaaggtcaatttatcctttctagacagggagaggttcttaacctgcagccctaagcagattacatgagcaactagacagcttgagagtcattcatatgctctccactggtctttaccaaaattcctctgagttttgaaagcaatgattaccttgcaaagccaggaaagtgtttggtctctggatgagtccctctgctccctcctctgtatctccattaccattcacatcttcctttactattacataccaggcacgttaatgttcagatgcttatctgtcaaacttttacatattctccattttcttgatgaaagaatacaaattttaaggacagtggaaagtgccaaaagctgagtgaatgttctagaatgttgttactcaaagtgcagcagcagcaacaccatctgtgcacttgttaaaaatgcaggatttcagccctgctccatacttaccgaatcagaatctgctttttaacaaggtccaaggtgatgtgtttgcatattaatgtttgaaaagtactgttctagacccatatgcaagcttgggtttaccacttatctgctatatgtcacctctctgagtctcagtttcctcatatgtaaaatgaatgatttagagtgttggggttctcaatttttttccatcccagtacacttgagaaagataatcttgcaattctcagattctcaatttttgaatatgggggtggttgtgccataagtcttcttcctccaaaggaaatccaggagagagaagagggagagattaggagtgtggagaaagtctaggtgtatagtttgaaaaattctcctaaagccactctaatatggttctcaggggtttagaattagaaaattcttaaattactctacagtcttaaaaatctatgttccttcttgttttggaccaagtaaagtagacacatttcctctcatgcctcttgctaagtacagctaaa

SEQ ID NO: 916629 - DNA, 4001 bp, Homo sapiens
ccattggtttcctacgaccttgaaacctggactggtaatacaaagcttctatctgtgcttttccccgggtcctcccgttttgtaaatttacctgtatatatgcgtatatgtatatgcatatatgaactagagaaatactccttgaaaccggtcgtttaatacacaacgtgcttccattcatcaaggtagaaacattttagtccctctcacttcaattttctcttttacgttcaagacgggcgcttctaaactcagtgcctgagttagaggcagtgtggagcagccagtcccaaatgggaatctttctgggttgctcctccccgggagtgctgaagaatgaaaacagctccttgaatggtgcgcaaattctgctaaatccctgctcaccatggcagcgaccaacaatgtcagacactgtgcagaagtcctccaggagagaagtaacagctttataaacaagcctcttcacacgggatgctgcaaagaggcttgtttattcggtatgaaagccggcgggaggaccaggagcgcagttcggggccagcagcttagacaaagaagggaaacaaccgctgcctgggggctcgcagggccggtctgaccacagatggaggttctcggactggacttcccaggtcgcacacacacaatctcaatctctctctctctctccaccaataatgagatcccgaggcaaggaaggcttatttagggaaagtcagagtgatgaaatgaactctgcaagtctaagaaaccccatctctcaactcctgaggctgtcctggccccaacgtgcctcacagtccccaacttaatagaaggcagttgattcaggcagtggcagcgcaagtgtcatcaacgctgacaccagtcccaggtgtgcgtgcgcggctgccagggccgcggggatgctggtggccgcgggagaggaaaggctgggccgggaaagtcttcgctttctgtctttccttctcggatttgcttcaggcacgggacaagtgctcaaaaaataggcagagacggtgggcaggagggtgaaagatggaaaacgagagtctggatggaaaatgagttttcacaattcctactttcccgggggaaagttagaatcgaatctgtttaactctttccaatcgtaatataatcagaaaagggacaatccttaacttcgacgccaatccattcgtaagataatgacaggaaagtatgatcagggtgtggatgtttcctgctgcatagtgaggaaggatgcccaattccaaaggaatcctgaagcgtcagaaagaaccgctccttttcccaccccaatcgaccatgcccgcggtgcccacccccctttgcttaccctgcggtggccgccaccgaggtcgccgacgaagttgcggacgtgagccatgtattgggtgaacttctcctggtacctgcgcgccgtgagctgcacctcgccctgcagcgcccagagctgcgccagcagcgccttctcgcgccgcctccaggcgaggacccgaggcccgggtccccgcccgcggccccagcggccgcccggcggccccccgcgcgcgcccccgccccggccagccctgggtgtcggaccgcagcccccccgcgcgggcacctcaccaccgcccagccccgaagcgcagcccccgcggctgcggagccggcgggcagggccgaagtcgcagtgctcgacgtgcgcctccagctcgtgcagcctgaccgagtggccgcagccgcgggcgcggtagtcgcactggactcgcagcttctggatgaggctgcgcagcggcagcacccggtacagctcgccgggcgccaagggctggcactgcagcgggcaccggcgcctccgcaccgcccagggcaacaggcagctggcgcagaagacgtgcccgcacggcgtgcacaggggctcttcaagcacctggccgcacagtttgcactccagagccgggtccacggcttctgcgaagcgctccagggcaaagcccatgttagggatggggaagaaagggggagcgaaagcagagtccgtcttctccgagcccccctgccttccccgggccacccccggggcagccgtctcgcggcggcggcagtggagggaggtggcgggtgggaggtgtgatctcactgtttgtttggcttgaagttttcaggctcctgctaggtcccctgatttcgcccgtattgacgctaatagaagtaacctccagagacccccgcctccttcgttgccctgcgatttatgttctttcaaattttggccgcccagcttacaatggtccttgggaacactgtgttctccttcgcctgaacagtgaacttcaagcatcgaggcgcctcgccctgggcagggctgctgatgggtaaagcgctaatgttgagaaacaacttttaaattcaccacaatgtaagcttcgggagagcagaatctttttgtctgtctggttttccgctgaatgcccatggcccgcccggcgtcgagtctatctccaatatgtttgaaatcgaagcacttttgttctttcacatcaaaactacaaaatcagaagttaggaaactgtgaccttaggaaatcactataaggaaaataacactaggaaatccacagggccaggcttctcaaaccgtgatccagaaatcaggtgagttagaatggcgcgatccttgacctagcagcaaagatggggaaaaagtcaagggcccgcctcaggacactgccttcttagggagcccatgaacagccatgcaaggcctcctcccgagtgaggaagctgggattctgagtctgactccaggttcagttgccacagcatccatcttctacttccacgggcgttttactactggggacgggaatgtgatcatttgggaacctggaagggaaaattaaagggaaggatgatgaaagaaagcagtgaaataacatataaataaaatcttagtggctgcttccttctacttaccctgaatgaaccctttggatccaaattgcctcccctcctagtttgactcctcaaattgtgtagcatgacaagccgtcctgaaaacacgcagtagggcgtcattccaaacccttcttactccacttcctttaccatcttctgaaccttaggaatgcagagatcctgtcacctggctgcatatcacttactgccattatcctgaagctgccaccagatgcttgggtgggttttataaattaatcattgatgattccttgctgccagttgagccttgttcctggaaagcttgtaattctctatgacaccaaatggcatcagttggaattgatgagaacagctccagactttgtcttttaaatccttggagctaactgaagaattagcaaagactaataatagaggctaataaccttctgagccttcttgctgtttgaaagatgagattttgttagttgttcaataaccagtgatgattggtgtgctagatgtttgatatgcttttaaactctttttcaaaataagatgctatatttctcatttaatatatatagattcatatgtgataaagtaacatttgcccctatgttccaaatttcccccctctttcgacctgtctttctacaaataaataagcaaacaatgaattactgattaaataagaaatcatttaatattaacagcatgaaaatatttttgtgaattgcataaactggaaatacatgttctagaatttattaaaatacttctgggcaggagaaatctattcctttttttagctatagaaaaagttgtgacttacagctataaacatttataattataaccatgcatatacagttatagctatagcttgacatttattggttttacagtaaacacaatgacactgacagcatttttaaaaagagagagaagagatggaatccaaaaatattattttgagacatgagactgttaggaccatgagacttcagttacttggaaaaaaaaaaagttcatatgatatccttggtatacccatgcaattcctat

SEQ ID NO: 916630 - DNA, 4001 bp, Homo sapiens
gagaaaataaaataaatatatggaggagtacaggtagaggcaataaagagcatggcttatctattttctcaagatttaggaagcacttgaaggcaaaactcacagacaagcattttaaaaatccataacaaaggctcctgcttcttagcaaatacagtggtcctttctggctgcagtaatcctgctggatttcttagtagaatataaacagcttaacctaggcataatcagggaggatgccacctaccacgctctccatattatacttttatataaatttagtaattcagattaaataaaaagattgatgaatccactcctctgctcctccaccacccaaagagaaacaatactagaactcaaactctaacaaccaaactaaggaaagtgttccacctagagactgttttcatgagtcaaagtggatgagagctcatctaggaaatgaatattattttagcctatccttgcaagtttgtattaaaaaatgaagcaaaaggtattgcccctggtgtaattaacaatgttaatcttctttttcctgtctatggtgataaagcagtcatttttatatttaattaatgcagaagatcattttggaaactggctaatgagcctctgatcacattaccatgaaaatgtgcattaacattgcaactgaggaggctgtttcatgtgtagcaaatccactttgtaattagcccactgtgaaatgaatcacgtcagggggaaatctgagggagccagtagtcagtgggcacttggctactgctgtgccatgggccaccaacatcccaagcatcgtccttcatcagcaatcttgtctaagaacaaatgtagcactgtgtcacctttgggacaaactggaagaagggagaaataaactttattttgctagataagaaattcgaacttgagcatacactcccaggggaacctcccccaataaaacagtaagttaagaaaattctgttaaaactataaaggctcaggatctagttttcttatttgtattcctaaaagccctcagatacacataaaagagacatctaaatttatacacttttttctaggtcacctacagttgttgtaataagctctcaaaattaatttctagtgctaaacaaacaaaaaccttataaaaaggatccaataacaagtggtaagagaatttctttatctcctgtttcagccaggacatagcatatattttttcctcatgtaatacaaaattactaggtcttcctcttaaaccaaagcacaaattctcaattcatccaataatttcctatggctaacaggatttggcaggaaacttctcctgtctattgaaaataactgagatcatagacccattaaaccccaatatttatgcagacaatgatacaattgattttcaaatgtcaacagtattccaaaatgaaagagatatctcaaaatattacagacatggatctcagtgctactcctgttatgtgactgacatcttggcagtagatacacaaaatgttaaaaagaatcccacaggaagtcatctgaagggggagtggcaaggaagctgaaaactgccacccaaaaccaaaattaaaagccccaaaccagcaagtctgccctcaattctgaaatgtactgaaagaaaaaataaagctagccagaattcatttaccgtctttcagacaaacacaaagcctggctcttagttgctggtatcagaccctgcactcacctgggaaacttcatacagcagtttgtagtgttcctctcttttctgaaaagtgcacaaattgcagcccattctaagaagcagagagagagagcaaatcttctaatttccccagaactgaaaggcaagtgaactgaaagggaatcaccctccagacttgactactgtttttcatcagtcacttcagtccagaaacacagacaaaccgctgttagctggaagcgtaagccagagtggtgtgtagcagcatgctcttcttcgctttccctaagtatcttgcactcacggatacacacacagagtttccagtcagttcatggcaacactcccccgtctctgcatcagtgcacatgactacacagattccagctcatgaatattaatagtgcctcattgattatttatgacagaacatgttagcagggaggggtgtcatagctgctgctgatgacagatgaatattcactaattaagaagcaaatgtagtgtggttaaacaaaattcacttgtgtcaataccatctctgtttattaaggatagaggggttgcatatagggcatttgaaaaaaaacatacacttaatttctccattgatataagcttttaatatgggaataagaaattcagaaacagaaatatacttagtttacatatccatgctctgcaacaagaaggagaaatatttttagcattattaaacctaggggaaaatgagtagggataattatttacatttataaaataaacacagaagcaaaggaaatttgggggggtgacatggaaaaggaagagaaggcaggggcatcattcagttttaattctgatactacaaaaataactgaatagttcatatgtaaagaccattacttactaaggaggaaataagggatattctcttaattctaaagaatatttagcaagtattagcagatgatacttgtacagataattaatattttaattagataatgaaggcccatctattgagtatatatttgtagcatataacgcatgtagatttgtattcaaaaagtagatcaacacaatgccttttctaagaaaaatttcaaatgcttatagtatttatgctaattttattaaagtcatatataatattttacaaagctgatactggcaatagttaaacttgaatgtaatgcacaatgactccatttatgattctatatttagagttcataatgatcaaaggtgaacagagacttaaaaactaagcttagatgtttagataacagaagtaatgcatttcatttcacactcttgcaaatacatgtgttgtattgcaagctggcagtttttgtcccttaaagatatactacaaacagctaaagcagataataaaagaaaattccttttgttcccacactgacttatccacaccctctgctaattaagaagtatgtccttgttccagcacatctttaaaccggacaggatagcaggtgggttccaaagcaaaaataattacttggaaactgacgactctggttaggaattacactggatcttgagatttttaattgcttatcactgacgaatagctacgttttggggtccagtttcctaaaagtgctttgtcacatgtttagaatcgataacaggaaatgattctaatgagcactaattgttaacaaattggctttgcaactagcaacacctcaacaccagcaagtagcaaggagatgaacaatcatctgctgcttatcagttgtttcccttgggatgtaataatccgattttctgggcctaatttcacctaacagcctggatgaaagccaagctgagagacctacatgaaagtggcatcataattgggaacagtgtgtgtgaaaaaagttctccaggacttctagcaaattagaaaccacttgtaggagatattaattttaggacttgattcctctatggaaagaatgttttcaaaaaggtatttgaagtggcctttataaaaattcatggtggccacaaacataagcaatctccttcttctcaggtgcaactgtaaaacataaatgtctgatgcttttgaaagttttaacttctctaagcctctatatcacttcccatgaagtattctcatgctagagttcacatcctcaaagcaaacattgactatttctttgaaggattctaaattgctgagttgtggaagaattattgattctcagatgttcatactctgtattttattttattttattttacttttttgagacagagtcttgctctgttgcccagagtggagtgcagtggtgccatt

SEQ ID NO: 916631 - DNA, 4001 bp, Homo sapiens
cgaaatgctggtgggtctattcttaacctgtatgaaggaaccagtttgcagtaaaaaagtcagaaatgctgaagaaactggctgggtgtggtggctcacgcctgtaatcccagcactttgggaggcctaggagagaggatcacttgaggtcaggggtttgagaccagcctggccaacacggtgaaacctgcctctactaaaactacaaaaattagctgggcatggtggcgggaatctgtaatcccagctactcgggaggctgaggtgggaggatcacttgagctggggaggcagaggctgcaggcggccaagatcaccccactgcactccagcctgggcgacagagtgagactctgtctcaaaaacaagaaatgctgaagaaaccaatactctttctttgatctcagactctccaaagacaaaacagaatagatttttaataaaatcaatgaccctgtattgactgtaagagccaggagctggagttttatatacgttatgtattttatttgagaccaggtctccttctgtcactcaggccggagtgtagtgacgctatcaaggctcactgtagcctcaacctccagcgctcaatcgatcgatcctcccacctcagcctcctgagcagctgggaactacatgctcacaccatcacacctggccaatttttttttgtagagttggggtcttgctatgttgcccaggctgtatattatttcagtcccaacaacaccatggggctagtatcccagcacactattaagagaaacagataaggctgggattccaaccctggcactgagtcccctctcaacgacacccttacattgtctgtccggaatcacagcgtttctggatttggtgatcaggaggttacctggagcctgctgaagtgaaatctgcattaactgtacgtttcaaagtgcaaagaaaaggagaaagccaaggtgatgagaggcgggcagggagcaggaaaagggaggctgtgttagatgggcactacatatttaaacatccaaaaaaattaaattctgtgaacatccaaaacaatgtaaggtcggggcagtttattttacgctgttgcccggagcttcataaccaactagcagtggcgtctgcaaatctagtttcttcactttcggcagccccagccgtgggcgtgggaggtcaaagaccaaaactaaaccgttgccctccagcgtaccggctggacgctctcgacccatttaacaaaggagaaatcggccggcgcgctcatcgccagttacataatgcgtcacaggctctcgggtgaggcttcagccctccaaaaccaggcctaaaatgctgaggccctaggggaagctctgggggcgtccgggcagccacagcctactctgtcccggcgacgtccctctccagcgccctggcctgtggggggagagggggatccggcctgtttccgaacctaggtccctcttgggtctgaagcccgggaaaagtgaatgaatttctgccgcaggccgaacctgcctggccacgccacaggccgggttcccggtgctcggggtggcccccaggcatgggacatggaccccgggacctctggcctgggggggcctcgacacacgcaggctgaacctccccaccgcccctggccctgtctccgctgggtcccacccaggaggccggcacaggcctccgcgccgtgccgctcgctgcacgcccgccgcccggtgtacctgggtgggcgtcagcactttgcccagctcgtccaccgccgccccggcgtaggtgacatgcagcgggtgctgcggctgctcgtccacttcttgcaggctcaagggcccggaccacttgctgaggtccaccggcatggcgaggccaagcagagcgtgcagccgggagtgccgcggtaggccaggcgcgggcgacagaggcgacgcggagagctcagcacactggctcgggaagacgcagacccagcgaccacgcgagagcacgcgcctcagccgccgcccagccccgcgcaccgccccacgtcacgcccaccgctccctggcctctgattggccgaagctggcagagcagggcctctcgcgctcctgggtccatgcaacctgctccctgtggctgccgagttctcgggaacagcggctcggcctgcaaggctgttgtttcaagaaatgaaaatgaagggcgccctggaataggttcgccgaagagagaggttcgtgtctcagaaagtgtcgctgggaaaaaaaaatgcaattgaattcgccttggttgcgttttggttttcttaattttttgcatgattctttgctccactttccaaattcagcaacatggcctgtcgcggtggctcatgcctgtattcccagcactttgggaggccaaagcaggaagatcgcttgagcccaggagtttgagaccatcctggacaaggtagcaagaccccgtctttacagaaaacttaaaaaaaaagaaaaaaagaaaaaagccagacacagtggtgcatgcttgtagtcctagctactccggaggctggggcgggaggatcacttttttttttttttttttttgagacggagtctctctgtgttgaccaggctggagtgcagtggcgtgatctcggctcactgcaagctgcgcctcccgggttcacgccattctcctgcttcagcctcccgagtagctgtgactacaggcgcccgccaccacgcccggctaattttttgtatttttagtagagacgggatttcaccgtgttagccacgatgatcttgatctcctgacctcggcctctcaaagtgctgggattacaggcgtgaaccaccacgcccggccgatcacttcttgaatctaggagtttgaggccgcggtgagctacgatcttgccactgcactcctgtctgcgcttcagagccagatcccatcttctcatacacacacacacacacacacacacacacacacacacacacagcaaattcagaaacagtaaggccttgcttttctcctgcactttaaaacgagccagattctctgtattttcgcacgtgatcacttgtcatagtaattgcctggtgagagcacctgagtgaacttttgagcatttaaatatatggggaaatgtatttgtccgttttctccacacacaaaattcgtcctcacaaaattcctgagaaatgtttgggttttggttttttatgtttgttttttgaaaaacaattttaaaccatatttattcataccaaaactgctcttactgtgaccacaagctgcttgctttttgctgaatatgataagcactattttttttttttttttttgagacggagtcttgctctgtcgcccaggctggagtgcagtggcgtgatctcagctcactgcaacctctgcctcccgggttcaagcaattctcctgtctcagcctcccgagtagctgggattacaggcaggcggcaccgcgcccagctaatttttgtatttttagtagagacagagtttcaccatgttggccaggctggtctcgaactcctgacctcatgattcgcctgcctcagcctcccaaactgctgggattacaggcaataagccaccgcgcccagccaataagcactatttaacagttcttatctgttttgactcttgacattgataattcctcccatggaataaaaagttgtctcttgatttacattcttactaggaaataatacgagttcattgtagaaaatcaaagaaaaaaacccaaagaagtagaaatccccttctatcccactactttgttataaacgtcagtaatcatttagggtatatctttcctatttaaaaataatatgagtatagatgattttgttgtttattcaccaaaagattgcattatatcctaccattataaaatagtcatatcaaaaataggtcgtcaggccaggtgcggttgctgaggcctctaatcctagcactttgggaggctgaggcaggaggatcacttgagtccaggagtttgagaccag

SEQ ID NO: 916632 - DNA, 4001 bp, Homo sapiens
gaatcattcaaatccaggatcaaatcccaactctaccactgacaaagctgtgtaaccttgggcacacttcacctctaagcctcaattttcttatctttaaactaggtctaaaaacagtaactacctctagggttctcatggagagtaagtagataatgcattcaaagcatgtaacacaaggcctagaacgtaactattgttattaatttttattatcatcatcatggtatggtctttaccttctaaagccatacacttcaggcactggaacttcacaataacactctgaaggccccaattctgttccaaataacttaaggccagaatcccaggtgctgtagtgaatactctcttcctcggcaacactgccatccatccaatctgtagatcctctccactaaaccacagtgataaagtaaaaaggccaaccaaactcttcgttctctctatccaaaatctcttatccagtacaaacccagtcctctctttaatatacattacattccgttatcacctaagggaaattgagttcagtaccctacccctctagaaatgagtcatgagaccagaaaaatcgtaatcacactataacgtgaacaggggaagggtatagaattctgtcccatagaagccaatatagattttcccataacaagtttcacctgtaacttcagagatgaattcttgggaccagtcagtctcattataatcctgagttacatccacagcatctccagctgcaagaaactcctgggcccagttctcagacaaggccaagtctgccacaccaggggcttaaaagagagagagagaaaactaagaaagaatacatacataccattccatcatgcctaaagaaccctgaatccacgtgaaaacactctgttacttttgtctccttctgcatctcaggtccccaatgccagcagcatccaatggaacccccttccttggccctggctacatggaaaacgatctcccctcccactagactctggactcacctctctggggagcctggcggaagtttgactgctcaatctgctgcatctcagccaggaggtcatccatcttgaaggtctgaggggcacgggacacaaggggtgcattctggtcctgcaggaattcagccaccaactgccagaagggaaatgatgaaatgaacccataggcttgggaggccccagcaagaggcaggacccactggagggggatcccaatgttagatacaaggaaaggaaaacacagaaactggagacacataaagagaaactgtctttccatagatttagaaggacgaaaaaatacatttaaaaacaagcaggcattctcattcggtcaggaaagcccaaaaattgaaatacgggtgaactaagtttaaaggtaaaaacacagtgggcaagagaaaaatgggacagaaaagagactggtctatttacctcatcttcagaagctactcccaaaggcttggaggcctaagagagaaagacagagatgtacaatgacgcagttcctctaaaatcaggggttgatgaagcccataggcatctgagcctcggcttcttcatctataaaatggttgcatttatttaaaggtgcacagggttttctagtgtttataaacgctcagtaagtggtaactactatgatttgcaacacaatagagaaagcagttataccaagatgtgcaaacagcccctccacctcagaccaccaccacctgggctttccacctcaagaacactcactgcctcagaggctgcacctgggctttccacctcaagaacactcactgcctcagaggctgcacctgggctttccacctcaagaacactcactgcctcagaggccggggctccggggggccaggggccaggcctcaatccctcctgccgaagggccttgtcctgggtgaagtgcccggcgagcttcatgagcgggttggcacccccgcattcggcctccaccagctcccgcattgccatggtgaccgccagctctctgatggacacaggaggtttggaactgaggtacccaagccagacccttctcacatccacaactctgcccgtatctgaggaaggcacacaggcgtctgccccacactggccgccctccaccccagtgcttttgctgcgacccccacctctgccaggagttcgagggaggtcggtactctctcctgccgcccccctcaaaggccaccgcttccagcctgcgcctctgcagaggcctccgcgactacggtcccatgggctgggggccagcagctgcctccacaaaggggcctggaccccgggggaccacggggacgcttcaacaaccaggctggacggcgacactgcccgaagaagggacagtgggaaaacagcccgaccatacctagccccgcgcagccccagcacgcggtgagcacggcagaggagcattccctccccttaagtcaccggagcccttcccccggctcggcccggtccctcccgcgctccccaccgcccatctccccggccctgctgccgctccagccccgcccctgggacccgcgaggccaccgcaagggtggggagggcccagggacgcggccccgggccccctcggggtcaggcgctcaccgcggagcgccgcgccgcacgacccgccggggcaccaggtgctggcttgggggaggggagaagagggggcggggagccagggggcggggctcaggcttaaaggggccgtgaccgccccgcagcggcccaggcccagcggaagctgtctgaaaaggcggggccttaagactgcgacgcagcctgacgggaagagccgtgagtcttaaaggggaagagcaccttagagagcgggtcttggagagtcgcctttaggagcgctcgaaaaggccacgggccctaggatttgtttgacggaaagctcaaagaagagtggagctaagaagggcttcccaggctctgggggaaagccgaagacgcgagatcctaggctcagtcgatcctgcctcttcccttgggcgcattgtgacctaaggggattcagtgccctttctgagcctcagttttcccctctaaaatggggctggctaatgttcccaagcccaagaaagagaaaagccctaacaccaggggctggggagtccagtccgaagccttcttcagcctcctaggcctgccccgcttccaaataacccctagcggggtagcgtcactgtctccatggagacaggggcccgcccccgccttaatccctctccacctctgcataatggggaaaatagcactgcatgatgacaaattccggagaccaaaatagggtccaacgcatcctgagacctcgagctggtaacgtacagggaaggtgaacagtgagtcagcccttccttccgctaagtcaacatagtggccttattcccatcactccaggctgggaaaggacaaacatacaagaaatgcttttaatcacggaataagactaagcctcaagccccctcatctgccaaagagtgtgctctgctgtcaaacctcaaagtcattgagaaacaaaccctgataatctcacccagcttcaagaccaagggagtcctagtgtcatggagaagagcaaggaggggcccagggctgccggtaaatgaccaagggcaataatgccagacgaacagaagtaccatcccagcccagggtgcatgagcggaggcaggcaggcagcaggtggcgccatgggccgggcttgtttcctggctgttctgcagatttcagaggtggaggcctcagggggccacagggaatgtctgtgtaaactcatccctgggaagacagagaagctgctctgacacctcaggggaacagaatggcaggggacagaccataagactgtgcaacatttctccttttccttgccttttcgccctctttcagaggccccacttctacaccccgttttcttccggagcacacaaatcccagcccttgggcgtcccctgttctcaggctgccatcgtgaggaaaata

SEQ ID NO: 916633 - DNA, 4001 bp, Homo sapiens
atgaattcttgggaccagtcagtctcattataatcctgagttacatccacagcatctccagctgcaagaaactcctgggcccagttctcagacaaggccaagtctgccacaccaggggcttaaaagagagagagagaaaactaagaaagaatacatacataccattccatcatgcctaaagaaccctgaatccacgtgaaaacactctgttacttttgtctccttctgcatctcaggtccccaatgccagcagcatccaatggaacccccttccttggccctggctacatggaaaacgatctcccctcccactagactctggactcacctctctggggagcctggcggaagtttgactgctcaatctgctgcatctcagccaggaggtcatccatcttgaaggtctgaggggcacgggacacaaggggtgcattctggtcctgcaggaattcagccaccaactgccagaagggaaatgatgaaatgaacccataggcttgggaggccccagcaagaggcaggacccactggagggggatcccaatgttagatacaaggaaaggaaaacacagaaactggagacacataaagagaaactgtctttccatagatttagaaggacgaaaaaatacatttaaaaacaagcaggcattctcattcggtcaggaaagcccaaaaattgaaatacgggtgaactaagtttaaaggtaaaaacacagtgggcaagagaaaaatgggacagaaaagagactggtctatttacctcatcttcagaagctactcccaaaggcttggaggcctaagagagaaagacagagatgtacaatgacgcagttcctctaaaatcaggggttgatgaagcccataggcatctgagcctcggcttcttcatctataaaatggttgcatttatttaaaggtgcacagggttttctagtgtttataaacgctcagtaagtggtaactactatgatttgcaacacaatagagaaagcagttataccaagatgtgcaaacagcccctccacctcagaccaccaccacctgggctttccacctcaagaacactcactgcctcagaggctgcacctgggctttccacctcaagaacactcactgcctcagaggctgcacctgggctttccacctcaagaacactcactgcctcagaggccggggctccggggggccaggggccaggcctcaatccctcctgccgaagggccttgtcctgggtgaagtgcccggcgagcttcatgagcgggttggcacccccgcattcggcctccaccagctcccgcattgccatggtgaccgccagctctctgatggacacaggaggtttggaactgaggtacccaagccagacccttctcacatccacaactctgcccgtatctgaggaaggcacacaggcgtctgccccacactggccgccctccaccccagtgcttttgctgcgacccccacctctgccaggagttcgagggaggtcggtactctctcctgccgcccccctcaaaggccaccgcttccagcctgcgcctctgcagaggcctccgcgactacggtcccatgggctgggggccagcagctgcctccacaaaggggcctggaccccgggggaccacggggacgcttcaacaaccaggctggacggcgacactgcccgaagaagggacagtgggaaaacagcccgaccatacctagccccgcgcagccccagcacgcggtgagcacggcagaggagcattccctccccttaagtcaccggagcccttcccccggctcggcccggtccctcccgcgctccccaccgcccatctccccggccctgctgccgctccagccccgcccctgggacccgcgaggccaccgcaagggtggggagggcccagggacgcggccccgggccccctcggggtcaggcgctcaccgcggagcgccgcgccgcacgacccgccggggcaccaggtgctggcttgggggaggggagaagagggggcggggagccagggggcggggctcaggcttaaaggggccgtgaccgccccgcagcggcccaggcccagcggaagctgtctgaaaaggcggggccttaagactgcgacgcagcctgacgggaagagccgtgagtcttaaaggggaagagcaccttagagagcgggtcttggagagtcgcctttaggagcgctcgaaaaggccacgggccctaggatttgtttgacggaaagctcaaagaagagtggagctaagaagggcttcccaggctctgggggaaagccgaagacgcgagatcctaggctcagtcgatcctgcctcttcccttgggcgcattgtgacctaaggggattcagtgccctttctgagcctcagttttcccctctaaaatggggctggctaatgttcccaagcccaagaaagagaaaagccctaacaccaggggctggggagtccagtccgaagccttcttcagcctcctaggcctgccccgcttccaaataacccctagcggggtagcgtcactgtctccatggagacaggggcccgcccccgccttaatccctctccacctctgcataatggggaaaatagcactgcatgatgacaaattccggagaccaaaatagggtccaacgcatcctgagacctcgagctggtaacgtacagggaaggtgaacagtgagtcagcccttccttccgctaagtcaacatagtggccttattcccatcactccaggctgggaaaggacaaacatacaagaaatgcttttaatcacggaataagactaagcctcaagccccctcatctgccaaagagtgtgctctgctgtcaaacctcaaagtcattgagaaacaaaccctgataatctcacccagcttcaagaccaagggagtcctagtgtcatggagaagagcaaggaggggcccagggctgccggtaaatgaccaagggcaataatgccagacgaacagaagtaccatcccagcccagggtgcatgagcggaggcaggcaggcagcaggtggcgccatgggccgggcttgtttcctggctgttctgcagatttcagaggtggaggcctcagggggccacagggaatgtctgtgtaaactcatccctgggaagacagagaagctgctctgacacctcaggggaacagaatggcaggggacagaccataagactgtgcaacatttctccttttccttgccttttcgccctctttcagaggccccacttctacaccccgttttcttccggagcacacaaatcccagcccttgggcgtcccctgttctcaggctgccatcgtgaggaaaatacctgataaactaaaccacacaaggatgaagagatgccctccagaaggtgcatacttttaaaaagaggaccccctagagagagcaatgtttaaaggaacccatctgatacagtagaatttcagaacctcaaggcaaccagagtttcccagtaccacttaaacatcacaacacacataaccttctgctctgctaggagtttatcaactgattagccgtaactcactttgtgtgcagatcttggaagaatgctaataataataactgatgtttactaaaatccaggtgttgtgtaaaacactttatgtatctcaatgtttttaatcttcttaatacccctattaaatagatattagtagacccactttacagataagacttgtgcaaaatcagatggctaggaagtcaaaatttaatccaggcataactctaggcacctacttcccagtcttagagaagacttactgataaaccatggagatctttgatctcctaggccatagaatcattcacagaacttggtccacagtcccagccagaggtgctgggaaagggctaatagagtgactttggtgtttaatatttaatttactgaagctctagatttgaaaccctagattttgttaatccaggttcaactttaaattcttgttctattcataaaagtagtaatttttat

SEQ ID NO: 916634 - DNA, 4001 bp, Homo sapiens
cccactggagggggatcccaatgttagatacaaggaaaggaaaacacagaaactggagacacataaagagaaactgtctttccatagatttagaaggacgaaaaaatacatttaaaaacaagcaggcattctcattcggtcaggaaagcccaaaaattgaaatacgggtgaactaagtttaaaggtaaaaacacagtgggcaagagaaaaatgggacagaaaagagactggtctatttacctcatcttcagaagctactcccaaaggcttggaggcctaagagagaaagacagagatgtacaatgacgcagttcctctaaaatcaggggttgatgaagcccataggcatctgagcctcggcttcttcatctataaaatggttgcatttatttaaaggtgcacagggttttctagtgtttataaacgctcagtaagtggtaactactatgatttgcaacacaatagagaaagcagttataccaagatgtgcaaacagcccctccacctcagaccaccaccacctgggctttccacctcaagaacactcactgcctcagaggctgcacctgggctttccacctcaagaacactcactgcctcagaggctgcacctgggctttccacctcaagaacactcactgcctcagaggccggggctccggggggccaggggccaggcctcaatccctcctgccgaagggccttgtcctgggtgaagtgcccggcgagcttcatgagcgggttggcacccccgcattcggcctccaccagctcccgcattgccatggtgaccgccagctctctgatggacacaggaggtttggaactgaggtacccaagccagacccttctcacatccacaactctgcccgtatctgaggaaggcacacaggcgtctgccccacactggccgccctccaccccagtgcttttgctgcgacccccacctctgccaggagttcgagggaggtcggtactctctcctgccgcccccctcaaaggccaccgcttccagcctgcgcctctgcagaggcctccgcgactacggtcccatgggctgggggccagcagctgcctccacaaaggggcctggaccccgggggaccacggggacgcttcaacaaccaggctggacggcgacactgcccgaagaagggacagtgggaaaacagcccgaccatacctagccccgcgcagccccagcacgcggtgagcacggcagaggagcattccctccccttaagtcaccggagcccttcccccggctcggcccggtccctcccgcgctccccaccgcccatctccccggccctgctgccgctccagccccgcccctgggacccgcgaggccaccgcaagggtggggagggcccagggacgcggccccgggccccctcggggtcaggcgctcaccgcggagcgccgcgccgcacgacccgccggggcaccaggtgctggcttgggggaggggagaagagggggcggggagccagggggcggggctcaggcttaaaggggccgtgaccgccccgcagcggcccaggcccagcggaagctgtctgaaaaggcggggccttaagactgcgacgcagcctgacgggaagagccgtgagtcttaaaggggaagagcaccttagagagcgggtcttggagagtcgcctttaggagcgctcgaaaaggccacgggccctaggatttgtttgacggaaagctcaaagaagagtggagctaagaagggcttcccaggctctgggggaaagccgaagacgcgagatcctaggctcagtcgatcctgcctcttcccttgggcgcattgtgacctaaggggattcagtgccctttctgagcctcagttttcccctctaaaatggggctggctaatgttcccaagcccaagaaagagaaaagccctaacaccaggggctggggagtccagtccgaagccttcttcagcctcctaggcctgccccgcttccaaataacccctagcggggtagcgtcactgtctccatggagacaggggcccgcccccgccttaatccctctccacctctgcataatggggaaaatagcactgcatgatgacaaattccggagaccaaaatagggtccaacgcatcctgagacctcgagctggtaacgtacagggaaggtgaacagtgagtcagcccttccttccgctaagtcaacatagtggccttattcccatcactccaggctgggaaaggacaaacatacaagaaatgcttttaatcacggaataagactaagcctcaagccccctcatctgccaaagagtgtgctctgctgtcaaacctcaaagtcattgagaaacaaaccctgataatctcacccagcttcaagaccaagggagtcctagtgtcatggagaagagcaaggaggggcccagggctgccggtaaatgaccaagggcaataatgccagacgaacagaagtaccatcccagcccagggtgcatgagcggaggcaggcaggcagcaggtggcgccatgggccgggcttgtttcctggctgttctgcagatttcagaggtggaggcctcagggggccacagggaatgtctgtgtaaactcatccctgggaagacagagaagctgctctgacacctcaggggaacagaatggcaggggacagaccataagactgtgcaacatttctccttttccttgccttttcgccctctttcagaggccccacttctacaccccgttttcttccggagcacacaaatcccagcccttgggcgtcccctgttctcaggctgccatcgtgaggaaaatacctgataaactaaaccacacaaggatgaagagatgccctccagaaggtgcatacttttaaaaagaggaccccctagagagagcaatgtttaaaggaacccatctgatacagtagaatttcagaacctcaaggcaaccagagtttcccagtaccacttaaacatcacaacacacataaccttctgctctgctaggagtttatcaactgattagccgtaactcactttgtgtgcagatcttggaagaatgctaataataataactgatgtttactaaaatccaggtgttgtgtaaaacactttatgtatctcaatgtttttaatcttcttaatacccctattaaatagatattagtagacccactttacagataagacttgtgcaaaatcagatggctaggaagtcaaaatttaatccaggcataactctaggcacctacttcccagtcttagagaagacttactgataaaccatggagatctttgatctcctaggccatagaatcattcacagaacttggtccacagtcccagccagaggtgctgggaaagggctaatagagtgactttggtgtttaatatttaatttactgaagctctagatttgaaaccctagattttgttaatccaggttcaactttaaattcttgttctattcataaaagtagtaatttttataaaataaaaataatttttacttattctttaatgtttgacgaattcaagttcaatagatgtttagacacacattgcattgactgtgtgccaggcattgtttcaagcacttttcaactattgatttatttaatcctcctaatagttattaataataactattatcccccattttacaaaagaggaaactgaggcacagagaagttgagtgacttgcacaaggtcatactaataaatagcagagctgggatttgaacccagaccacggtcaccaaactgtaaagggctcaatggtcaatatttttggctttgtagtccatgcagtctctgtcacagtgactcaaccctgctgttggagcacaaaagcagacataggccacacctaaacaaatgagcatggctgtattccagtaatgctttttatggggactgaaatgtgaattttatataattttcatgttacaaaatattcttcttcttttgatgtttttccaactatttaaaaatgtcaaatacttatttgttt

SEQ ID NO: 916635 - DNA, 4001 bp, Homo sapiens
agggaaattgagttcagtaccctacccctctagaaatgagtcatgagaccagaaaaatcgtaatcacactataacgtgaacaggggaagggtatagaattctgtcccatagaagccaatatagattttcccataacaagtttcacctgtaacttcagagatgaattcttgggaccagtcagtctcattataatcctgagttacatccacagcatctccagctgcaagaaactcctgggcccagttctcagacaaggccaagtctgccacaccaggggcttaaaagagagagagagaaaactaagaaagaatacatacataccattccatcatgcctaaagaaccctgaatccacgtgaaaacactctgttacttttgtctccttctgcatctcaggtccccaatgccagcagcatccaatggaacccccttccttggccctggctacatggaaaacgatctcccctcccactagactctggactcacctctctggggagcctggcggaagtttgactgctcaatctgctgcatctcagccaggaggtcatccatcttgaaggtctgaggggcacgggacacaaggggtgcattctggtcctgcaggaattcagccaccaactgccagaagggaaatgatgaaatgaacccataggcttgggaggccccagcaagaggcaggacccactggagggggatcccaatgttagatacaaggaaaggaaaacacagaaactggagacacataaagagaaactgtctttccatagatttagaaggacgaaaaaatacatttaaaaacaagcaggcattctcattcggtcaggaaagcccaaaaattgaaatacgggtgaactaagtttaaaggtaaaaacacagtgggcaagagaaaaatgggacagaaaagagactggtctatttacctcatcttcagaagctactcccaaaggcttggaggcctaagagagaaagacagagatgtacaatgacgcagttcctctaaaatcaggggttgatgaagcccataggcatctgagcctcggcttcttcatctataaaatggttgcatttatttaaaggtgcacagggttttctagtgtttataaacgctcagtaagtggtaactactatgatttgcaacacaatagagaaagcagttataccaagatgtgcaaacagcccctccacctcagaccaccaccacctgggctttccacctcaagaacactcactgcctcagaggctgcacctgggctttccacctcaagaacactcactgcctcagaggctgcacctgggctttccacctcaagaacactcactgcctcagaggccggggctccggggggccaggggccaggcctcaatccctcctgccgaagggccttgtcctgggtgaagtgcccggcgagcttcatgagcgggttggcacccccgcattcggcctccaccagctcccgcattgccatggtgaccgccagctctctgatggacacaggaggtttggaactgaggtacccaagccagacccttctcacatccacaactctgcccgtatctgaggaaggcacacaggcgtctgccccacactggccgccctccaccccagtgcttttgctgcgacccccacctctgccaggagttcgagggaggtcggtactctctcctgccgcccccctcaaaggccaccgcttccagcctgcgcctctgcagaggcctccgcgactacggtcccatgggctgggggccagcagctgcctccacaaaggggcctggaccccgggggaccacggggacgcttcaacaaccaggctggacggcgacactgcccgaagaagggacagtgggaaaacagcccgaccatacctagccccgcgcagccccagcacgcggtgagcacggcagaggagcattccctccccttaagtcaccggagcccttcccccggctcggcccggtccctcccgcgctccccaccgcccatctccccggccctgctgccgctccagccccgcccctgggacccgcgaggccaccgcaagggtggggagggcccagggacgcggccccgggccccctcggggtcaggcgctcaccgcggagcgccgcgccgcacgacccgccggggcaccaggtgctggcttgggggaggggagaagagggggcggggagccagggggcggggctcaggcttaaaggggccgtgaccgccccgcagcggcccaggcccagcggaagctgtctgaaaaggcggggccttaagactgcgacgcagcctgacgggaagagccgtgagtcttaaaggggaagagcaccttagagagcgggtcttggagagtcgcctttaggagcgctcgaaaaggccacgggccctaggatttgtttgacggaaagctcaaagaagagtggagctaagaagggcttcccaggctctgggggaaagccgaagacgcgagatcctaggctcagtcgatcctgcctcttcccttgggcgcattgtgacctaaggggattcagtgccctttctgagcctcagttttcccctctaaaatggggctggctaatgttcccaagcccaagaaagagaaaagccctaacaccaggggctggggagtccagtccgaagccttcttcagcctcctaggcctgccccgcttccaaataacccctagcggggtagcgtcactgtctccatggagacaggggcccgcccccgccttaatccctctccacctctgcataatggggaaaatagcactgcatgatgacaaattccggagaccaaaatagggtccaacgcatcctgagacctcgagctggtaacgtacagggaaggtgaacagtgagtcagcccttccttccgctaagtcaacatagtggccttattcccatcactccaggctgggaaaggacaaacatacaagaaatgcttttaatcacggaataagactaagcctcaagccccctcatctgccaaagagtgtgctctgctgtcaaacctcaaagtcattgagaaacaaaccctgataatctcacccagcttcaagaccaagggagtcctagtgtcatggagaagagcaaggaggggcccagggctgccggtaaatgaccaagggcaataatgccagacgaacagaagtaccatcccagcccagggtgcatgagcggaggcaggcaggcagcaggtggcgccatgggccgggcttgtttcctggctgttctgcagatttcagaggtggaggcctcagggggccacagggaatgtctgtgtaaactcatccctgggaagacagagaagctgctctgacacctcaggggaacagaatggcaggggacagaccataagactgtgcaacatttctccttttccttgccttttcgccctctttcagaggccccacttctacaccccgttttcttccggagcacacaaatcccagcccttgggcgtcccctgttctcaggctgccatcgtgaggaaaatacctgataaactaaaccacacaaggatgaagagatgccctccagaaggtgcatacttttaaaaagaggaccccctagagagagcaatgtttaaaggaacccatctgatacagtagaatttcagaacctcaaggcaaccagagtttcccagtaccacttaaacatcacaacacacataaccttctgctctgctaggagtttatcaactgattagccgtaactcactttgtgtgcagatcttggaagaatgctaataataataactgatgtttactaaaatccaggtgttgtgtaaaacactttatgtatctcaatgtttttaatcttcttaatacccctattaaatagatattagtagacccactttacagataagacttgtgcaaaatcagatggctaggaagtcaaaatttaatccaggcataactctaggcacctacttcccagtcttagagaagacttactgataaaccatggagatctttgatctcctaggccatagaatcattcacagaactt

SEQ ID NO: 916636 - DNA, 4001 bp, Homo sapiens
gttttgtttgttttttgctttctgagacagagtctcgctctatcgcccaggttggagtgcaattgcccgctatcggctcactgcaacctctgcctctcgggttaaagcaattctcctgtctcagtcgccggagtagctgggattacaagcatgtgccaccacgcctggctaatttttgtatatttagtaaagacagggtttcaccatgttggccagaccgatctctaactcctgacctcaggtgatctgccagccttggcctcccaaagtgctgggattacaggcgtgaaccactgtgcctggctaatttttttttttaaaccattccctactacacactactattcctgtgttccttttagcctgtcagttctgagactacagattaaagatgccctactgccataacttgctcattcaaataaaacactgaacaagtgaacacaatccaggtttcttagtgacagtttagaaatgagccacaattaagctgaagttgaagattaacagagccaagctccctgtttctatatcctcctatttttgtctattgcctgtatcttctaagatattagcaaagtgtaaaccaccagctttatctccatattaatgttctcaaacagcaaagggaaatattacatctcaactatacatactccttggtgttcacaagacattagctggatgttggtgtgaagtcagataaaagagctacaaagtgtgtaataagagtattcttggccgggggcagtggctcacgcctgtaatgtaatcctagcactttgggaggccgaggcaggcggatcacgaggtcaggagttcgagactagcctggccaatatggtgaaacccccaactctactattaatacaaaaattagccggtcgtggtggcgcgtacctaaagtcccagctactcgggagactgaggcagaagaatctcttgaactcgggaggcggaggttgcagtaagccaagatctcaccattgcgctccagcctgggcgacagagcgaaattccgtctcaaaaaagaaagaaaaaaaaaaagggtatcctcaaaatcattgtgaggagagggtaatctgaagtaatcaaaacaatccccctccccgctttttgggggagtgaaggagaaagggagaaggcagcaggtagccgttcctgtggaaaggatacagaactcgtcagtgggacgagtaattctttccctgtgaaagcaatgaagacaaacacctggggaaggttagcggctccaacgtaagacgttaaagagagttccaacagggcacagcacccacagacagtgtgaaaagaacggaaacaggggcaataggagcagaggaatgtcctgtacttttcaattctaggcaggcaacatgcaaagggttcatgaagcggtatacgatatgtaatggattttctcgtttcaggtaagaaaaactgggttaggaggtgggacgagagaagcaggttcgccactttaggttaccctcacccgcctaccccataccctcgttgctcttgttcagcacgttcagacagtccttggcttccacatacttggtctgtaccactttgagctgagcaatggacgtggacaagaactccacttcctacagaggaccgggatagcgggtcaatgagaggactaaggggagaaaggagcgcggccggggagggggcaggtcctgggatcggatagaggtttcgcctgggaaaggtaggctgccaacttggaaccgggcgcgagaagtacgcgtgggcaagggggatgtagagcaggaaagaggtgcctctggggcccgtccccacctggtccagctggttcttgagcatttctagctgcggcagattcagctccgtgatgttaatagactgcgccatgttgggaaggccgacttaacgaagaggaagtctctcggcgagcaacgctctagccgtcctctgcgcgtctcggtggcgccgggaggcctcgctgcgccagacagctctatgatcctccgtcccggaagggaaggaggggcttgagcctctcagagactgttgtgtgagttcatttcataaaatgtcttaagcctagtattgtaaagtagcagcaaacaggactcctgcctacaaggaactgcaaaatcttaaagttctcacgacacaaccacgatattacaaagtagtgtatgctactccacgtgggtggtataagctactggaaagcaggctggattgccatggcgacggctcgggggcctggccctgctcctctccaccccgcttgctattgctgcctgctggtaccccgccaggcccgatttcaaatgttcctcccagcacggcatggaaatggcagggaaattctaaactctttttcccagatggcctctgaggccgaaaggcaggaaaaaaaaaaaaatcccttgtcagaccgttctgaattgtccttggaaaaaaacaggcattagattgaaagcttgtcgaaggcaggaaccaaccatgttctcatcactgaaccaattcttcccctctcgctataaccatcttcccccagccggaagtaggctgacacgtagtaggatctgaaaaagggtttatcacccgttgccagtgaggtggtgggagaacagcaaggaagcgccattgtcaaccaagtacagcacaaattaatcaataaaatattttggccgggcatggtggctcacgcctgcaatcccagcactttgggaggccgagaaggacagattgcttgagcccaggagtttgagaccagcttgggcaacacggcgacaccccgtctccacaaaaaatacaaaaattagccgggctggtggcacacgcctgtagtcccagctacatgggaggctgaggtgggaggatcgcttgagctggagagttgaggctgcagtaggctgtgattgtgcacactagcaacagagctagactctgtctcaaaaaaaaaaaggttttaccatgtgctgtatgtgagggatacgtgagagtgtaagatacttgcttcccttgagcttaacaattggagagaaaaaccacactagaactccacagatccacagactctactgctaaagttacacattggtaagtgtaacaggtgtacatgggcagacagcagtagcctttaacatctacttaggaggcaggcagggcaactgaggcattaaaactagtgccatggctgggcgcggtggctcacgcctgtaatcccagcactttgggaggctgaggagggtggatcacaaggtcaggagttcgagaccagcctggccaatatggtgaaaccctgtctctactaaaaatgcaaaaattagtgggacgtggcggcatgtgcctgtagttccagctactcaggaggctgaggcaggagaatcgcttgaacccagcaggcagaggttgcagtgagccgagattgcgccactgcactccagcatgggcaacagagcaagactctgtctcaaaaaaaaacaaaaacaaaaaacaaaacactagtgccactccaaagatacctgcggcaggaagacaggacggacggatggtacctggccaaaacactctcaaagggtctatcactacccttccttgggcctgtctctacttagcattttgatgcccctttctcctccagatttgtctgctgaggcccagccaggcccagcaggctttgtcctgtgtctttgcctttcttccccaagcactcaaacttgatctgctgtaacctgttcctgtcagcttacagtaccacatagtaggaagggggcagtcatgccgtgtctttaaatgttctcagataaactacgcaaaacagggtttaaatgatgtatctttattatactgaggttaaatcaaaaggaaatgtttcatataaaacactggggaaaatcactttaaaagagttatcctaaggattaaatctaaccttggaggtagaacagttatgaggcttctagcatcaataagacagctccatggggttaccgcagagagacaggcaagcc

SEQ ID NO: 916637 - DNA, 4001 bp, Homo sapiens
ccctggccctttccacagattcacatcccattccatcatttaagaccagtgatagttgtacccttattaaaccttcactgattaccacaggtcaaggaaaccttcttttggacttcctctaaccacatgttgtctaaactggatcactgcctcccaggttcaagtgattctcctgcctcagcctcccgagtagctgggattacagacatgcaccaccacacccggctaatttttgtatttttaattgagacgggttttcaccatgtcggtcaagctggtcttgaactcctgacttcaggtgatccgcccaccttgcctcccaaagtgctgggataacaggcataaaccaccatgctcggcctgctttatgtggcattttaatagtttcgtacgcactgataagagggttggactagatcaggggtcagcatacaacagcctgtaggccaaatccagcccttctcacatttttgtatggcagtaagctgtgaaaggtttttatattttttagtggttgcaaaaagtacttcatgacatgtgaaaaatgttaagttcaaatttcagtatgtgcactaccttcgttcattcacgtattatcatggatgtttttgtgctacaacagcagaatggatattgtgacagagactcataagcctgcagtttaaaatatttactatctggtcttttacagacgaagtttgccaaccactggactggatggctgctaaagtcatttttcctaactagactgagaactcctccagggcagggatcatgatcatttttaaaaactctcccacagctcactaaagacttgcaaagtctatgcacattacaggaccccaataaatacttgttgaaaacgttaatgaactgatgaactacatgaaatacaaatatatgaaaaatgtaaaatcggcttagatacagatatacctccatattctactttaaaacacacttttaacttggacttgagaaatcatatagtgacaaacagtgaaaggaacatagagacacgcgtgactagagacgctcttatttaactggaatgttcatgtccaaatttctgctgttttccaaaaagaaagattaagtgactagggcaaataggaaggcaaaaaggtggaaaggaaaaaacaagacatctgggtatgctgatccctttcctcccgttttttcttctcattcactcttggagctcatgacgggggcagaatcccacacagagctcttccacccctggaagcgtcagtgagggagaaaattcgccataacaagaggagtttaagagtgctgacctgtaaaaaccgctcatattcttctcctgaaatctctaagacagttatagaggcacaggacacagaaattcatgcagactcatgtataagcatcccttacagacccacaatgacacgcacgtagacaaaaacagacagatattaaaacatatctctaaaatcacgtgcgtatataagcacgcggcagggaggaacagaaaagcagcatcataggagcactgatttgaattgggtgagtgccagggtagggtcaggcagccaagggcaacccgtccgagccccacccacccatcccagattcctggggaatgcagctgagcctgcaagcggaggggactggccaaggggctaggatccttcacgactgccctgcccatccccctctcggctccagcttaggatgccgtatctcttcttttcctttctgctcctttcagttctccctaccgcctgctcccggcccataccttcccacctcactcccagctctcccccttgctcttcactcaatggcccctcttgccttttagtcttagctctcctccgccgctgctttcttgcagattgtccttgggaaaggggggaggggtgatggacgaacatggggaggagccaggtggaggcaaagagggagggggaaggaggagaggcttcccaacctccactaacagatgctgacaagaaggctccgcctcctcctgcttgcctttctcctcctcttcctcctccccctaagtactcagctcagatatggcagcggcttagttccttcactccccagagtcctggggtcctcatatctatctcgagagccatcagcatctttatttaatgggaataataaattatttcgttgcttctcttgttttcaacacagaactttttcctagtccagactgcctgagacaccttgcattccaacatcttcagcaactgctaataaaacctgcccctgtggccctctatccgtctttaagcaaacatttcttgggagtctgtgtgctagattttgcattaggtgccgagaggtttaaaaaaaataaatatagtccctgcctttgaggaacattgaattatgacatcttctatagaatagcctcaaaaacttcttttacatttacattacctttctcagagaaagtacagaaaagctagctatttggaatgaaagtgtcaagagggaagggcgtgtctgtgaggccacttctcaagcctgcagtggggagggatgggggcgggattctggcagtgaagcaaacatataaattgggcttcacagcaaacaggatccactctggaaaaagggtcagatgctcccagagcaagaggtgcatccattactcaagtctcaccttccctttgcttcattgtctccacagtcgggtctcctcttgcttttaccactgccctcttcctcttgcttacttgtatctctacctctgcacattctggcacaaacaatacaaatgcaagtgactaggagataaaaccccatttgactacacaaaataaaagcatttgttctccaaattataccatcaagaaagtggaaagacaacccacagaatgggagaaaatatttgcaaatcatgtatctgataaggggctggcatccagaataaataaagaactcatttgcaactcattaagaatgtaaaccaaaaataaaattataagcccctcaaccatctgaatagacccctcctctcagtcaagggtattccaaagttaatctgaaaaactagttcagacgttgatggaaaggggaagccagacacacttcattatatgctcctcccttttggaattactgatagaacagactctttaagtctgataagaaacatttacaatctattctctgaaacctgctacctggaagctttgtccacctgataaaaccttggtcctcacagattgcttttctattaagtctttggacaataacttaactcttttcaccaatttccaatcagaaaatctttgaatctacctatgacctggaagccccgctcccccctccctgcttccagttatcccgcctttctggactaaatgaatgtacatcttacatatattcattgataccttatatctccctaaaatttataaaaccaacttgtggcccgaccatcttgaacacatgttctcaggatctcctgagggctgtgtcatgggggagctattggtcactcgtatttggctcaggataaatctcttcaaatgttttacagtttgactcttttcagtgacaataaaaagaaaatacctcaatttaaaaatgggcaaaagagttgaccaaagaagatatacaggtggcaaataaacatgaaaagatgtcaacatcatatgtcattagcgaactgcaaattaaaacagtgagacaccactacacacctattagaatgattaaatgattaaaattcaaaaatccaaatgctaatgagaatgtggaaccactggaactctcattaattgctggtgggaatgcacaatggtacagtcactgtagaagacagtttgacagttttttacaaagctaaatattgtcttaccacatgatccagcaatagcactcctaagtatttagctgaatgagctgaaaattatgtctgcacaaaaaacctgcacatgaatgtttataaaagctttattcataattgccaaaagctggaggcaaccaagatgtccctcaaaagg

SEQ ID NO: 916638 - DNA, 4001 bp, Homo sapiens
agatactttgaggtggggtggatgagaaggccatttttccttagggcttgatttatctgatagttttggagtgtcagttataatgacaataaagattcccacagatgagcccagactggtcgaagtaattcacataacaacacaataatgacaagctcatgggataaattttgttcccccctcaactctcaagtcctccttatctgcctggcatctatcacaacaaaccaggtcaaaatcttacctggaaaatacacgactcagtgatcaatattttatcaaagtgagaatgtgataaacaaggtcagttgacccctaaaatccgtatttacactagaaagcctcacatcctgtatttagacttcttgtgagagaacccattctctgtcactggagtatgatcaggagacaagggtacctgttctctgaggagtcctgactaactggcgagactgaatcacacacatgaaaaatttcagatgaaactcgtctttatgcatggctgcctcctagaaatagagacagagtttaatccaaacgaacagagctgtgaaataagatgtcagtgactgacatggaccagctacactcatgactacttggccttaggacttgacaatataatataaaagtatcagcacatgaggcaatacaaataatctactttgatgtatttgacaggggaggaaaccctgaactcagcaagctgctgagagtatcagaaaggctgggggcctccagaaactgcccttctttaagtctgagctcagactgtgcctgtggctgtgatctgggtgtaaaggacctattaagggggcatttctctaagacttctacagggcctgggtccagaggcctgccaagctgaggtgcttgacaaaaagcctgaatgaacaaacatatttcttcccattatgttctcttagaaagtatggcagattccaggttaatcaatgtgtcccaggaacaacaaagcccttcaaaggtcacaggtgattcctgggtccttctctatctctacccagaaaagcagatctctagtgggctcccaaaagctttcctcacagctctgcctgtttcaaattcctccagagttctggaaggttctacatcttgccagagtctagcctaatccgtcctcaagttgcttgtttgtttgtttgtttgcttgctgaatggtcaatcaagtatgaggtggtgcagagtacaggattgcaagttaagaaacttgtttcctagtcctagatgggccgtgcacttaaaacctttgggaaatcacttcacttctctgaacctggtaagactaaagtatctccaataacctctacaagcactaacgttctgtgattctcaataaaacacgagatagcctgagatcgatttagatctcaggtccctatctgtcgggggaagccacaggtttccgcagatttagggccaccgcgaaaagctgccatggaaactggaacgcaagcaagcaaaactcgccgggcggaaccagaaggcggcgggtaagggagcagagggaacagagaaaagcataggacgaagggctcactaacagtattccgagtacgagaaagcgaaaaagcccagactgaaaagggtactgagaaattacgactagtcttaaatgctcccttcgcttctcgggcctcgccacaccgcgcaggcgccccactggtccttaactctgttctttgacctcctgccccagccccctcctcttcagccacctagcgactcttccggtgctgtgaaggcggttccggttcgcggcggttcccgggttttgcgttccgcgcccggccggaaaccccttcgcatggcagccggttccggttcggtgagtggcggcgggaagctgggggaggggtgaggatggagggagcctggtccaggagactgtgtcggacccggtcagccggcccgggctggactgggcggaagcggggagcactgtggggccggcgccttttcctctgccccgccccctgggaccacctcccctcccccctgctgtccggtggccgcgctgtggccgccggtggccgttaggctacctgaggccgttccttctggtctctctctcctgggccgcggagagaccgtctccctgccgttacagcaggccccatcccagcgcccagccgtacttggggaaaggccggttgcgattccggggctttcccgccagagctgggtcttctctggggagagctgttttcaccgggaagctcggctttctgtggtaccggcttcatctcccgccttccttgagacccgagtgatatttcttgactacttctgcgtctcacgtaaacatttctccaactctcctactctgtggtatctccctgagatgtgatatcgctagtgccaccatcagaaagaaacgtctggaccctcctgctcaggttatgaaaatccccttaactgccacaatttgcttacctggctcatcgcctcctggtaattcccttgaaccgtctctttcttggtgtaccctaacgtgatctctggatctatgcctcgtttctctttccttgagcttggtgatttctgtttatcggtgcctgtgcagtatttccactatcttgttagcagtaacttgcttctttatcactttcaagtcagccttgttaaagtcattttacttcatatttggtacacttattatatttggagtggtggtgattcttgtaatattcatataaagccttttatctactaccaactatttgactgagggtctttgttataattggttattctggatgtattagatctcatcatctcctaaatctttattcttcataaaaataatttgtgttaaggactcatgttgaaatacagattaccctgactttgaaattacagttaaagcgcaactttaagcatctctataagcatgatcccttaacctacttccagtttacactctaccaccctttatttttcctctctagtcccttttaggaaggcttattcatttttaactgacttcaattaattatcccaactgcaaagatggtcttcatgtcactcatctaatgagttgtctagagggagtggatgggtacaaaaacaggttctgctacttctggctaagggaatgcagttgttgacttgcattgcggctttggaactcttgtccttttcttcccaacttctacatcttctatcagttgtaccagctctactgtcttgcggtacctgtttatggatctggctttccctactggacagtgagctgctcagtggcagggaccctttcttaatgcacgtagtcggtgcacagtaaatgaatgtgtatgaaagaatttgaacacttagggtttacggcgttagagtgttaaggtatttaaggtgttagagtgattgggagagattacatgtaaaaatagaaggaaagaacctcaaacacatgacgatatagtacaaactattgtacacataattgtttttcagaacttggaaaagggtgatttcacatggttgctttcacacccttcttatatcataaattgttctaaccacatcttggtcctggataaagctaacattgcgtctctctctctctctctctccctccctccgcccccccccccccccccgtctctctctctctctctctctatatatatttttttcttctttttttagacagagtctcgctctgtcacccaggctggagtgcaatggcttggtcttgtctcactgcaacctccgcctcccgggttcaagcgattctcctgcctcagcctcccgagtagctgggattatgggtgcctgccaccatacctggctaatttttgtatttttcgtagagacagggtttcaccatgttagccaggccggtcttgaactgctgacctcgtgatctgcccacctcggcctcccaaagttctgggattacaggtgtgagccaccgtgcccagcctcaatatatattttctagtaacttccttgcagccctagacattgtctttcataatccc

SEQ ID NO: 916639 - DNA, 4001 bp, Homo sapiens
aacagggtctttttcttacagcagtgagttatggtcttcactagaataagagggtctcactgctcaggatcagaaggtggaagggctctgctgctctgagacccaagttaaatcctagtctgacctttctttctctctttccctctctaaaaagctcttcttcattttataactctgtgcatctcacttggtttgtttagcaggctttcttctttcttcccctaatctgacaatctgggtccacagatcattctaccaaggtttcaggatcaatgctcaagtacatgttaaagaattcagtattggcatggtactctgccagcagagaagacagatgcaataaaagccagatctgtggtttctgcaaactcaactagggctctgcattcctaatctggtcactattcctaaactcagacctccgtaccctccttcctcagtttcttcattctagcactttctgattcataacctatatcacaattataataaatattagtttaaaaagtctagctttactaatatactaataagtatcataagaacaaagattgcgtcagactttttcactgatgtatcactggtgaacctcatcatcatcctgattgacacagtagatactcactaattcatttttaattaatgatcacatgtattgagtatttacgatgtgcctgctactgttctaagcaccttacttaaataaagagttcagtgtcttgaaatctaccttctccatgaagttttcactgattaattcaatcagaggctatcatttcattatgtaagtagattccacttggttaatgcacacttgcttatttttatttatgtgccttatgtaagaattctagtttcctcattaaactataaattcctaaaggaattcaacttcttcaaaacatacaagacagggctctatacaaagtgggtccttagcgcaaagtctaaaaaagcctaggaacagtggtgcagaggaggggagcctagctgaaatcgctttccttctctctttctaattgtctccatgtcatgtatccttttcaaagaaattctacctcttttcaatgtatcagaatatatcagaagatcaaaggagaaaaagttttttttaaaaaaatcaataccctcttactcccactccgtgtttcctatatacctaattttcgtgactcccaggtttcttaaattcaacctagaaaagggtttttgctggctctgttttctgcccctccacctcataccggatctgtattgattaactgctgctgttcctatttgttcaaggggtgatgaaagggaagaggaggaaaggccagagaaaaccgagtgcctgactgaccttggtcagtgcaggaactctccagacatcagagttaatacctgaagacctagttgggacccaccatatactaattctgggtctcctcccatccccaccattaccaaagtacatgaagttaatccacttactgccttctcaataactttatctctttagtttctttccaatgctgcttgagaaaacaccactcttttaggttcccaaagaccaaaagagccccctgtcttcaaagaaacttggaaataagttttatgaagatgtgggtaaataaacgcatggcaaataaaattcaaatgcacttgaggacttaggcctcacagaaatttttagcaaagcccaaaattcccgtgaacctacagaagaataattctattgtataggctaagggagtcagtaaattccaaaagtcccaccagccatgttttttgtcccctcctccttaccttgggcatctccaccagaggttaagacagcaatggctttgccaatccccagggttttggctgcatggtgctcttcatgggtcatgatccactctagaatttaagacaatggtcagttaagacacagcaggaatcaagatgccactagctaaaggaacggcaattagactggctagagccacctcagtcaggctctcccactataccaagtctgagctttgcagcctgagagctttggacttcttccagaggaaagccacacccttgtagactgacaagctgaaatgtcatgtaatcaagcccaagactactaaggtcctaattcctccctgatccctcccaccccaattggaacctatttggggaataaactaaggtcagggaaaagagaagttgactgaatagaaatgagaaagggaggagaaaaagttgagttagcctcaacgatccctcccttttcaatgaagggataggttattgcagagggctggaatcagatgaggtttagggcactgatgacaatcagcaaagtagaagtagaagagcaagggtaggttggattataattaagattagggttgggtgttatggaattgtgctattggaatggggttaggtgatatggagttgaaactggagtctgaggctataaaggcacatcagagttaggcaaattaatggtgtcagtctcaagaatggtcaggggctttctatggctcttccctctcaggatgtcagcctcctgagcatctcttgatccttggtctttgggtcttgcccctcacattactacatgctatgaaatgagaaaattaacacaaagtcactgccgtatatacacagatgtgtacatacgacatgggaacaccttcatattttattctttagggatcacctctctcaaaggaacacacaagaggacgtatttttgtatccataaaatgccagtagaattatcactctcccagtttttcaggctaaaacctgttattttaaatttatctcctcccttcctctcagattcaaaacagtaactaaatcctattattctcccttcttattatcttcctttatccatcccctcctttctatcctcattgccattttccacctgaactgcttactacaatagctggtttccctgtgcttgtgttcctttcttcactctattagacacacaaaataaaccttcataggaaggtcataggtccctaggcttcagtggagatgtgtattcattcacaggaacccaagttttacgggcagcttgtgcttgcttctaccctgcatttggagaactcagggtagctgcctatagagacataagtcacataaacacccaaatccacacaaataataaaataatgcaatgagacatatatgaagacatacattcacaaacatgcattgtgttaacagacagagattaatgaacgtactacatataatcagtactaacaaataaggtcccaacttgttgggttggcattcgaagcttctacaatttagcccttgcatatagcttcaactgttggtcctatagattctctgctccattgtcacctgaacattactttgctcttcccactttagtgcctgggcacactgcatcccttgtccaggtggctaccctggccctttccacagattcacatcccattccatcatttaagaccagtgatagttgtacccttattaaaccttcactgattaccacaggtcaaggaaaccttcttttggacttcctctaaccacatgttgtctaaactggatcactgcctcccaggttcaagtgattctcctgcctcagcctcccgagtagctgggattacagacatgcaccaccacacccggctaatttttgtatttttaattgagacgggttttcaccatgtcggtcaagctggtcttgaactcctgacttcaggtgatccgcccaccttgcctcccaaagtgctgggataacaggcataaaccaccatgctcggcctgctttatgtggcattttaatagtttcgtacgcactgataagagggttggactagatcaggggtcagcatacaacagcctgtaggccaaatccagcccttctcacatttttgtatggcagtaagctgtgaaaggtttttatattttttagtggttgcaaaaagtacttcatgacatgtgaaaaatgttaagttcaaatttcagtatgtgcactaccttcgttc

SEQ ID NO: 916640 - DNA, 4001 bp, Homo sapiens
attcagaatttctgatttttcagaattctgatttttaaaaaagaatataacaggctgggcatggtggctcatgcctgtaatcccagcactttgggaggccgaggtgggaggatcacctaaggttgggagttcaagaccagcctgaccgacatggagaaaccccgtctctactaaaaatacaaaattagctgggcataatggcgcgtgcctgtaatcccagctactcgggaggctgaggcaggagaattgcttgaacccgggaggcggaggttgcagtgagccgagattgcaccattgcactccagcctgggcaacaagagcgaaactccgtctcaaggaaaaagaaaaaagaaaagaaggaaaaagaatgtaactccagtctaatcatgagaaaaccttcagagaagtctcaattgagggaccttctaccaaacccctgaccaggacgcctcaaacactcatgatcatcaaaacaagtctgagaaattgtcacagccaaaacatgcctacggaggcatgaagactacttgtcatgtgggaccctagaacagaacagcaggtaaaagctgaggaaatctcaatgaaacatgaaccttagttaacagtaatgtattataaactaatataataactataattaatctatattattttggctcattaattttgatatatacaccatgcttagtgtatgatgctaataatagaggaaataaggttaacaaaagataaaaatctaatataaagtacctaacgcaaccacagtagtataattctgtgccccctttctcaaagtactgagtataatgaggagttaggactgggaaaaccatccttgccgctagagcagtcctggccgacagaaacagaatgccagcaacatgtgaaattatacattttctaatagcaacattaaaaagaaacaggtgaatttcgatcatacttttaattcaatatgctaaaaatactatttcaacacataactaatgttaaaaacctgcactactttttttttttttcctttgagacaggctctgttgctcaggctggagtgaagtggcgggatctcggctcacactgtgcagcctgggacccctggactcaagggatcctcctacctcagcctcccgagtagctgggaccacaggcgcgcgccacctcgctcggccaattttttttgtattttttgtagagatgggggtctcactatgttgcccaggctggtttcaaatttctcaagcgatcctccggcctcagcctcccaaacgctgggattacaggcctgagctaccgcacccggccctgcttgcgttaagtttaaattgacgtaaactaagcattcccttcaggaatcacacgagccatatttcaaacgctcaataaccgcacgcagctcgcgggcgcgctcctgcaaacgcccctgaaggaggcccggcttccacctcagcctcgccccggcccgcgctccggcgatggcacccagggcggactcgcaggggcggggagaagggcgaggacgcgacggagctcggccacagaagccggcgggaagggtcagccgcccccggaaccctccgcgcagagcggccccggaaagcggctcctccgctggggaaagcagacggcgaccccagatcccgacccgatcgcaaccttaaacctggtcccgatctcgatcccaacggtaacacctgccctgacccccatcccgaccccggccccaaacagccccgcgcgcacctgtcccagttggggtcccagacaccggggcccggccgcgcgccccccgcccaggccggcggctcagccgggcgtggctccgcgtccccgcctgcgcgcggcttccctaccgccacggccgagaagagcacggcggccgagcccccggccagcccgcaggccgccagctgcagcgcctgccggaacgccatgccgcttgctcccgcgccggcccgcgcaggcgcccacggccccgacggcgctccgcgaggaacacgcttcccccggctgccgcttccgggcggcgggggcggaagtcccgcctcctggggcgcggcaggacgcggggcagccttgcgcgaaggggcgttttcgtggagccacctgccgcgccacgctccagtcccgtcacttgtgctcgcgagcgccggtgcgcgcaggtgcgggcggggttgtggggacgccgggagggcggcgcggtactttccagaaggttccgcaccggaagcgcctgccgaggccggaggctgggtgcaggggcggagacgcggagaacttgggatcctggtttaagggagctgggaagctgccgcaggtttgtttaaacgatatttttttggtggcggaacacgaagtaaagttttccgtcggcgcagttcctgcgtgtgctgttcaagcggcctgaagtgcgttcaggttcggccgggctgtccctcctcctggtcccgacccctcaaaccccgggccgaacaccgccctctcctgcgggacagtctttctatggccggcgcgtttcgcctagcagggtcctcagagggaccgcgttagagcctgggtttccttccagggggaccagcgctccctgggtggaccgaccccaccgcttacccattgctggacgcctgcgtgcaccgaccccaccgcttacccattgctggacgcttgccctgttgccatctcctcgctagcgtgaacagtgctgcgtgcagatctctctttcattgattgttttgcgtctgtacccagaagtgggattgctggaccatctctgcccattttaaaattgggaaatgacatgatctgatttaagctatttaaaaatcacttgggcctgggctcggtggctcacgcgtgtaatcacaacactttgggaagccgagacaggcggatcacctgaggtcagaagtttgagaccagcctggccaacatggtgaaacccggtctctactaaaaatacaaaaattagccgggcacggtggctccagcctgtaataccagctactcaggaggctgaggcaggagagttgcttgaacccaggaagcggaggttgcagtgagctgagattgcctcactgcactccagcctgggcaacagagtgaaacaatgtctcaaaaaaataaaaataaaaaaactgaatggttccacagaaatactgagacttctgcttaaacaggctttcttgaacctgtacgcttccagttgggtctgctgcttccaggtcatttactaaaaatgataggaagatttaaaaaataaaaataaaaggaaggccgggcgtggtggctcacgcctgtaatcccagcactttgggaggcctaggtgagcggatcacgaggtcaggagctcgagaccatcctggctaacacggtgaaaacccgtctctactaataatacaaaaaaaaaaaaaaaaaatagggcatggtggcgggtgcttgtagtcccagctactagggaggctgaggcaggagaatgccgtgaacccgggaggcggagcttgcagtgagccgagatcgcgccactgcactccagactgggcgacagagcgagactctgtctcaaaaaaataaaggaaaattgggccgggcgcagtgcctcacgcctgtaatcccagcactttgggaggctgaggtgggcggatcacgaggttaggagatcaagaccagcctgaccaacatggtgaaaccccgtctttactgaaatacaaaaaagcctggcgtggtggtgcgcgcctgtagtccctgctactcgagagcctaaggccggataatcgcttgaacctgggaggcagaggttgcagtgagccaggatggtgccactgcactccagcctgggtgacagagactctgtctcaaaaaaaagaaaatcagccaggctcagtggctcatgcctgtaatcccagcactttgggaggccgaggcgggcagatcacctgagatcaggagtttgagaccagcctggccaacatggtgaaaccccatctctactaaaaatacaaaaatta

SEQ ID NO: 916641 - DNA, 4001 bp, Homo sapiens
agcacagctgaaatgcaccctcacccactgtgaagccttgaactgcaaaccccgtcaccagcagagctgactactctttccccctctgtactctgtgcaacctctaacgtgggcgctttcgtgctgtaccgtaatcatgtctcctgtaaggacttgggggacaagaattgtgtttaatgaatcttttattcccagggcccagtctagtaaatgaataagcgacctgcactaggtatagcacaaagaagtacattacaggttacaggtgagctacctgacccagggtgtatatgtgtgcgtgggtggggaggaggaagaggtctggggaactcaaaggcacggcttttatgtatggtctagaaggagagaacaggtgaactagtcaagcttagggacaaacttctccagaacagagtgtactagtggatgtaactgtagatatagtaagtcaagcagttagaaaaaaaaggctttaaaacaaagctttgatctaggcagtgaacaagacgagggacaaacaatactcttattgaatacacgtcagggaggagacagtaaaaagcacgcaaacacagtgtgttcagaatttgctgctttgaccccaggaggcaggtatttttgttacagctcttgcagatgtggaaagaggcctaaaggcctgacactaccatattcccctggggtttcttgccagctaccttgatcatcccacctgccatgtgattaccaagtgctcagacctacctttggagcctgtaggggaggagatttttcgaggtctggcccgaatgtcatagataatggggtactggaaccaagggatcctggagaggacagggataggtattaagaggccacagtttcggccgggcgcggtggctcacgcctgtaatcccagcactttgggaggccgaggcgggcggatcatttgaggtcaggagttcgagaccagcttgatctacatagtgaaaccccgtctctactaaaatacaaaaattagccgggcgtggtggcgggcgcctgtaatcccagctactcgtgaggctgaggcaggagaatcgcttgaaatcaggaggcggaggttgcagtgagccgagatcgcgccactgcactccagcctgggcgacagagcaagactccctctccaaaaaaaaaaaaagaaaaggccgcagtttcactagccttgcccggtttcccctcaccacgcgttttttggcctgctcctctccacgaccacagacaaggagagattctcttgtccctctggaaaacaacagtttgtatgctgctggaggttctcgcagcacccactatcctaggggcagggatgaggagggtgggaaaagagcagcgttgaatcctgttgcacgtccgactatagccactgctgggtcggcgtcaagggtgaaaggtcagggtcagcaggctctgcccgccattacctgaagtgaaggccctcggccaggatagtgtcctgctgcactccaccgatccgattgaagaagatggctctgtgcccgccttccactgtggggagatgggtggtgatcaggccaggccgctgctcagaggaaatgctaggcccgtggaggggcgcggggacagggcaaggggtttgggggagggactggaagcgtccggcgagcaggcggaggttgctcaccggtgaacacagattcgcgcacaccgtaggccacggcgccggcccccagcaacagcttcagggccgtgcccatgccccggggcccggcgggcagccgtcccgccaagtccttcaagttctgggccatgtctgatcttgaggccggcggcactggaggtcagaagggggtgccggcccgcctctaccccgctccggcttaggtactgcacccttcacacgagggttcgggcccgtaaggctggcgaaagaaagggcagcggaagtgcgctccctttgaaaccctcccccttagcccactacggacccgaacttcgcgcacaggaatcgcgcatacggaagtcccgcccctttctggaaggctgccctcccagggagggcagcgcaagacagcaagtcatctccatttcctggcccactttcaaaatggcagccggaaggaaatttgtgattagaagccgcgctgttcttatttaagagcgttagcgcaacttccggtattgttgcaagatggccgcgcccagtgatggattcaagcctcgtgaacgaagcggtggggagcaggcacaggactgggatgctctgccacccaagcggccccgactaggggcaggaaacaagatcggaggccgtaggcttattgtggtgctggaaggggccagtctggagacagtcaaggtagtttgggacaggaagtggagaagtagtaaatcgataggttgggactccgtggaatgagggtaaggggcccagagtggatgtagaaagcagagaggggtgaaagatgcttttgaaggaaggtggcttggttggctttgcgttgatttgacatcctgggatggtagtactcatttttctttctttttttttttttttttgagacggagtctcgctctgtcgcccaggctggagtgcagttgcgcgacctcggctcactgcaacttctgcctcccgccttcaaacagttctcctgactcagcctctggagtagctgggactacaggcaggtgccaccacgcccggctaatttttttgtatttttagttcagatggggtttcaccatgttggccacgctggtctcgaactcctgacctcaagtgatccgcccgcctcggcctcccaaagtgttgggattagaggcgtgagccactgtgcccggccggtagtactcattttcttttgctctttttgaatgatattctagccctcacctccttgcttccaattggtttaccaggattctgtggtatagtagtctaagcagaggaaagtttcgttccttgcgtcattccacatcccaagacaagttactgggcagatgagaaacgtagttatgtagcctagtctgcccacactttttgtaagggcttcgtgtttcaattcattagtatccatagtcacctctctctaatatccacctatgatacactgtccagacctggttattatttaaaacttttacatctgcatttttatctatcattcatctctttccccacatgtaatagaaccagcagttctctatcttaaagccttgggcagtgttcttcctcctcctttctcttacccgttagaactaattgaataggcccagaagaaatcgcattggtttagaagtcaggccaggattttaatcttcgttctaaatacacttttttttttttttttttttgagatggagtctcagtctctaccaggctggagtgcagtggcacgatcttggctcactgcagcctccgcctcccgggttcaatcgattctcctgcctcagcctccagagtagctgggattacaggcctgcgcctgtaatctattaaaagaatagaaaacatgattatatcctactaatgggttgaaactgtattattcattcaagaaggtttttttcttctataactaagggtgtctcatggacttagttcttggtcatttgttctttgtgctctctgtgacattacttcaactattcaatttcaaaatctacatcccttttttcgcagactttttggagccatatatctcaagaatgttgctagacatatacattccagtgatacataaaaacttaaccttccaaaacttgtatttgtatataacagtttgtttttagactttttactgaccaccctaatgctccttgggactccaaattgcaacttggaattatttcttttagctgctacagatgtagtccacttctttaacatcaaacttctgatgtcttttccagtgtacagagagttgttaggatagtgtctgtcagtcattcccatcctgccctgcttactccagaattatttttggctttgtgcttgatacattaggattctgtggtttaca

SEQ ID NO: 916642 - DNA, 4001 bp, Homo sapiens
acacaatgaaaatcttcaagaaagtaagatgcaactttataatctactaacatgtcagaatttacccactggggactacacttacatttgcaaaaagacacatatgaaaacactgctaagaaccaagcaaagaggcaggagatgagaagaagaaatattcttccaaagcagcactaaatgacaataaggtttttactcattctttttttttgtttttctcttttgttaagctacacactattttctctacttctgaggcactgggccactagaaatatcaggtcaccaaaatattatctggcttaagaatataaacatcaaaccagaatttctgctaagtgttgtcaacagtttcattagggtgaatggactggtcttagggattgcatccaaaacaaacaaacaagcaaagtatcaaactgcttggccttggcaataaagctgaggatatttcttattatctcattcccagtatcatccaatcacactattatccccccccagtctttagtttcatttaggactagcaaatgtcactgcaaacatgtatattacccaaaaagtacataggaaaaatcatatcagcttcaactagtctaccttctccccacatcttttgccaaaatatcaaagcactaaacagatacagacccatgaatcctcattatcagcatgtgaagaaaaaaagtgggtaaggattagaggcagcacggcacagttttatagattactggatttagttcactggactcagagacacgagacccctttgctaggtatagagaacataattcctacattcacatgtgaaaatacaaaccgtatgacccctcgtcttcccaaacctgaattctgattaataattttttttggattgtgaactagaaataaaaatgtaaagggaccaacttaaaagtctcaataaaatcaagggaaactgccaccaaaaccaggattcctggatcccgggcacataaatgtattcatttgtgatcaacattatgactacaagattaaatataaaaaatggagacaacaaacagtttgggcagcaccaggtatcaaaattttccaaattaaactggaagacagtgagaagctgatccacagatgcccccagagtagctaagccatggtcatcttaaaaggtagcatgtgggcatacatggggttgggtaggcgcacagacctaccgaagggagttagaatgggacattgaggtggacttagcattgggccgagagttggagaaagtcaatatccctaagcacgaaactcttatcatgcagaaaggatgggacataggaagggggacgggagaagggggtggttcagggaagactgtgccaaagacacggtaataatcaagagaacagggagtagacgcccaagggtcctcgttctatatagaaccttgatgaaaatgatgtttcaaagagaaatcaaatacactgggggaagggggtggatccagtggtgcgccgggaatgaactgacccaagtgagctgggacatgtgcatacagagagcagaggcagaagtcaaggaactggaggctgaggaacccagcggaccacgaaagcagggagataactagacagcatgctcggctggaaggaccaaagtcagagaaggaaaaatgaataagaaaatgagcagtcagaggcagctagggtgacggacagacagcatgaagcgcagcagaatgaatagccagaagactcggacaggcagagccgaaggaccgcagagctcagcgccggaggtaggcagggaaagcaactgggggaggtacctggggcgttacacagatggaggtggctgaggatacatccccgcgcagccaagcccccagaggtcctgcccctccccggccctcggtcgcccggttaccttctcgcctggctgtgcacccaagtcttccccgggggcgtccacctcatgtgccggggtccccagtcgccaggctgggctgggggctcgctcggcctccgcggcgggctcccctcgcctcctccccttcctggaggggcgggggcgccgagggcggggtgggaggcgcccggcgcgaccgcggctccccgcccctcccgccgctccgggtgcgggcccggccgcggctcagccaggcctccggggctcgctccgggcctgtcacttcctgcccggccgagaaggtgggggccgcaggccaggggctgcgggccgggctggaggagggggctgcggggaggtgcttccggggcagccggaccccccccccgccgtccctccgcctcccctcggcgccctccgccccctccctcccgcgcgtccctcgtttcctgccggcgcccgttgccatggcgacgcagctcccgggcctctgcgctccaggcccaggggttttttcctctcttgctctctttctcctcttttttacccccttctttctctccgagttctgctcgccggttggaaggacgaaactaagaaagtgctggcctctagtggggaacgcacctctcggagaggagagggagatgggagaagggagggaagtgacgtgagacggggagaaagaaggtattttctggagctgctgggaataaggggtagaaagaaaggatcaaagggaccaacagacagagagggagaaagagcaaagcaacgacccctagagaaacgatagactgggaaaagaaatgaagcaaaggaaaggaaggaaaaggcgagaaaaactttgagaatgagagaaaggagagagaaggttgattgtttaatccctcacctcaactccaagaaggcgggaaagaatgctgcagaaacagctaacccattaggagttgacttcattttcaaagcagcaacctaatgtaacttcctttggatagcatttaagtttgtcatttcagggatttgtgtgtgcttcgatttcaatatgtatatgagttcgaatgacaaaaacgggaaaaggccagagtataacgagatgtagaacaatggggctgtctctgggaacactaaacatttgataggggagccgttgtcgttgtatttatgatatcaacttaccggtttttaattactctctcatcgttcaacattcaataaatatttatagagcgtctactatgtgctaaaccgtggaagcttggattgcatcagtgcacgaaacaaagataactgccttactgccttcattaacctttacagaagggtctgggggatgcctcgtggattaacaactgggattgatgccttttctcttgctctcagtcttttcctaacctctatcctaaacagttattttctctgtcaatccactcttccttttctcctttaaaagcccatgcatggtttgtttatagagaaaaaaacagaagtgttatctttgcttataaattatatccatttagattttgctttgagagaggagtatttggactccaaggtctttcatttgtggcagccagattaaaatcggagaacaatttctgccaggcttctaggaactagtcagacaggtatgtgagggaagaaaccggagggcagccaaaggactggaaaagcgaagacacggggtatgaggaggtgaaagggtgtgttaccaggccgtggatgacaggcactggctgaggatgatttgaaaagattctgactggtagaactagtggtgaaaacgaggtaaagcattcgttgtttaattcacacctggatttttggcatgtcaaagcagttaaagctttcttgcagaagtttagaaatggatatcgattgagcctaggcggaattttctagcaccaatggaaaaaaaaagcatctatagataattttcagattatacaacattaaagttaagaaacatgactcatgtgcttccttagtttccctgggagaattatcactgttaagtgtctaaagaagatttgtaagctataacaagaataaggaatgcagatatcagagggtatggacttgtttttctatagcctatggaacttgtgtaccaagagggtaca

SEQ ID NO: 916643 - DNA, 4001 bp, Homo sapiens
caagcatttaaaaaaaaactaataaataatcataaatcaaaatacattaaaataaaattacagtacatcatcgctcctagaaaattcaccatacaagacgatcctttcaaaggttcataaataaaagtcttcttgactcgaaatcgtttcctgcatcgtgatgaaaagtatgcagaaaactaagaagaatcgcaagttttcagtagggtgatgtccaaactacttgatctggtgcggggcggagagactgttttgcttttgatccaagtgaagacaatagaaatgtgctcgtcccacttcctcaagtcctcaaaacctggaaagaaatgacaccgagtgaagtaggtggctaagaaccctccgagaccagttctgttcgggccagtccgcctgacaaagcgggctcagaaagacaccgtggtgtttccctcaactgcccaaacatatagtcaagtggggctgggggacgcaccacgggacaaggacggtcgtgatgggcgcgggcgcgggcgcggtccgcgaggccccctgcctggcccggatctccccagcctcccctctctgcccagctctcctggccccagcttgtttctgtttcttccattgccccagaaacttggtatgagttttgatttctccatacaggagccgaacctgtgaacaagcttcctactcctcccaactcactacccccgagacccactcctcgggagcgcgagtgccgggaccttaccttgtcttgcccgggagctgcccctttcaggcagagttggaggtgctgcggagaagccggtgcccgtgcggctgcgagtgcggctgtgggtgtgggtgcggtatttggtgcggatgcgggtgcgggtgagggtgtgggtgcgagtgaggatgagagtgtggatgtggatgtggatgcggatacgggtggagctgctggggctgaggcttgggttggggctgaggctggggttgtgattggggctggggttgcggctgaggctgaggctggggttggggctggagctgcggctgcggctgcggctgcgaggggggctgctgctggaccaggtgctgctgcttctgccgcgtggatttgaccgccaggatggcctgacgattcttgtactgcaccatctgcagcgtgatctcggcgttccagccctggtcttgcgggcaccgaaagtcgatctccttgccctctgccatcaccacagtgaagtacatgtacttgcccttgcgctccacacagtccacggtcttcatgttggagaagtgcagttccttgagcttgaccggcggctcgaggctggcgacagcggggccactgggttgggacggctcggccggcccctgcccgggctgttgttgctgctgctgctgctgctgttgctgctgctgctgctggtgttgcagctgcttgggcgggataagcagcagcccttcctcggtgaggatgcaacactttttcttccagagctgcaacaacccgtcgctgcgcttctccagcacgccctccttcagcgctttgcagccgctactctccagcatcctcccagcataagaggggccgccgcttggctcggcctctccgtttccagccgcgcgggccgggggcagcagcagcagcctcgcgccgtcctcgccccagcggctcccacggccgcctgcccggagcgcgcagaggaggctaacacgcaggaggcagagcggcggcggcggctctgggtcccggcagagggacagccgcgtcctgatgcgccacaaggtcccggagctccgagctgccgggcctctgccgtcctcttgcgagcgctcactgaagggcactggccgggccccctcgcggcgcttttgaatgggccatcttccccacccccgagtgacacccagcggaaaaggcggctcctggcgcccgcaccgcgggggaaagcccagctccaagaggcgctcggcagccggcgcacgcctcattaacttggggcctttccaaagcccgctgcgtccacgccctccagcgtctcttgctccgcctctcgccgcccacttgcttccgcgctcgttcccctggaaggcgacccggacccgagccccggaaactcctctcctctacccagggcgatcgcccaaggagccctggctgcctgactactgccgacgctcacagggcgctgcgaggccatcccccgcgtcccgcttctccccggcccgcgggactctctgctaacagcctcagaaagtgaggacgggggcgcggaggcgggggcagcctccaggcagtgctgcctctcggttcttgggaattagcccgggggattcgcgctgggctccgagagcccgcagaaccagcgtcgtgtcctgggcgagctgggaggccggggccgagtcccgcgagtcccgcgagtgtgcctcccccggacgcctaggtaaacaactgagcgcacagaggccgagaggacatcgtgtcttcccacgcatattcgctcacggtcactaagtagctcttcttggaaagagggcgattgttaaagcaatagtgcgactgtcgggcttgccacgggtggagagaggcggacccacgtcaggtcgcatctcgcctgcttttctcgaccccgaccgcaggcgctaacccgtcttcggctttcttcttgacccgtacggtttgcaacgtctcttaaaacagtaactcaactctctacaaaccggggtaatatccggtgctgagatcccacactgcaaggcgcagttccaaacgtctggtcggcctcgcaggtccctctttccaaggcctagccagatcttggttttggaatctcatttatctgtgacctggggaatgcaatacccccagctccctcctactcctacatttaaacaatgcctatagaagccgcttcctgggaagtaaggcataaccgagacctagcctcccggtagggaagttcatccgtttagtaaacagccccaactacgtgcggaccctcacggggatacgaagaattcaaccagggctggacaagtcagagtgggccaaggtaagagttacggctgctactgtgcccacgttggaacagatagattagttcatctgctagttgtgtggcaagagcaaagaattcaagaggggaagagaaagtgagaggagcttagagagctaagcaagaatcgaatcctttgtgtgtcatggtaagaaattcgaacttaataccaaggtagtcagaacaaaggacaacttttatacacgagggcgtcctgaatattcatctaagaaacaatgtctgatcaaacgggacaatccagccagcaatcctgagtcccaccggattatgcttggccagctttctagccttcacattgttaatttattagcaatcttttcaggagaaaggcaattattaaaattatgtggacttctagtaaaattatctcgaagatttacaattatgtataccaataacaaaaaaactacatgttttctgctcccctgcctttgtaggacaagtgagcattccagagaatttctacatgaccagctgttcattcttttaagaggatgacattcttcagctcatctggaaaggatacttcctttaagtctgttattcacagtctccaagggcaggtgtagttgggaaagacatttcatatggaaaaacaaacttgatagggtaaaaaaaaaaaaaatgagatgtaatctggaggcccaagtcattttcttaggagaaactcaaatgtgtttggtgttatctaaccttctgcagtttatcagtctgaaacaaatgcattctattctcatttgaaaatgtctgaacagccaccaattttcaaaatcacccatttaactagagactttaaagcccagaatttgcagttacgtatttcagaatgatttagtaattttgtgagcagctcagaggttaagtctacaatgtctgactacggtgcattattgaaaatatcagtagtgtaaggatcccgtagattggtgataactttgctcttgttatttc

SEQ ID NO: 916644 - DNA, 4001 bp, Homo sapiens
agagaaagggtgtgttctcagagctgagggtggtggatccaggaggggcaggctccccagagggagtgaagataggatacccgtttcctgtggattctgggtctaaatctgcccaatgggccagacgcagtggctcacgcctgtaatcctagcactttgggaagccaaggcgggtggatcacctgagatcaggagttcgagactagcttggccaacatagtgaaaccccgtgtctactaaaaatacaaaaattagccgggggtagtggtgggcgcctgcaatcccagctattcagagggctgaggcagaagaatcccttgaacctgggaggcggaggttgcagtgagctgagatcacaccattgcactccagtctgggcaacaagagcgagactccgactcaaaaaataaaataaataaatctgcccattgaatcttcccagagaacaacaagggaacaagatgggaaagtcacgggaagggcgtggggaagcaggcagtgggagagatgggaaggggtgaagggctgggagatggaaggctggttaagagtgagagaggagaaatgtgaagaggaagctggcctggagtgcagggtgagagagagcaggcagtcctgaaaaagagagaactgggaagagaggaggagagtgggtacagaagactcgaactgtggaggatgccgaagggaggaaaggatgagagaaaaggtcagggaggggaaacggagaggatgaaggggtcacaggtgcaggggaagaaggggcaggaggagaaggagagagcggtccaggcaggacagccagaggagtggagagtaaggggatgggagaaaaggggggaaagcccaggatggggagaaaggaagtggggaaggagagaacataaatgcttaaggaaaaatgacacgaggaacgggctgggaagcagaggcgggagcagcaaagatggaggagttcggaattgctcccccaaatgtaaagggatgtggagataccgaaagacatagggatgggggcatggtgggaagaagggagagagaggggaaaggaagaaagctagagggagggagcgaggcgtgtagagcgaaccagtgaagcggagaagggctcccagggcgcatctgtggccagctgactctaggactatcgcccctccgcctgtgcatccccacccccagccagcgccaacccagtccctgggccccgcacagcttcagccgccccctccaggaagcccgcagtccccgggctggcgcgccacccccacccctctcccagcttctcaccgacctgttgtgcgcaggagacgagctgggggtggggcaggagcctcggggtgcgggagccgggccccagccccagcgtggcccccatcccacccatcccgcaggcccgcactccccgcacagggctggagagcggcgagagtggggggagacgaggaaaaggaggtcggcgaagggaccccgaggcagggagtgccgagagcggactggggacccgaagcaggagactgcgcggagccgcccgccgagccgaggcgggatggaggcagccgcggggacggggacggctgcgccagggagggcgggagcgagccaggaccgcggagggatggagagcccttcggggaaggggcgctgggaggctggaggccttgtcccgggcgagggaccgcgtcgggaggggcaggaggcgcagggcgcggagccgggaagggcagggccgggctccccgcgggtgggggcgtgggggtccctctcactcacctgcatgcttggcgcggcggcgcgacgactgcgggcgctcgggactgagcggggctggggggtcgcaggagcgggcggggtgcggggcatggtggggaggtttggcccgcggcagggcgctggagcgggtggggggcgggcgcctggggcgcggggcggcggcggtgggagatgctcgcctcggctcggctcggctcggctcggctgggctcggcgcggcggctgggaccgctccgtctccgtctccgcctcccccccgcgccggaggccacgcacggtttaaccctcctgctgccgcgctgcaggagtcaagccaggctatgtcccaggtggagggctgaagaggctggcagggtccagcgaccgtccgcttccctgggttctgatggcagtctccccacctccttcaccccaactccagggacacccatggtcgcctcagtcagtttctgagattctgagtcactcaatgctctgcattcccaactttgttcttttgtattgtgttttgtagagatgaggtctcgctgtgttgcccagcccggtctcgaacgcctgggctcaagcgatccttcccgctcagcttcccggagtgctgggattacaggcgtgagtcaccactgcctgtcccccaacttggttttgcccgctgtagaaagtgcctgaggtcaaggctgggggcaaggggtggaggaaaggactggggaggaaggaccttgcaccatctttggattatccccacagcttgatcccctatttcactctggccctgctaccatgcattaagtggatcacgtcgaaattcctgggcttttccagcactggaatacctagactccgtgctgtgacttacaagaccctatataacctggctcttaggtggctctctgattgcctttcctaaagatttctatgcttcagccacatgggacctggtggatttcctggttggagacaggtttaacctgcctcagggcctttgcacttgctgttccctcagtaatacatttccctggcttttcacaatgacttactgttttcattccagtctcacttagatccaacgccttctgggaggccttccctaatgtctctatcaaaagtagcctctcctgccccttctcccaccacctggatcccatccctctctaccacactacgctgtttttcctcagggcacttccaggacaccacactctcctcatttccctccaacctcactgactgttcttagtcttcctcgggtgacctctaaatgttggagcctcctagggcttagtccttggccattctctctttccacattctctgtccagtgatctcatccggtcccagggcttaaatactatgtaaatgtcagtgagtcctaaatttatatccagagcgccagactcatttatccgacagcctacttgacatctccacttggatgtctaatagccatgcaaagctaacttgactaaaatagatgtcttgaattcccccacccccaatccatttttctcccagtgatccccatcctgaggcttcacaactactagttgttcaggctaaaaatctaggaaacatccctcccttcccctttttttcactgattctctccctgtatctaattcaccaacaagtcctgtgggctctgcgtccaaaatatatcccgaattcatctccttctatctttattgctatagtcttggtctaagccatcatgtctcatccagattatcataatagcttcctcactggtccctgcttctgcccttgtctttacaaactagtttttcctatattgataatattttaaaaatcaaaagcatgtcatgctcttctctgcttaaaatattcgagtggtttttcattacacttggaataaatctgaactccttgtaaggagaagcccaccagcctgtacccacctcatacacagtgctcctgctggatcagactacttgctgttctgtaacatcagaagtcattctcttagcatccctgcactttttttttttctcgagacagtgtgtctctctgttgcccaggctggagtgcaatggcacgatctcagtttactgcaacctccgcctcccagggtcaagcaattctcctgcctcagcttcccaagtagctagcgtgtgcatgcaggggggcccttccagccttcccagccctcccacccctctggcagtgcccactagtgccctgctaatttttgtattttttgtagagacagggtttca

SEQ ID NO: 916645 - DNA, 4001 bp, Homo sapiens
aaccttgtgattccttgagcacctaccgctagggagggagtctgagggtagggggagggatggggaagtcaatctgagcaagccagtgagtgtgtgtacgtgcaggggggcccttccagccctcccagccctcccacccctctggcagtgccaggcatttgtcttatgattagccccaggagtctgcatcttcaggagaaaggaatgaagagctggagggatggaaggaaagagacagaaagagagaggtgagtgggagaaaaactacagaatataatttttgctcttaatgtttaatcatccaagtgcataggtgccctctgaagggaggtggagtcaggaagaaaccaccccctcaaatgtggctctcctgggtaaagaatcctgggaaaatcgggatggttggttttgaaagagaaagggtgtgttctcagagctgagggtggtggatccaggaggggcaggctccccagagggagtgaagataggatacccgtttcctgtggattctgggtctaaatctgcccaatgggccagacgcagtggctcacgcctgtaatcctagcactttgggaagccaaggcgggtggatcacctgagatcaggagttcgagactagcttggccaacatagtgaaaccccgtgtctactaaaaatacaaaaattagccgggggtagtggtgggcgcctgcaatcccagctattcagagggctgaggcagaagaatcccttgaacctgggaggcggaggttgcagtgagctgagatcacaccattgcactccagtctgggcaacaagagcgagactccgactcaaaaaataaaataaataaatctgcccattgaatcttcccagagaacaacaagggaacaagatgggaaagtcacgggaagggcgtggggaagcaggcagtgggagagatgggaaggggtgaagggctgggagatggaaggctggttaagagtgagagaggagaaatgtgaagaggaagctggcctggagtgcagggtgagagagagcaggcagtcctgaaaaagagagaactgggaagagaggaggagagtgggtacagaagactcgaactgtggaggatgccgaagggaggaaaggatgagagaaaaggtcagggaggggaaacggagaggatgaaggggtcacaggtgcaggggaagaaggggcaggaggagaaggagagagcggtccaggcaggacagccagaggagtggagagtaaggggatgggagaaaaggggggaaagcccaggatggggagaaaggaagtggggaaggagagaacataaatgcttaaggaaaaatgacacgaggaacgggctgggaagcagaggcgggagcagcaaagatggaggagttcggaattgctcccccaaatgtaaagggatgtggagataccgaaagacatagggatgggggcatggtgggaagaagggagagagaggggaaaggaagaaagctagagggagggagcgaggcgtgtagagcgaaccagtgaagcggagaagggctcccagggcgcatctgtggccagctgactctaggactatcgcccctccgcctgtgcatccccacccccagccagcgccaacccagtccctgggccccgcacagcttcagccgccccctccaggaagcccgcagtccccgggctggcgcgccacccccacccctctcccagcttctcaccgacctgttgtgcgcaggagacgagctgggggtggggcaggagcctcggggtgcgggagccgggccccagccccagcgtggcccccatcccacccatcccgcaggcccgcactccccgcacagggctggagagcggcgagagtggggggagacgaggaaaaggaggtcggcgaagggaccccgaggcagggagtgccgagagcggactggggacccgaagcaggagactgcgcggagccgcccgccgagccgaggcgggatggaggcagccgcggggacggggacggctgcgccagggagggcgggagcgagccaggaccgcggagggatggagagcccttcggggaaggggcgctgggaggctggaggccttgtcccgggcgagggaccgcgtcgggaggggcaggaggcgcagggcgcggagccgggaagggcagggccgggctccccgcgggtgggggcgtgggggtccctctcactcacctgcatgcttggcgcggcggcgcgacgactgcgggcgctcgggactgagcggggctggggggtcgcaggagcgggcggggtgcggggcatggtggggaggtttggcccgcggcagggcgctggagcgggtggggggcgggcgcctggggcgcggggcggcggcggtgggagatgctcgcctcggctcggctcggctcggctcggctgggctcggcgcggcggctgggaccgctccgtctccgtctccgcctcccccccgcgccggaggccacgcacggtttaaccctcctgctgccgcgctgcaggagtcaagccaggctatgtcccaggtggagggctgaagaggctggcagggtccagcgaccgtccgcttccctgggttctgatggcagtctccccacctccttcaccccaactccagggacacccatggtcgcctcagtcagtttctgagattctgagtcactcaatgctctgcattcccaactttgttcttttgtattgtgttttgtagagatgaggtctcgctgtgttgcccagcccggtctcgaacgcctgggctcaagcgatccttcccgctcagcttcccggagtgctgggattacaggcgtgagtcaccactgcctgtcccccaacttggttttgcccgctgtagaaagtgcctgaggtcaaggctgggggcaaggggtggaggaaaggactggggaggaaggaccttgcaccatctttggattatccccacagcttgatcccctatttcactctggccctgctaccatgcattaagtggatcacgtcgaaattcctgggcttttccagcactggaatacctagactccgtgctgtgacttacaagaccctatataacctggctcttaggtggctctctgattgcctttcctaaagatttctatgcttcagccacatgggacctggtggatttcctggttggagacaggtttaacctgcctcagggcctttgcacttgctgttccctcagtaatacatttccctggcttttcacaatgacttactgttttcattccagtctcacttagatccaacgccttctgggaggccttccctaatgtctctatcaaaagtagcctctcctgccccttctcccaccacctggatcccatccctctctaccacactacgctgtttttcctcagggcacttccaggacaccacactctcctcatttccctccaacctcactgactgttcttagtcttcctcgggtgacctctaaatgttggagcctcctagggcttagtccttggccattctctctttccacattctctgtccagtgatctcatccggtcccagggcttaaatactatgtaaatgtcagtgagtcctaaatttatatccagagcgccagactcatttatccgacagcctacttgacatctccacttggatgtctaatagccatgcaaagctaacttgactaaaatagatgtcttgaattcccccacccccaatccatttttctcccagtgatccccatcctgaggcttcacaactactagttgttcaggctaaaaatctaggaaacatccctcccttcccctttttttcactgattctctccctgtatctaattcaccaacaagtcctgtgggctctgcgtccaaaatatatcccgaattcatctccttctatctttattgctatagtcttggtctaagccatcatgtctcatccagattatcataatagcttcctcactggtccctgcttctgcccttgtctttacaaactagtttttcctatattgataatattttaaaaatcaaaagcatgtca

SEQ ID NO: 916646 - DNA, 4001 bp, Homo sapiens
tgctacaaggagaaactgatatagccacatttataatggaagtaatagtaatctcacatcatttgtagagtgatcagtcaaaaatatacaattaacaagcttaattcaatgaacatatataagatactgtatccagtattggaatttatacctttataaggacaagatggcttatgagaaatgatcatatatttggctaattttaatataattcaaagtcagtattgtacagactgttttctctgtccccaatgtagtcaaaatcagtaaaaataagataacttacagaactcatgtttttaaacttaaaaaacatttttaaataacttgcacagtgaaaaaccacaataaaattagaaaaactttgagataaaaaataaggttgccaagaaaaatacatatttttgcataagaaattcaaagatacacatcactcttattttatagctgaaaaactcttgaaaatatttcagccaacagaaaaataaatcataataatttaaaatgcaagagttttgtcataaaaggtctattgctaagaactgataacagttaaaatggatttatgcctaaacaatttaatcatattttgctatgattatctgtataacatttcatcagatcatacatttggaaaatagcaagaatttagttagaaatacaatacaatgcttttctagattggaaatgattacttcatcacgttttcttcctaagctctgagagaattgtaccatgttttgcttacttgaagagggcttcctcacgaccaaaatgattccagctcaggcagaagaaaaagtgaaatcatagccttggggttcacaatggcatcacaggatcttgcttatttaatgaatcagtgaagactcacctactatgaaccttttctataggaggtagaagttgtctttttttttttttttgtcagctcactcatggttagctattttcttatgctcactattttcttatgctcaattcacaaacttgctttttatctggttcagatggcagatagacatgcgtggagaataaataacatgtcatggaaagagcccttgagttggaataagaaaaccttgattaaaatccaagctcttaataacattattaatgacatgaggggtatgtgttctttaacctcgctctctgagtctgtttcctaagatgcaataattacattagctaatgcatttaaaaaggagatcactatgtacaagttatatattatgattagtttgaaagaatggggtatatcttatctctaactttaatcctaagcttcagaaatagaattgttcatcagacaagaacataagggggcaactgggacacacaataggttcacattggcctcagtgagctacgaataaagaggtaggcaaacagcagagacggaccgcagcacagagggaggaaatggaaatagaacagagcttctccctagcaggagttgcttctagtttggatcccatatgttaagaaattccaccttccatttaacaagaatttcctctgggagccatcatggggatgccgtctacaagctagtggcacgagattcaagacactaaaagtgtacactaagaaaaatctaccagtagacatgaatgaaataattagctcaaggctctgatgaaatggtatgttatcaaatgcaatctgtggtgtcagctagctggagagagagagaaagaaagaggcagagggaggggggaaagagagaaagaataagtttattcaggaaagatctatcttctggttgtagattttggggaatatttacaagctggatatctctgtttcaaaatatggcacaaactcactctgattttaaattcatctaccatttttgtatcacagtataattaaagagctattttgcctcaataatatatttgagtcgaaatatcatgctatgtagttaagtataggaagtttatttgttttagtttcttacctgacgcatatatcttcctgaaatgaaacacgatctcatttcttttcaagagtcaaatacgctcacacaagctaaaacacttctatttcaagggaacgtgatgcttccactggaagcttttattcctgtttggcaggttgggcgtgtttggaaatctattttccatcaaaccctgaagggttatatggaaaaaaaaagaaaaaaggtttgcattgacataatgaatagaggatttaagccaaaaacccaaccataaatgagcttctctgtgctaaacagaattcgggccaaagatactgatcagcaatatacaaacgaaaatatattttttaaaaatgtgtaaggtgggcatatttcccctcaaattacagctaaggttattatgcatttaaacgtggaggtggttggatgtggtgaaaccagtggtctcaatttgcaggagcagaggtgagcccttgaaaaaggtattctagccattctgtgagtttcacctatcgaggtattttctttatttaattagaatttaataagttcatttttttctaatttagaaagatattaatttttagtttagccttaggatgcatagtaaatttcaatttaaatatttttaataacatctgaaaaggaacagcaaaataaaacaatatttataagattagcaagtagatgtgggtggtttattgttttggtatactgctcttgaaattgaacaatgtgtggagactctgagacaacacaagaaattatataattaaatccaggtaaaataggatctgccagaagtaggcctgctttactgggagaaagttttaggaaataaaaataaattggattactcttgtttccaaaatatgtcgtaggatccttttgttgttgctgtttttttctcttcttttttcttctttttagatttatagtagttttctgtaagaatgatttcttacatggaagggtagagaagagaaagttgagaattatatcactttcagggctactcatggaaagatatttatagtattgaaggttcacaattgtacaacaccatcccctgacccttgtaccccttctgttctaaagctacaaaggtgtgagaggtcacagaaaaatgggagcttgacctagaagtggagggtgatgtcacacaggaaaacaatcatacctttatattttaataataacctgagctgcaattcttagctttggaactctggggagatagatgactttaaaaataactttacatgtagtgattttttccaaatacatttatgctaaacccttaaaaatctctttaaattaattcctaaaatgagccactatttaagaaaaatagtcccttcaaaaattgaaacattttggatctacaaatctcttaccacacattaaagtaggctcatacatttttcaggaggacttatgagagctggactgggttgaaaaggaacaatctaatcttgataaaactcaaagattaaggttagaacagtttgatagtcattattcattaacaagaaagggtacaaaaatgtaccttgtactttgtttcctttgaaaatatgttcttcaataatttatctttccttgcttaacatgtacgcttacctattttagtagcacttttaattaaaataaaatccagagaacaattaagcttcttctaaaatttacttttttcatggctatgtcctatgtctaaaatttaaacacacaaagccttctgtcttacctggtagtagtctactccgttttttaggcaaagtatttaagacagaatgatcaagcttcaacaatgaaatgcaaattttatttaaaaatcaatgtttacgtgcaagtttatttgatttcctgtctattatgttaacattaattaggttattttgtttatgcattttattgtaagagtcaaaattttaagttccatggtgaacagccttctaaaactttcttgcttgttacattaagaaatcaatgtcaaattatatataaccttctatttttttctaaataggcttatttccccccactctaaagcaaa

SEQ ID NO: 916647 - DNA, 4001 bp, Homo sapiens
gctcttcaagaacaagggctcattctagtcgtctgcatctttcaggtgtctaactagcacaatgtttggcacacagtgatcctgacatgtctattaattgaataaatgaatgccttgcctatccttactagatcattccacagaggctatgaactgcagtctaacctaaatcacacacactgcagtgcaaccaactcctcccgttctcagtagaaaaggaggacagaacatatccctccagattaaaaaaaaaaaaaaagccacttgagactcccagcctaaaattcagctatagctcctcctgccccctcctccccacctgctaagcaagctgaatcatcactaagacatatgttcaaggaatttctccattccaaacacttgaagtagatgtgtgttggcagagggtggggtgctggggctaaagtatatatacctagtgaagctgaggtaggtcttacatgtaactcccccaatccttaacaagggaaaaccctccctgttaagcatcccacagggaatggatgaatcacctggaaggtacatatgagaggcagccctacctccatcagccttccccataccaagtgccttccactgaatactcactaagagcttaccacccagagagccacaaatccaaaagagatccgactggccacaaacaacattcttaatttttggttaagaaattctttaccacaaattaaaaatgtgacaaaacgcgtattcttcctcacaacttccatctccacagcctagccatgactatattcaagaacgctgatttcgaaaatattccgtgtcacattcaagataactgcatttctcccactccagacctgacggaagatgggcaatggctgtgcttctttcagctgaggtatcctcaggaaaggggatggaggtctccttggcctcctcctgactcccagagcagtttcctgcttcaaaagttcaccaccatagtgacctcaggaacagagcccctcagccttctctttggtcaacaatcgccaccacctacaccaaacacgatcgctctagccagcgataaggatgcagttaagaccaaaggcatatatacataagtcctgagagtgtgcaacttctagctcagggtggggtagcttctctaaaatgctgtacctctggaagggaaaggaagggacaagcaggattagaaagcccaggaaacctggagcttccccgagacaaaaccaagattcaaaagccaaggaccggggctgggaagcaaggtggaaagcaaagtgaaagaaccttttcatccatctactcccctcggcccctcaccctccacctacactctcaccaacaaccacccgagaaaaagccactccccctaatgtcctccccgcttgcgcccggtcctggccagtccgcgtagcctgaggctgaagctagacatggcaggaaggagtcaaagcacagggagctggatttcacggggggaaggtggaactagagtggagcagtaaagaactgttggggagaaaaaagtccacagtcagaaaacctgctgggggaacacctggggttggtgggcagggaccaagacaacccgggggaggggagtggcactgcgtggggctccggaggctggagcctggaaacagggacgcctcggagccgaggggtttggacagggctgcgggggtctagggctggttctcaccgagtgggctacgccccacaggaacacacccaccagcgggtcggccgcccggaacaccttcaccttctgctgcacgaaatgcttcttcttggtcttggaggcgaagccgaaacctgggccggggcctgctgtcgccgccgataccgtggctggtgggaccgaggaggacgccatagtctcccgcgcaaccgaccaagtggaagccggagccggcagctatccaggcgcccgaccccggaagcggcgctcacctgcgctgctgtcacgtgaccggaggccggacagcggacgcgcgaacagggcgaggcaggacggggcggggcgacgctggccccgccccccggcgcctgcctgcctgccccaatgtccgctcagtgtgtgggctcacctggcgtgcgggatccctgtaagctgacgaagcaagcggcccgcgaggcccctcgaactgtcaactaggagaccgtggtgcggcctgggctggcctgattgactcccaaggtctagggcttctttgctgcaaagtggccgccttccggctttgcccagtttctaatgagtaacctcggacctgatgctaatgcgaaagcattcttaccgaatgggggttgggaaggggagggttttggaaacccaaaattcttaccagtggtctcaagcgtcttgaaattcattcattcatttaacaagtatttattgtgcacttagttgtactaggtcctgttctaggggctgattttccttttattgaagcagggtataggacagtgactgccccgaagtagttgggagtctaatggcactggctggccaatggagatcaagtttgcagtatgcaaagtatgagctatcctagaactgtgtatgaagcaaagacaatgatacaaagaaaggaagtgtagctggtcagggaaggcttcaaagaggatagagactttactgagtttggaagggtgggtggagttcaggaatagaggttaaaaggctgtctagacaaagagaacagcatacaaagacatggagacaagaaagaacgaagccgggcgcggtgactcacgcctgtaatcccagcactttgggaggccgaggcgggaggatcacctgaggttgggagttcaagaccagcctggccaacatggtgaaacctcgtctctacaaaaatacaaaaattagccgggcattagccgggcgtggtggcgtgagcctgtaatcccagctactcaggaggctgaggcaggagaatcacttgaacccaggaggcggaggtagcagtgagccgagatcacgccaagcagagatcacgccaagcagagatcacgccactgcactccagcctgggtgacagagtgagactccatctcaaaaaaaaaaaaaaaaaagccgggcatgttggcaggtgcctgtagtcccagctacttgagaggctgaggcaggagaatcgcttgaacccaggaggcagaggttgcagtgagcccagatcatgccattgcactccagcctgggcgacagagcaagactctgtctcaaaaaaaaaaaaaaaaaaaaaaagccagatgcggtagctcacgcctataatcccagcactttgcggggccgagtcgggaggatcacctgaggtcaggagttgtgggcaaaggattacccaggtgccaaggcaagagactgaaggcacaaactgttgcagtataataaagaaaatagttagaataaagagtagttacaatacaaattagatatagagatgatcatggacaattatcaatcatcagtataaacattataaatcattagcttttaatattactctttgtggcattactaatataacctaggaataaccggcaggtatagggtcaggtgctgaagggacattgtgagaagtgacctagaaggcaagaagtgagccctctgtcacgcccgcataagggccatttgagggctccctggtcaagcggtaacaccagtgcctgggaaggcacctgttgcttagcggaccgcgaaagggagtctccctttccgtggaggagtcagggaacactctgctccaccagcttcttgtgggaggctggatattatctaggcctgcctgcagtcatccagaggcctaaacccctccctttggtgctgtgcttcagtggtcacgctccttgtccactttcatgttcctcctgtactcctggttcctctttgaagttcttagtagatagcggtagaagaaatagtgaaaatcttagtctttgatctttcttataagtgcatagaagaaaatgctgacgtatgctgccttccctctctgctttggctacct

SEQ ID NO: 916648 - DNA, 4001 bp, Homo sapiens
agacctttggcaacaggacaaccacgaggccccaaccccgcagaacccgagtgacccctggagaagctgcaagtcagggctgagtgttactatgtgccctcccctacatccactcccagtagctgggacaccttggaaagtgaattaaaacaaaacagaaaaacaaaaaatacaacatagcactctctcttcttagcacttggaggccttttcacagcaactgaaaagaatgagcaattagagaagataacagtccacggtgccagcctggaactacggagccacagaggcaacttaagaggccccatcacaacgtgccctatcttcccagcaaggatgagggcacccggagaagggaagggacttacccgagatcagacagcaagtaacagttgagcctgggctgaaccaagggccctgtgagtcacaggccaaatttgaaaaaccatgccatgtgcttccaggtctagactcggggtccaatcccaatcccaccactgactagctgtgcaacctggagctgatatctgccatctctgagcctcggcttcctgtgtaaaaagggaccctaacaggcactgctcatggttactgtgggacttagccccatgcagcaggggctgggtacattaaacctacccccaccagcatcctcacctcagctttgctagcttcccttgatggaacatccatcctccgtgcctccaaagctgaaactagccaatgagtgaacaggagaagggttcatcaacatttaggaaaaaaagaaggaaaaatcactttacctcctgttccacccaacaaaggccttggcatggaaaatggggccaaggccagggattgtgcctgagacaaagaaatacgaaatggaaagaagcttgggaggccaggggctcctgctgccagctgggggtgggaggggagagactgctactccctgggccattcaatctctagacctggcactccctgagactcaagacagaggctcaggcccaccctccactcagccttggcttctcactgtacatccagagggatggtgcattaaaaaccacactcatgcttgtttctgggccactgaccatgacttgcgggcagctgagcaaggcagcagcccagcctctgctctctgccaaagccagcgagtagccagagcctgagcttcccagccaaggcacagaagaagcataactcctgcctgtcctcttccatgtactaagggtagagcaggccaggctaagcctcaagagcaaacagaaaagagccactctggggtgctctataaacaggagaatagcagccgttggggcctcaaaggctgacccaagcagtttttatcctatttggaatcgaaagctaccagaggcagaacatcggtctttcgtatttagtgaaaagaagtcaatatttgcaaaagcgtaatcaataaatacaatctaccccacattaatcagataaagtcaggtttatagtgtctttttaagagacggggtctcactgtgttactcaggctggagtgaagtagtgcgaccatggcttactgcagcctcgaactcctgggctcaagtgatcgtcctacatcagcctccccagtagctgggactataggcatgtggcacctcacccagttaattttttttttcagagatatgcagtctcactatgttgccgaggctgtcttgaaatcctggcctccagtgatcctcctgccttagcctcccaaagtgctgggattacaggtgtgagccactgcgcccaacaatagtccggtttttaggggaaaagggaaacagcaataaagtctccgtaccctcaaactccaaaggccagggtggcctgcagggcctcagctctgggaagtagggtgctactgcacaggtggacggccttacctgtgggtctgagaaggctccactgatgtccctgtcaaaggaggagaaatgggtccctaggctcacagaaggttgttgaggaccaggacacacgtgccagcatcctgcagggagaagcacaatgggagaggaggtgagacacctggactctgatcactccacaccaatccaactgggagacccacaatgccgatggaccaagaggattgaacaggggacatctgactaaaggtgtctccattttacaaagggacccagcccaggacgattcaggaagcaagtgtctaactcagaattggtgacagatacaccccaacattgcccggcaccccttctacttaggaaaactgctcagggagtgggaactgagaccaccagcacacaccataagccatcctattttcaaaggcccctggagctctgtctcaaaccttgatttttcactcatgaaccccactgggattggaggacttcagaccgcagagaggaggctggaaaatgaggtaatgcaggaagaagagtgggagacacagtccgagaggatggcgtcctgatgccgggacaggggcatggtcatattgtggggtgatgcaaatggcttccagccttccagcaagcccctccagctgggcagagtgtgatctgactacccagaggccagagacaagcattcaaaacaaaatgaaaaaggtggagaaatggatttccaaagagtcgcaggtccaacagcctcagagatgacaaagtcttcacaggtaccactgaagccactacccaacccagggctcctacagggaccacagacaagccgggtagcccacctcgcagctcaacacacattcttgtttgcctgacacacatacaagcctcctgaccctgggcccagagagcaggtagcagcctacagggctctccaatgaccatgacagagaggctgcttatctgctggctatggaagctgggagtgtttcaggaactgatgcccaattccagggcaaccctgctttaggagctgaggacaggcatggtgggggtctcctcagacaccagtccatgcccgctaggggcaagcacagccctaacaaagggaaatggaatggtggctggggatggcaaagttatcaactgccaagtgaacggccagacagaggagggagagtggaattggggaggtgtgaagatagctagcaatacacagcagtgggaggtgtggctgcagggagcgggcggctcttccaaccccgccaccgccaccgcgtcctgcatgcccacccccgtgcaggctcctctgtgggactgaggctccatcgctgtcctgccccagccccttgtctccacggctgcatgtacacacccacatacacactcaacccccggaacagatgaaacagcccaggcacccacagcagagtggatgcaggtcccagccctcccagtgaccatgagcaagctggccttccagccttgcctctacatgccaccgtaggccacagttgaggccagcaactctgaagtctccccatgttcgaggtgaggaaagctgttgagagggttgagggtttgccatggtaacgcacccatcaatggcgagccagatttggtagaccagccccgctccagcccaccacaatgcttctcggcgggtgagaagggcagtggtgactcacaccccacagaattagatccacaggggctatgagaaaaaagcactctcagaacgcaaagagaggcactgcagggaattatgtttctgactaaaagtattaaaagtgaaaaaagtgaatgcagggtcaggctaaggagccaacccagtaggcagctacttggggaacagacctctaggggcagggggctcaaaacatccctggaaagaaattaaaatgtgctgctggctaactcagttttcctccagtgacccctcacataaatggtaaacagtgaatctgtccactgccctaaggggacatggaaagtcacaataaaacacaattccttgctggggtttgttgcatgtaatgtacgttccatacacacgtagtcacagtcctggaggggagcagggcatccaagaccaaataatacatcgtgttgctgtttcccaggaac

SEQ ID NO: 916649 - DNA, 4001 bp, Homo sapiens
agtgctcaggccatgcagggcagaagagctctcaccgggccctgcctcgacttggcagccaagacctttggcaacaggacaaccacgaggccccaaccccgcagaacccgagtgacccctggagaagctgcaagtcagggctgagtgttactatgtgccctcccctacatccactcccagtagctgggacaccttggaaagtgaattaaaacaaaacagaaaaacaaaaaatacaacatagcactctctcttcttagcacttggaggccttttcacagcaactgaaaagaatgagcaattagagaagataacagtccacggtgccagcctggaactacggagccacagaggcaacttaagaggccccatcacaacgtgccctatcttcccagcaaggatgagggcacccggagaagggaagggacttacccgagatcagacagcaagtaacagttgagcctgggctgaaccaagggccctgtgagtcacaggccaaatttgaaaaaccatgccatgtgcttccaggtctagactcggggtccaatcccaatcccaccactgactagctgtgcaacctggagctgatatctgccatctctgagcctcggcttcctgtgtaaaaagggaccctaacaggcactgctcatggttactgtgggacttagccccatgcagcaggggctgggtacattaaacctacccccaccagcatcctcacctcagctttgctagcttcccttgatggaacatccatcctccgtgcctccaaagctgaaactagccaatgagtgaacaggagaagggttcatcaacatttaggaaaaaaagaaggaaaaatcactttacctcctgttccacccaacaaaggccttggcatggaaaatggggccaaggccagggattgtgcctgagacaaagaaatacgaaatggaaagaagcttgggaggccaggggctcctgctgccagctgggggtgggaggggagagactgctactccctgggccattcaatctctagacctggcactccctgagactcaagacagaggctcaggcccaccctccactcagccttggcttctcactgtacatccagagggatggtgcattaaaaaccacactcatgcttgtttctgggccactgaccatgacttgcgggcagctgagcaaggcagcagcccagcctctgctctctgccaaagccagcgagtagccagagcctgagcttcccagccaaggcacagaagaagcataactcctgcctgtcctcttccatgtactaagggtagagcaggccaggctaagcctcaagagcaaacagaaaagagccactctggggtgctctataaacaggagaatagcagccgttggggcctcaaaggctgacccaagcagtttttatcctatttggaatcgaaagctaccagaggcagaacatcggtctttcgtatttagtgaaaagaagtcaatatttgcaaaagcgtaatcaataaatacaatctaccccacattaatcagataaagtcaggtttatagtgtctttttaagagacggggtctcactgtgttactcaggctggagtgaagtagtgcgaccatggcttactgcagcctcgaactcctgggctcaagtgatcgtcctacatcagcctccccagtagctgggactataggcatgtggcacctcacccagttaattttttttttcagagatatgcagtctcactatgttgccgaggctgtcttgaaatcctggcctccagtgatcctcctgccttagcctcccaaagtgctgggattacaggtgtgagccactgcgcccaacaatagtccggtttttaggggaaaagggaaacagcaataaagtctccgtaccctcaaactccaaaggccagggtggcctgcagggcctcagctctgggaagtagggtgctactgcacaggtggacggccttacctgtgggtctgagaaggctccactgatgtccctgtcaaaggaggagaaatgggtccctaggctcacagaaggttgttgaggaccaggacacacgtgccagcatcctgcagggagaagcacaatgggagaggaggtgagacacctggactctgatcactccacaccaatccaactgggagacccacaatgccgatggaccaagaggattgaacaggggacatctgactaaaggtgtctccattttacaaagggacccagcccaggacgattcaggaagcaagtgtctaactcagaattggtgacagatacaccccaacattgcccggcaccccttctacttaggaaaactgctcagggagtgggaactgagaccaccagcacacaccataagccatcctattttcaaaggcccctggagctctgtctcaaaccttgatttttcactcatgaaccccactgggattggaggacttcagaccgcagagaggaggctggaaaatgaggtaatgcaggaagaagagtgggagacacagtccgagaggatggcgtcctgatgccgggacaggggcatggtcatattgtggggtgatgcaaatggcttccagccttccagcaagcccctccagctgggcagagtgtgatctgactacccagaggccagagacaagcattcaaaacaaaatgaaaaaggtggagaaatggatttccaaagagtcgcaggtccaacagcctcagagatgacaaagtcttcacaggtaccactgaagccactacccaacccagggctcctacagggaccacagacaagccgggtagcccacctcgcagctcaacacacattcttgtttgcctgacacacatacaagcctcctgaccctgggcccagagagcaggtagcagcctacagggctctccaatgaccatgacagagaggctgcttatctgctggctatggaagctgggagtgtttcaggaactgatgcccaattccagggcaaccctgctttaggagctgaggacaggcatggtgggggtctcctcagacaccagtccatgcccgctaggggcaagcacagccctaacaaagggaaatggaatggtggctggggatggcaaagttatcaactgccaagtgaacggccagacagaggagggagagtggaattggggaggtgtgaagatagctagcaatacacagcagtgggaggtgtggctgcagggagcgggcggctcttccaaccccgccaccgccaccgcgtcctgcatgcccacccccgtgcaggctcctctgtgggactgaggctccatcgctgtcctgccccagccccttgtctccacggctgcatgtacacacccacatacacactcaacccccggaacagatgaaacagcccaggcacccacagcagagtggatgcaggtcccagccctcccagtgaccatgagcaagctggccttccagccttgcctctacatgccaccgtaggccacagttgaggccagcaactctgaagtctccccatgttcgaggtgaggaaagctgttgagagggttgagggtttgccatggtaacgcacccatcaatggcgagccagatttggtagaccagccccgctccagcccaccacaatgcttctcggcgggtgagaagggcagtggtgactcacaccccacagaattagatccacaggggctatgagaaaaaagcactctcagaacgcaaagagaggcactgcagggaattatgtttctgactaaaagtattaaaagtgaaaaaagtgaatgcagggtcaggctaaggagccaacccagtaggcagctacttggggaacagacctctaggggcagggggctcaaaacatccctggaaagaaattaaaatgtgctgctggctaactcagttttcctccagtgacccctcacataaatggtaaacagtgaatctgtccactgccctaaggggacatggaaagtcacaataaaacacaattccttgctggggtttgttgcatgtaatgtacgttccatacacacgtagtcacagt

SEQ ID NO: 916650 - DNA, 4001 bp, Homo sapiens
cacgtcagttctcaaagcctggtccctgacgggcagcatctggactggctgggaacagaaattacggggtggggagcggctctcagccctcccgagttagaagccgactggaagcagccctccagctgattctcatcatctccagggcctgaaacccacggcggcgcgctgtgctggtcactaaatacctggggggctcagcgctctacgtccaggtttcccagcacaactctggttttcagctttatctccttccagtttcaaaaccacctcagtctggatattgaattcttaaagtcagaaagcaagtgtgtgcttccaataaccacactcgctggaaatcacctctccgattcgctaccagctctgccaaagacgcttccacctaacgtccctccggcgctgagctcaggaccacgccgtgcacgtgggaaccaccaccgcgccacacgcctaaaaaccgttgagcggtacattctatgcgagcggggtctctctggccacaacttaaaaacgaaaagaaaagcgctcagagaacaggctgcgcaggggtgcagccggctttgccctggaggccgccggggctgaagacggcgagagcatccatcccaggacgccaccgccccgccgcccctttccctccacaggtgccaagggccgggccgccagcacccgcgaggacccccgggcctcgcagagcccggccgtcgcggtcgccgcctcacttggggtcctccggagttccgtcctcttcccaacgtccggctcccaaggctcccgggggcgcagcgcagcggcggcggacgcgggaaggggccctcgccctccgcagagatcgcgccccgcggccgcgtgggtagtgcgggaggtcccgaaggccctcctgcagagctctcaggtccccgcagtctcacgcacggccgccaatgcggagacctccgcccccgcacccccggcaactcaggcctcagcctctcaccccggcccctgcacctgggacctcgcccccgcaccccggcccctgcacccccgcaccccggccctacagccccggcaagtcgggcctcagcgcttccccccggccccgcaccccccacacctgatacatcgcccccgcaccccggcccctgcaccccaggctcctgcatctcccaaacctgggacctcgcccccgcacccggctcctgcatcccccgcacctgggacctcgcccccgcacccggctcctgcatctcccacacctgggacctcgcccccgcacccggctcctgcatcccccgcacctgggacctcgcccccgcacccggctcctgcatctcccacacctgggacctcgcccccgcacccggcttctgcatctcccgcacctgggacctcgcccccgcacccggctcctgcatctcccacacctgggacctcgcccccgcacccggctcctgcatctcccgcacctgggacctcgcccccgcacccggctcctgcatcccttgcacctgggacctcgcccccgcacccggctcctgcatctcccacacctgggacctcgcccccgcacccggctcctgcatctcccgcacctgggacctcgaccccgcacccggctcctgcatcccccgcacctgggacctcgcccccgcaacccggtccccgcacctcgagcctcacctccacatcccggacccccagccgccgcccccgcatcccggcccccgcacacctagcacctcagcctggccccgcaccttggaccgctgccctcgccctagtcctggtccttgcacctcagcccgaggccaacagccccaacggctcccgcggagatccctccgcgccgccgacctcccaggacctccttcggcccgcgcccacctcgccttcggcgctgggttcccgagagagccagggacacgcgggcagcgagcaacaggcgctcttttcccgggcggatgaacaccgcctcccgggcgccggcctcgtgtctgtacgccatacgcccagtaacggcggaaagcggcgcgcgccacgccctcattggctgccccgcaaacggcggtttctgatgtggccggggcgggaccagaggagccccgccccacaggccccggccccgcccctccaagaccccgtctggcccctcccggacacccggcacaggcccaacaagccaggcccgccccgccccacaggccctgcccctggccccccaagacaccgcctggccccggacagacaccccgcacatgccctggcccctccccataggccccgcccccatcccgccaagaccccgcctggccctgcctagacgccacgcccaggcccccacaggccccgcccccgccccacaggctccgcccctgtccccccaagaccccgcctggccccgcccagacacccaacacgtgccctgccccctccccacaggccccggccagccccacccaggccccgccctgttcctcttctgcttcgcccagacccccggccttccctggcttgactcctgcagttcccccagtgccagccccctgcaggcggacacggggtcgggccagttccctactagctcgtggaactgggcggcggcgcacgaagtagaccctccatagacttcgaaatggtgcccacgtgggcaccgagcgccctactgtagcagtggactcgatcttggtctggcctttaacgtcggaagctctttcactcagcacacagagatttgaactttgaccccaaagaaaataaaactgcaatgcaagtctaaggtgccaggaggccgttacctggaaatttagctttcaatgacttgtgccttgggtgcatgccaacgtggaccgcaggggttctcagccttcacctgcgggggatcacctgcagggctggttaggacacagaccagagattccggtctgcaggctccacaggtgggccccgccggctgcatttccaaggcatcgcaggtggtagcgaccgggtctacgccgagctaggtgccctccataggagttaatttcctcatggaggcaaagtcaacagccacaaaacaaccggaaatattgtaagatagaacaggtttatttgtcaaggtggaagtgggactgaggctcactaactgcctgacctgttatgttccataactataaacatgattgtaggaggtagtagaaatagggtcgcctctgcagacaggttttaaaactgcatttatacggtaaacatagtgcttttccttttttttttttgtgagacggagtctcactctgtcgcccaggctggagtgcagtggcaggatcttggctcactgcaacctccgtctcccagcctcctgagtagctgcgactacaggcacccaccaccatgcccacataattttgtgttctttgttttgttttgagacagggtctggctctgtcaggctggagtgcaatggtgggatcatggctccctgcagcctcgacctcctgggctcaggtgatcctcctgcctcagcctcccctgtagctggtactacaggtgtgtgccacctgtagtaatttttttgtatttcttgtagaaatacgagaaatacacccagctaatttttttgtatttcttgtagaaagagggtttcatcatgttgcccaggccggtctcaaacttctgggctcaagtgatccacccatcttggcctcccaatgtgcagggattacaggcataagccacagagcccggcctacatattgcttattattcatacttaaaagcgcatgcctgggaatcgggggctggagagggctgaaggctccccaagccaccttcccaaatcctacgtctcatctgtgccatgaaaggggcaggttagatgtcagcgtttcccacactagcctgagtgtaagcatccactgagggaacttccaaataatacagactcccagatcacgctgattccaggaggtctgggacgggtgcaaggaatttcaagaagtaacatcaagttattcttatgctcagagaaggctaataaa

SEQ ID NO: 916651 - DNA, 4001 bp, Homo sapiens
gtctttagtcagacccctaagtctaaataaatataaggtctttccctccatgtattgcagcagttctgtgttttctagacctccccagcctttcagaacttcctcaattttatttaaagaaaaatgggagggggccacggagaggcttagcatctaacaaatcccactttgtattaatcattttaaaacttaatgataaaactgataagtttaaaattcaggtttgggagtttaaataccagctctgccacttaccatctattagagcttcagtgttacttaactgcttagtttcctcatctgtaaaatgaggatgaaaatacctaactcacaagtttttaaatacatatatatatatatatctcaaatgaatgcaaaccacatcgcccaattcttggcacatagtatgcactcagttatattaactacgatcattgaacatcttctctttacctttcaagtatgttaatattgactacgtcatcctttaggattcttttacacacacagtacagcctcccagactctgctgtttgaaatctctggtctggcctgttagaatttttctgttttcctaatagaaactagaatgggttagcctacattcgccaatgcccaagttacttcatacagaaacaactgaacgttgcaggaaacagatattccaacttaattgctcaatttctttcctcttctttttgctataagccaacatagtgcttttataatgcaaactcacatacacagcaacaagaagtaaaacaagggtcactgagttgatcccatcacctgacttcagcaggggagaaaaggatacatcatgatctctaattttcacaagtggcttgccatcttctttcccttccacctcccccgtctatcaatcatgaacatagtgtgcatgtgtgtgcttacacccctttcaccttcgggtttaattttttggagggatcagacttgcatcacgcccgcactggtgggggtaggaagcgcagctaggcgggcacggctgttgccggcagggccaaagtcccctacctcctcctcggcgtgtttgttccctggaccaaagcctcctaactacttttcttcactccctagatccaccactcgcctcccacacagggtggagcgccccgaagtacttgcataagacagcacaatcccaatttataggttgtaggagcgccagtgctgtcggtttttttccccaagatatttatgggggtcattaattatttaacaaatctaataaaattgaagggctccttctcccagaaaaagatcgtacacaccaaaaattctgcatagcatctcaaggtgtttatagactccctgaaccttcaaattaagtccgcaccagtgaggggcgcggaccggcggagtagaaaaagaaaggggtgaaatcttgaagtgagttagttaacattgatagatatgtacaatatttaatatacataggtacctatatgacaaagctgagtaataggttatggaaaagagtgctttccacaagcaagtcggtcataccgaagacggcgagcaacaggtgggcagaacacggggtcccgcactcccagcacgcggggtgagggcgggataggaggaggtgaccgggtgtggggcagggggcggcgccggggagcggcgggctccactcaccgttgcccacggagctgcggcccttccgggcgagggtctgctgcacctgctcctggatccgcaggctcttgactgtctggccgccgcggccgctgctccccgccagcttcagcttggcctcggagggcagcgccaggctggagctgtccagttgtcccaggatctgctggcccaggacggtccggatgtagccgtactcagctggggcgccgggggctgccatggggccggtgggggcgaccgagctgctcgcctgcctctggactcgcgggcgaagccgccacggagctgggggcgctggcgcgagccccgccccgctcgagtccggccccgcccctggcccgccccccgcgccggtgagaggcccgggccgggggggagctcggcctcgtgggccggacgcccggccttccctgaggagggggcgcggctccggccgggcacgcgcagtcgggcccgggggcgggggcgggggcgggccggacccgctgagcgcgcggacacctggagacttgtacccgcccgcggggaggtggggagaggggcgcggttcgcctggggtcgcgcacgttgtcggagtcccagcggataccgcctgccggggccgcgccccgctctgcccacgccccgcgctggacaggatggatttccgctcgatgcagggaggggctgccctgcaggcaggtgagccctcgagagtcactcctgttcttggactgaggcttgcctccgggatccccgagcgagtagtatgtctggttagtcaggctttgtcgcactgttggaaacgtttcctggttttcctggacctgagggtgagaaagggctatttggtcaggcggaaagggcaatatgagggaaatgtgccaagaagataacgtgtgaaataaaagactttctaaagagagtgttttttttcttagtacaacgtcaggactatgtactttttgcacagatgcagtcccagaaacatatgttcttcctcattgagagcttctgttttctcttggatacacaaattgtacccagtactcttgctaacccattcctctcttacgaacacacccacacagagaaactccaacaagaggctctagagaagaaatgaattttaatagacgatgctttttaaatagccctgctaacgttgattaagtcctctttattacaggctctttgtagagagatccacggagagggcctccaactttcaatcgaatcttccacaacttgtatttatcgtgctattaattatgtttcaccgcagttgactactgagaacttgagagctaagctcaacagaaaggatccttgaccttaaagtttacaaccaaagccacttgtcctgatttgcctctttggacttaagaggcagaaagaaaaacatgtatccctggtattaagataatattccctttgattgcttgggtttgtatgttcactttccctcaaatcactcaattgctgcaaaaccccacttactcaagtctgaagtgtttggagaacgcagcttccctcgtctttgttttcctacccacacccttctgcctttagacacacactgaatgcttagacacacaatgcacaggtatatggcctccctttttacatgagcgtccagggagtgaagaggaaaccaaaggactgaaagcgtggacaacagagtagtgacagttccgccaccctttgtcagcaggccacatggctaagtgggagccatatggatgtgagtcctggaagcaattgctcccaccccaatagaatggaccactatttaggcaaattacaccttgtgtaaagcttgcttatgtagccaggtggaaacatccaaccatgatgctgagatgtaattgaaaagagaggggtgaactgaaggtaagtgatgatagaaacgtccagcaacattcctgtttctctctctctctctctctctctcttttcatggcctcttctggcagaccagaatctgctgctttgagagacaatttcagtatctgtccatacagggtcagttggggcattccttgttattttgtacctgaagagccatgacttaaaatgtcagctctgcctccaattagattcctcaccaggagactagagaggaatttttctcatttattttaatgagccaaacctcagatacttttttcctctcaaattaatttttttaaagtgtgttgttggaattgattatcctgttgggtaggtaccaataattgggcacatagaaatcttgttgttggattgttaggtgatttgaggggagggaaggtgattaaaagcacagcttgtgagtgaggaaaatctaggttttaaccttagcttaccccttgtaa

SEQ ID NO: 916652 - DNA, 4001 bp, Homo sapiens
tgagatccttggcgtgtgccccaccccgcccccggcaggcactccaattttcctgcaggcggatcacttacttgtccagttcatccacgggggtgcctgagccccccaagccacagtagcagccgtagttgttgtattccaagaaggggtcactccccgggatcacgcacttgatcattttgcggaactgccacacggcccgagggctgatgccgctgtcggcggcggccactgcaagaagacatagccagagttcaaatcggtctgccagcaccccggggacacactgccttcctgctccctcgggtcccacgctgcctccctgacccctgccagctgcctcctctgaagaccgttggacccaggaacctggtaaagtgaaagtgggtagaggtttttttttttttttaatgaaaactttatatatataaagtttatatctttgtgtgtgtgtatatatatatatatcttcttctttttcttcttcttcttcttctgggaccctaccgcctcagctaggattacaggcatgtgccacccagctaggcctgatagttttttttttttttttgagatggagtcttgctctgttgcccaggttggagtgcagtgacacgatttcagctcactgcaaactctgcttcccgggttcacgccattctcctgcctcagcctccctaggtcagatagttttaaactatctgcactgtttatccagtgaatatttattgagcacttactatgtgccaggctctgtcctaggagctagagatacagcagtgaacagatataataataataataataataataataataataataataataataatctctaacctcatggagcttacaacctagtgggagagaaaaacaataaataataaatgtgataaggccgggcacggtggctcatgcctgtaatcccagcactttgggaggccgaggcaggcggatcacaaggtcatgagatcgagaccatcctggctaacacgatgaaaccccgtctttattaaaaatacaaaaaaattagcggggcgtggtggcaggcgcctttagtcccagctactggggaggctgaggcgggagaatggcgtgaacccagcaggtggagcttgcagtgagccgagatcgcaccactgtactccagccttggcgacaaagcaagactctgtctcaataataataagaataataataaatgtgataagtaaggaaactggatactgcattagaaaggggaagaatagagcaggatgaggagaatctaaaagggaggtcacccagcctggccaacatggtgaaaacctgtctctaccaaaaaaaacacacaaaaaattagctgggcatggtggtgtgtgccagctacttgagagctacaagtcccagctacttgagaggctgaggcaagagaattatttgaacccaggagatggaggttgtagtgatctgagatcacgccaccgcactccagcctgggcgacagagtgagccccgtctcaaaaataaaataaagtaaaataaaaataaaaattaaaataaaataaaataaatgggagattggcctaactacttagttgagtaaggtgggaggatcacttgagcccacgagttggaagctgtggtgagctatgatcatgccactgaactccagcctgggtgatagagcaagaccctgtctggaaaaaagaaaataaaggcaagctttcttagctcaggcaatctgagttcagacttgcaggttgaaaaagtgccagccttgagggaaccccaatagaggagcccttaagccccactgggaacctcgaattgagactgcggggctggccatccctgtttgctgtggcctgtggcccccattccagaggagtgagatcttagctcacttgggagagaaaggcgggtggagccggggagacttgcctacctgtgagcagcacagctagcacaaggagtttcatcttgcagtcaaggtgagaaaagaactgagatgaccagtctcaggtatagtcttatagtcagtctccacacaaccctgcccagataaggctggagtgtttgctttgctcttggctgagtttggggctggccttgaatctgtctgttgcaggaatgaccctgacgatttgccagcatgggatcactggaaaatatgttatgcatttgtccttagcaactgttaaccaaagggatggtttctggagttttcagatcttacaatcttgaccctcatacccaccactttgtactcagcccagcttcacgggctggttggggaaagcaaagccgtcagttcagtcggacgctgggataagggagacaagaaggaagtgcagcctgggcaacatagagagacctcatctctaaaaaaaaaaatgttaaccaggtgtggtggtggattgcacctgtgatcccagcaactcaggaggctgagatgggaggatctcttgagccagggaggtcaaggctgcaatgaacagtgattgagcctctgcagcagagtgagaccctatttcaaaaaaaaaaaaaaaaaaagaaagaaagaaaaaagatcgctgcctgcagcctcaatgtcttatcaagtgcctgaatctgtgcactgggtctggttgaatagtcccatcagtcgtgcaccttgcagataaagagacaggttcagagagttgcggtaacttgcccaaggtcacacagttggcaaatgacaaaatagggctccagtttagatctgtctgattccaaggcagaggttttatttttttccaccactccgctctgcagtgtgggtttgtgagaaaaacctgggctttggattccaaaggcctgagtctgaattatagaatactaaagggcattagaactgtcatatcagaggccaggcacggtggctcatgcctgtaatcccagcactttgggaggctgaggctggcagatcacctgaggtggagagttcgagaccagcctgaccaacatggaataaccctgtctctactaaaaacacaaaattagccaggcatggtggcttatgcctgtaatcccagctactccggaggccgaggcaggagaatggcttgaaccctggaggcggaggttgcggtgagctgagatcacgccattgcactccagcctagggaacaagagcaaaactccatctcaaaaaaaaacctgtcacatcacatatctatttatttatatatattttttgagacggagtcttgctctgttgcctaggctggagtgcaatggcgcgatcttggctcactgcaagctctgcctcccaggttcatgccattctcctgcctcagcctcccaagtagctgggactacaggcacccaccaccacgcccggttaatttttttttttgtatttttagtagagatggggtttcaccgcattagccaggatggtctcgatctcctgacctcgtgatccacctgcctcggcctcccaaaatgctgggattacaggcgtgagccaccgcgcccggccaaatatctacataacattgtttagctgaaattcacataacattaaccacgtttaagtaaacaattcgggggcatttagtaccttcacagtgttgtgcaaccatcacctctatggggttccagaacatttttatcactccagaaggaaaccctgtacccattagcagtcacactccctcagcccctggtaactgctaatctgcttctctctctctctctcttttttttttgagacagagtttcgctcttgtcgcccaggctggagtgcaatggcacgatctcggcttactgcaacctccgcctcccaggttcaagcgattctcctgcctcagcctctcgtgtagctgggaattacaggcgcctgccagcatgcctggataatttttgtatttttagtagagacaaggtttcaccatgttggtcaggctggtctcaaactcttgacctcaggtgatccactcctcagcctcccaaaatgctgggattataggcatgagccactgtgcctggcc

SEQ ID NO: 916653 - DNA, 4001 bp, Homo sapiens
tgctgtcaggatcacttcatctcagaaatgtccttactttctgccttggctccagaacctccaagcatggagtcagcttcctgttggaggaactgtttaagatgcagtttcttacaaggtggtaccttcttgaataaatagtgctccatcttcagaaaaacaacgcctgtctcactcctcaggctgccccctccacctacaaaaacacttaatctcactcgtccaaaaaaacagaaaaggaataaagattttagccagcattccaaacacaaaagctacctccacttttgggaccctccccagcctcccccaggtacctctgaatgagctgtctccctagactagaagtagacaccaaggccacctccatagtttaggcaaagaacacagaaaatcacgagtcaggagcctgtgggtacatctgatcccacagactggaaagatttaagattgaagagtgataactaagcaagtctcaaaaacgaaggctcttgatgatggaaggtagtgtaataagaatcagtacacatatttaggaaggggcatcctcccccaagccccaccctactcttgtacaaggtcagcacagaaaaggggattatgaaataagacaaaattaattctcttattattactttagaattctttcaagtcccttagttacagttcataatcttcacctccttaggaacggaaatcataaatccaaggctttttaatttaatttaatttaattttggcaaaggatgtagatttgcatgaatacctgtagagataaaacctgtttttccaagagggaagtagttaagaaaatgccctctggcatcccctaactctgtcttatttgctgtgttatctttatgcgaattacttctgatcaatctcacttttctcatctgcagaatggggaatataatcctatttaggattatatattaaaaaaaaaaaaaaaaaactgccgggcgcggtggctcatgcctgtaatcccagcactttgggaggccgaggcaggcggatcgcccgagtcaggcgttcgagaccagcctgtccaacatggtgaaacctcgtctctactaataatgcacaaattagctgggcatggtggctgacgcctgtaatcccagctacttgggaagctgagggaggagaatcgcttgaacccgggaggcggaagttgcagtgagccgagatcacaccattgcactccagcgtcgcccacagagagcgactctgtctcaacaacaacaacaaaaccaaaaggcccttaagcccactgccaggcacgtatcaaactgacaatcgtgcaatcgtgattttaagccaaagtcaatgtaaatttttaaaacacaaaacaaatggcaagccggaaccatacctccctacaatctggataaatatatttagatgcccattggctggagtttttaagaccagcccaggctctgtgggccaagaatcggcgcaggagcgaaccgatttgttggccaagaattcgggccaaaacttgtaaagttggcagacgcactcgccatgcccttctcaagtgccctcgctgcgcagccgcagggctggagcgagaccgccggccggaggcgcgtttctctgagttcacccaggaaccagacgcccgctggacgtcaactcggccggacgcggggcacgggcgctaacaggctcctaggagcctccccgggcgccccccgcccagggcgcgctctgctcacctgcaggtttcggcggctccgcggtgactaacaacagcggcagcagcagcagcagcagcagaagcggtggcggctgtggcagccccgggcgcccgcccggaccgccgcgggtcatcgctccacggccgcgaccttcctctgcgggatcaggcggccgcggtggcccgcggtggcagaagttgcaagagaggctcctggcctactcaggggcgccgcctctccgaggtggggcgtcctcaactttcctctttcttgagcccggcctgctccgggctctgaggggcgaggacgcttcacgtggtggcctggggcccaccccgcctaggaaaggcggatcctttacgtctgaccctctagcaacccctgggccggtctgggaaagttccccagctgcacttctgggaaatgcagaggctgcctgccgctttctttcgcagttttgcggcccaaggcttgggcgaatcagttcacatcaacacccctactagcctctccctccggggtcgaccatttatctccagcagcggaccaggcgcccgggccagggtgacatgcgcgccctgcctacacgcagctcggatcctctgctgtttctggagaggcctccacaggtgcgttttcctcagcgattagcgtacccctcattcccaggctgtttaacctaaatccatgcgctgtagctcagattttttatcctttttgcttcctcttcgttggctggagccaccacaggagagtgattcagacggggctgacactagacacactcctacgtttctgtggagtccccatttctgtgtggggtcagttaaaagtgacattgtgaagtagtcaaaagttatgccttgggtgatattgtgaagttggcaccgggtgccctaggtgacattgtgaagtaggcaaaaggcatttcattcattcactcagcattggctgggcccatcttatactccagataccagtgatataaagacagctaagagcatgcctcaccacagacaaaaagaactaagccagccgggcgccgtggctcacgcctgtaatcccagcactttgggaggccgaggcgggcagatcacgaggtcaggatatcgaggccatcctggctaacacggtgaaaccccgtctctactaaaaatacaaaaaattagtcggacacggtggcgggcgcctgtagtccagctacttgggaggctgacgcaggagaatggcgtaaacccgggaggcggagcttgcagtgagccgagatcgcgccactctactccagcctgggcgacagagcgagattcgtctcaaaaaaaaataataataataacaataataatttttttaaaaaagaactaagccatatagataaacaagtacacagaacttgccattctactgtgttagagctatgtttaaggtgcagtgggagagggggaaggagggaacaagccacctctcagatgggaacctcagcaccccactcttcctcttggcctttcttctaagcttaacctaggtgtcaaggagagatgagaagagagaataagcagtacctttcataacggggaaaatgtaattgttagaaaagataaagaacctaaaagttcatcaaatctctgtgcaaattgtgaaacacaagtcacaattttgtggtccaggcaccatggctcatgcctgtaatcccaacactttgggaggccaaggtgggaggatcaccggagcccaaaagttcaagacaagcctgtgccacacagggagactccaactcatttttatttaattaaaattaaagtcacaattatgtttaatggcatttaatgaatgaagacatcgaggacattgtaaaagttgcacattttccttcaagttagaaaattaaaatgaagaaaaattaaaacgaagacatcgaggacattgtaaaagttgcacattttccttcgttagaaaatttaaatgaagaaaaattaaaatgaagacatcgaggacattgtaaaagttgcacattttccttcaagttagaaaattaaaatgaaccaaaaatgaaaattttggttgtgttatgatgggaagagaaccacattaggatgttcaaggaagtggtgccaccccaaatatttgagtcatattgccctataccaccctccttcaccttactaacccttctgatccaaggagccaagtgttctgatgaagtaagatgcatataaatgcctaatgtgaaccttgaggcattcattcatctattatttgtcatcaaatattcgttgactcccatgttccaagcacaga

SEQ ID NO: 916654 - DNA, 4001 bp, Homo sapiens
gtgaagggatttgcccaaggtcacacagcagaggggctgagcctggaagaactttccatccagcacaatcaaggaagccttctctccacttccatgtttaccatagtcaagagcaacacagcccaggaggggcctccagaggccaaagccccctccccatgctgggcctcgctcctgcccctcctcgcctgaacagttctgtcatgtcctcttgattctgctatgcagggccaaaaacatgagtgagtcagcaaagaacgggtcaccagatccaagagtcccggcagcccccgaggccagccacaaagcttcagttccctccacagatgccagctcactctgtggcctcctctctctgggagccttcccagatttaccccaaccagtgcccctgtgtctgtgcaaatatctcccccaaatctcacgtctacttgatgtaccccccaagtgccaccagaatgggggtgtcctcggcatcctgtgtctccctaacacctgcagaagccaatggatgccagtaaaatggataggggctaaagtgggaggaggccctttctgctgcagggggcagtgtggtctgagcacagaccacatcctgggcacatcctagtgctagggttccctagcatcatctggacactaggatatgacggatgcaccccgggttccctaggatcccccagcacagcctgatccagcgtctgggccctgctgacaaggctttgaagctgatccttcccactcccactgactctgatttctcttctatcgctgtctgtgtttcccactgagtagagacagctgctcagctgtgtccctaaggccaaccatcagggtaatgaataaatgaatgggcacaagcccttgtacagaacttgcagcacatgaccacccaactagagcacatcctcaaaatctgggccacagatggggaaacgggagcccagacaggcggaggagttaggtgagactcacacatcagaatgacagcctgggttccagcaataaagatggtgagcatggctgccaaacacggcatccagccaaggacttccccttggaccaggacacagaagacaagggaggagcagagccctagcaggatactaaatgggtctatgtgactttagggaccctctgcttttggactagcctggaacccaggttcagtcctgctgacctggcactggaagggaggcagggtgctggcacccacgagcaagccacagccaagcaggtaagaattagtctcctgctgagttctcatcacccctcaggcctggggacagggggctggcctccatggggtgaggaggcaaagtctagggaagggagcaggtccccgtgaggatagaatttacccaccagccatggacctgatccagatgcaggcactgcggcctcggtggtagggaactggcttcttggggacagaagtactgtcaccactggctgaaggcaagggactggccccatgaggtgagggatgccgcagtagccagctcccaaacagggtacttggcccgcagggcggtgctgcagcctcgggagtagctgacccccagagaaacgggcgttcccacccggcaagaggccggtcccgggaacaggcgaggtccggcgcccacgcatccccctcccccgatggccccgcgtggggataagccaacccttacccagtctcgcggatggcgttggtgaggttggcccaggccacggcgtcagggtggcgtccgtccaccataagcagctggcccgccgagacgtccaggagcaccgagcggctgcgggaggctggagggacctgcccatcgcgcgcccagcggccccccggcgctgggatcgcccccgccaggccgctcaggaacggcccgaccagcagggccagcaccagggccagcgccagcgcccgcgtcagcgcccgggccaggtggctgccggggtagcagtacatctggcccaccatgaccgcacaatgctgcgccccgcagcccgggtcacgtgactgcgctctgccatgggcggggccgagggcgggcggggccgggcttgggctgagcctttccgggatgggaggggctggcgcgaggggaggcctacggggcgggacccaccttaaagagcccggccgccccttccacctacgcaaacccggtttagcacacttccccaagtttttttttttttttttttttgagacaagacaaaacctccatatgtcgcccagactggagtgcagtgacgcgatctcggctcattgccacctccgcctcccgggttcaagcgattctcctgcctcatcctcctgagtaggtgggattacaggcgcgcaccaccacgcccagctgatttatgtaatttcagtacagacggggtttcgccatgttggccaggctggtcttgaactcctgacctcaggtgatccgcctgcctcagcctcccaaagtgctgggattacaggggtgagccaccgcgcccggccagatttatttaatggtatttgccatttatttaatacagttatctaatgcagtctttattccaacttttcccattgtccctcaaataccctttttacatgtgtgtgggaaaaagctgtctaactactactcaaaacctagatgccgtcgggcgcggtggctcacgcctgtaatcccaacactccaggaggccagggcgggcgagttcaggagttcaagaccagcctgggcaacatggtgaaacccccgtctctactaaaaatacaaaaaagtagccggacgcagtgaggcgcgcctatagtcccagctactcgggagactgaggtaggaaaatcacctgagcccggaaggtcgaggctgcagagagtcgagattgcaccactgcactccagcctgagcaaccagaatgagaccttgtctcaaaagaaaaaaaaaaaaaaaaaaacctagatgcaataaaagattaatgcatttgactgtataaattttttaactttttcatgtcaaaaaactcaataagcaaagtcaaaagacatctgacagaccaggagaaactatttgcaacatatatcatatatatacattacatatatatatgtatatatatctcaacatatatcatataatatatcaggaactcttaaaatttgagagggaaggccaggtgagtggttcatgcctgtaatcacagcactttgggtggccaaggtgggaggaatgcttgagcccaggagtttgagaccagcctaggaaacctggcaagactctgtctctataaaatataaaaattagctgagcttggtggtgcacacctgtagtcctgttgtgggaaactgaggaacggagagaccaatatgagagaacaggaggatgtttatttcaacgtacgcactggctcagtggattcacatccaaaaagctgagcctagaacaaagatattgtggggtttttataagcaagcttagaaaggtaaaacaaaagtagttaatcatatagtgcataacttgtggccttgcatagctggtggccttgtagctgcatcaaaagtaaaacaagaactggctaaatagagaggtttgtaaaacatagtcatgcttaagagaccaaggaaaggaatagcaataaaataatttgtctttctctcttttttttccttcaaccttgctctggaggcgggcggtggggtggagggcggggtctggagcccagtcctctggccttggcttttcggacagcgttatcttataactgtccttgaagtgagctgctaagcagaggaaaacttgttcttcttcttttttaacccttgccttgccacattctgggccttagctcttacttctcttggagtgaatatatgtagtacttattattattattattttaatttctgcctcagtcccagctactgggaggccgaggggggaggattgcttgagcctaggaagtcgaggctacagtgagttgcactacagcctgggcaacagagcaagaagttgtcaaaaaggaaagagagagag

SEQ ID NO: 916655 - DNA, 4001 bp, Homo sapiens
taattttaccttctactgaaatgctctccatcttgattgtaaatatagttagtataattaattgcttttcttcttaagagactaacctttatatgacaattactgacattggattaagttccacctaggataggataggcagggggtggatgtcatcttaccttaaaaatctgtttcacatgaatataactgcaccgaatatctaatttttcaagtaacctctgagttttttctaggttaatttttccacctctgaagtcatcctgaatctttgacaaaaaccatgtagaagcacaaaaaagttaaggaaattctcacagaaagtcattgaatatttaaaattcctaaagaaacatttgatttactgtattatttttatttttaaagaatatgtttaaagtaaattatagtataattgtatgataaatattttttaaaaaacaaaattaagtagttactatgctatggtaaaggtatgaaagggcatagcacagtaaaaatacaaaaaaaagaattaaagttaaaatttgagaattgaagtcattacttagaacatacattaaaacattataacaatctattgcctgaaggcatgaagttggaaggcagctagacttcaagatcgcctctcacctgacctctctgttttagttctctcttccagaaaggtgagcaaattaaccctgaatcttaaggaaagtggaagcattagatgaattcctaatatgccaccgaacacagtttctgctacttagtgttcaataaatagtaaccatgactgataaagttattattactacattagtccaatgcccagctacacacacactcaagacagtaccatcaaaaagcatcagaaataccatggtgagtgtatatttggtatgaaaaacgaaaaaaatttttaaaagcttacttatcatagataaactacaaaaactaggacacttccatttgaaaaactaagatcgaaatgagataatgacaattatcactaaaattataaaaggtataggtaaaaattgtgcaaaactactaagtttcagattgttagaacgaattaatgagatctccttaaatttaatagttatgacttaatccagcaaagctcatgttcttgtaagaaaaagataccagaatgcagggaaagttagaaaagctcagaacaaacagggaaaagcagttcaacttaaatgaagaggacttaaattcagaactcctcgaaaagaataacagcatcaagtaaagaggataagtaggagaaagaagaagaggagcagaaagaagctctcaatggatatctcatttccatagtttcatgacctgtagagccgtttctcctcacttagaagtctttccccagtaggtgctgtcatgggttccaaatacaattaactctgcccctttgcagaaaataatttcttgatactcatcagctgttaccacttttctagggagaaagcagagaacacacagtggttttttttgccttcgttctttgaagctagctcacacttaaccatagaaacagtatgcaagatgtggtacctgcactaccctgcccttgaaactgtttggcttcttacgttctgaccacctccaaacccacaatatttgaaaacacagctttccctgatgtctggcatttttccatgaactgccattgtatctccttttattttttactactttgtttaaacccctcaaacctttcatcataatatgcttccagtgggtttgggcagctactctgagagcctgagtataaatcaacaccattgtgattcctgaagttgcaaagtgctgtcactcttgaaactttgggctgcttctctagatcgttgacaacatataatgcacacagagacacaccactttcgaagaagactgttcaggaggctaagttcttaaaatcttcaaaagaggtatagctggttggctgggcaccacactgtcaggtgactgtcattttttccttttggtctgaattcccattgtgatatcatcagaggttccacacttcacaaggaaagcttcttatgacctcatcaggaggctcagaccttgccagactgcctgctttcatggatagacataaaaaccttcagcttgaatgttaacaccttgatgggaaaggtggctcatggaatgttttcttatcctttgaacactcctcatttcagaagctttgcttctgttgcaaccaaacatgacacttagcgtgctgagcaggaaggacaaggaaagagtaattcgcagactgttattacaggcccctccaggggaatttgtaaatgcctttgatgatctctgtctgcttatccgtgatgaaaaacttatgcaccaccaaggtgagtgtgcaggccaccaacactgccaaaaatattctgtaccactctgcatcgatggaaatccagtactcttgtctcaccacaatgtaatgggcgactaccgattttttgaccatcaaagcaaactttctttcaaatatgacctgcttcaaaatcagctgaaagacatccaaagtcatggtatcattcagaatgaggcagaatacctgagagttgttcttctgtgcgccttaaaactgtatgtgaatgaccactatccaaaaggaaattgcaacatgctgagaaaaactgtcaaaagtaaggagtacttgatagcttgcattgaagatcacaactatgaaacaggagagtgctggaacggactttggaaatctaaatggattttccaagttaacccatttctaacccaagtaacgggaagaatatttgtgcaagctcacttcttcaggtgtgtcaaccttcatattgaaatatccaaggacctgaaagaaagcttggaaatagttaaccaagctcaactggctctaagttttgcaaggcttgtggaagagcaagagaacaaatttcaagctgcagtcttggaagaattacaggagttatccaatgaagccctgagaaaaattctacgaagggatcttccagtgacccgcactcttattgactggcacaggatactctctgacttgaatctggtgatgtatcctaaattaggatatgtcatttattcaagaagtgtgttgtgcaactggataatataaagaattgctcctggtaactatcttgatttgacttgtttgtgtttcttgggaatggttattttcctaaaattgagcaatctgtagagatgtctctcacttagccaatgcaaatttaaatgggaaaagtgtagcaagtaattttacttggggaatatttatgaacaaggcaagaaagtgtaaagtaactgtgtttcatggtggtgaccatcataaagaccaagacatttgttagaaactaaaatagttttatagaatctgggattccagaaatagtatagaggtggccagggttaaggctgtgtgtgggtgtgtacgtgtgtgtgtgtgtgtgtgtgtgtgtgtgtgagagagagagagagagagagagagagacttttgactgtttcgaactgaaaaggtatacaaatgaatatcactccacaaatgatattttacataactcaattcagtcctagaccatccacgagatggggaatttcaataaaagacattaggtttggattttccacaaaaccaacagatatcaaaaatctagctcagatgaaggactattagtaattttggctcctcttccactctactttcttcccctcaagaattggggttactcaaaatccctggcttgtctgataactaacatggtcttccaagccaaccagagaagcctgacttcccaaacttttacagccaggcttttgtgaagtcgtcactgtaaacacttagaagtacttattacataacatggcttgtgctaaatattttgcataacatttttcatcactaatctggtactagtattatctccgttgtacctaagaaaaacctaagttctcaagttgttcacatcttccagacacatagtgtcacagttcacttgtgctgctataacaaa

SEQ ID NO: 916656 - DNA, 4001 bp, Homo sapiens
aaaccagaaaaaaaaaaaagtgaaatcacataaaagaataaaatttttctgtggcgtgaatgttaccaaatctgtggggttaactaggacacttatttatatcactcataattccataggataattagtctaaataatttaaatgtcatatcgtctttcatgaaataaatctatcattatccataaaagcaaagaggccatcaaagttggaatatgcgtgtaaaacaccagaaaggtatattgaagcaaaagcctgcaccggggaattgagaaacatgatagtgtattagtcagaaatgccttaaaaatgtaagctcatcatgcttgctacaccagcctttcctttcttcctccacctttttgcaaatttggagacattagtcacttcagtgaactccagcatttcacagagaggcaggtttgttcaatatcctggcaactttaacagattcacggaatgtcagagtccgagagaatgtaccccagaggccagctctgaggactgctgaaactggcctcgccttcgacccaaactgctctcaagcctttccaatcaccaggactagaggcaggccagtaagagaacacatgttacatttcaaagacaaacaagtcacgaatgtaaacaaagaatgataaaagaaacccagaccagtacagaaactacgaggagccttttccagctccactcacacttagcattcaaacaagctcccaaagccacccgagagagccgcttccccacggactccctccaaacagggcccgggtgcccccatacgggacaccccctcgcacgcccaccgcctcctggcagtctgtgcaacctccgtgcggctggcggggactttagatccggatcgccagcaactgaggctgcgaacgcctcctccggctccggctgctcctcccgtggcaggagggaacgcgccaagcgtttcccgagccgttccctgtcacagagaggatcgcagcacccccgaactcctctcctcctcctcctcctccttcatcagccacctacccacaagtcccacctaggaggaggaagctgcacggcaggaggcagcgctcctgggaggagggggaggatgtggttacgttatcccggcgggcgatcggggtccggggctgcagggaggggagtgggtaaggactgcctgaagattgctggggggcaagacggcagctgggggtcaccggggagtgagtagcggccgcggaggaaaaactcaggactccaggtttcagggaggggagcgtcgccactctagggtcgcgagggtcgtctaggctgggatggggggagaaggcgcaggaagagggcgccgtctccaagtgctgatgaaaggctgaggagaaagaggcgccccgagactggagagaactcccggcggcggagtccccgtggcccctctacctgcggccgctcccgcccggcctccgccccgcctcgccgcctcccggggcccgcggcgcggggcaggttgcggggagccgggcggcccgggctctgccgcctcctccaggcggagcccaactccgtttgggcccggcgttacctgtgctctgccgccggtgtccggtgaccaccgcctcgccggtgacggggtgcagccaggtggtgctcttggcctcctcgctgcaggggtgagagaaggggcagacacggagcgtgagaggggacgcgggggcgagccgaggggctgcaggagcacagacccgggctctcccccgtgtcgccagccgcccgcctcctgccctcccgcccccgcgggcccccgtgccgtccccggctctttacttgatgaagaagactcggccgcccctggtgatcccgtaagtccaggaccggggcagggagatccactccaggttcagatccgccgccatgtctgatccctagccgccgccgccgccttctcctgctgccgccgcggctgccgagggaggagggaacgagcgagcgaagggagcgcggagcgagcgcgcctccccggcccggcgcgcccccgcgcgcgccctaccccctcgggcggtgcccgccccgccgccccggcagggtccggcccccgtcgccgcccctccgcatcccggcggccgccggccggccgccccgccgcgcgctcgggggatgggcaagcggcgccgcgccccagacccctccctcgggcccctgcggcgcgcccgccccctccgccgcgcgaaggttccgggatcgattaaaaaaaaaaaaaaaaaaaaaaaaaaacgcgtcctgcccccagggctttgcccgaaggcttcccatcccagggcgcgatcaaagggagcctaataatgcccaagcccctgatttctctctttcaaacaacaaaaacacagcgtctgagctttgttttataagagctgttggagagccaacagatttttccaatatatttatcgttttaaaatggaaagctgtttttattaaagcacacgaaaggcctttcctgtttgtttgttgtgtgccagatatcaaaggttggacgtgatacgtggccccatgaaatatgagtggatttagacttgacaaaacaagttttttctcttcctaggccccttaggtcatatcttataaaataaaaactcgtctttttctggtacttgtttttaaagattcacttaacatcagtgtggatttttacttgccctgtctccaatagattacaataatagcttattttatggagtccttgtgacggtgtacatttttaaatcttcacaacaactatatatatatgtgtgtatatatatatatgtgtgtgtgtgtgtgtatatatacacacacacacacaatctataaaaaatccccattttacagataggaaaaatgaagtttaaaaacacagtagtttgcccagtcatagtaataactgccaaagcctggattcaaactggctgtaggatttcaaaagtatatttgtataacctccttgctgtacaagcccactttgttttactgcgattcactttattgctgtttgcagatctttcacatcttacaaattgaaggtttgtggcaactctgcattaagcaagtcctagcaccgtttttcaacagcatttgctcactacatgtctctgtggcacattttggtaattcttgcaatctttcaaactttttcattattgtacctgttatagtgatctgtaatcagtgatctttgatgttactgttgaaattgttttgagggcaccatgaactgagcccatgtaagacagggacttaataaatgtgtgtgttctgactgctccaccaaccagctgttcctctgtctctctgcttcatcttgggcctccatattccctgaaatgaaacactaataattgtctaataataatggcctaatattgaaattaggccaaccagtaaccctacaatgccctttaagtgaccaagtgaaaggaagagttgcatgtcccttactttaaatgaaaagctagaaacgattaagctcagatgtatcaacagccaagagaggccaaaagctcggccttgtgtcaaataattagacaagttgggaatgcaaaggaaatgttcttgaaggaaattgaaaatgctactctggtgaaaacatgaattataagaaaacaaaacagcctcattgcagatagggagaaaattttagtggtctggggagaagatcaacctagctacaacattccctttagccaaagcctaatccagagcaaggctctaactctcttcaatcttatgaaggttgagagagctgaggaagctgcagaagaaaaggttgaagctatcagggatttaaggaaaaacaccatctccgtaacataatagtgcaagatgaagcagcaaatgatgtagaagctgcagcaagttatccagaaaatctagtcaagatcattgaaggtggatacactaaacatattttcaatgtagacaaaacagcctactattgaaagaagatgccatctaggactttcactgctagagaggaaaagtcaatgcc

SEQ ID NO: 916657 - DNA, 4001 bp, Homo sapiens
ttctattcattatttctcttctattgatctatgaagacttatgattagaggtatctgggactaaaaaaataagagaaaatagtataaaatagtataataatacaatcttgccatgaaaattttgtgatcatcaagtttacagtgaatatgagaaagaagttaaaaccacatctgtcaccattacataatacacatagaatatgtatttctgagattagtttcaaagactacagaggactttatagattttatacacttgaaatattttagttgaaaaaaatttaatagaattcggaaaagcaatacttgtttgttttcttcccacaatggctattagcgaatgacttatcccctcatgaatctttgtcacagtctgtgaaataattttattgctttagaaactataaatgaaccactttattgccatggtaaagtattacactaaaagtaagtagaaataaacaaggtatgcatcatgtgcaaggtcaaacaagtgagtcagtataaagaagtgggaatagatttcttgagtcctgtcacccagtcctcatctctaaacgctaaccctcccttttcatgaatatataaacttaagtatacacccacctccttcatatgtgccaatcctggaaaatggcatagtgggggaagttcacaaaataaagatatttcaggaaagcctcacataattgcctggcatttgaaggtactaagctttcagtagtctcttcctatcgttcccaccccccacatcatttttctagacctctttaaagcaccttatagcctcaaattccctacctgacatttatgtgtactaacaaacatgattttccccgaaggaaataaatatggtaattttatgctttttcttcaaatcatcaaaacatataatggtttatctctagcagagtaatgctattttaatctccaggagaagactctgaatatttggttgccaagttcacctattataaatacataatcaaaattgtgttcatcatgaaaataacaatgtatagattttaaatattacataatattataagagcataatatggagaaaacgcataaaaatatcgccctttaacttcatggtaaaacatgaacactttggatttaaaaaaaaatcacaaaacatttaaataagattatcttcctattgatcaccataatatgagctcagagaaagtaacagcctaaactggcaaaactattatcatgcaactcttctgtagctaatcagtaaataaagatagaattctaaatatgaatacagaataactgtaacaccttttattttacaaaatgttgtcaatttcattttattttagaatagtttatatgatcaactgtattacacagcaaactttcatttttaaacgacctttttaataatatgtgtacatattactgtaatataccctatcattttctttaaagaatttttgatcttatgcaaactgggtcttacctattactttggtagatacaatatagaaatgtgaaagcaaaaattgtaatttcattaagatgtaagaacaaaaatgctatactgtccaaaaaaacaaatcctgaagtatctcggcacataattccgccagcattattcaaaacaagtcagcaagaaaatttgtggagaacatgagaaagtatcatcatagcaatttatgaacttgtcacctcagaaatgtactggaaatatttcagaagaataagatttagactgcagaaacaattttctccccatctcggctaagttgcttgctacataaagcttcagcacagtacaaaaaagcagcagatataagtaaatacatagactagctaggaataactgaccgattagagcaaaatagaacaaaacagccaattaactcaccaaatagccttttgctaaaaatctgtgttcttttctttgtctcaggcttctggtttctaaagacaaattacatgcttcctgacagaacgatgacaaaggggcacaccgtgatctcttttctgctctttccactataagaaaactgaaccacaccgcagtctccaagagtaagtacttcatatgagcatgctcagtatctaatttaaatgacttggtatttcatctcagcatatgatgacctacatgcaaataaactgagaaagctgcaaatttaataaagatcattaactgacaataaactatacagaactaccaaatgataactgatttgtttttaacttcataatctttgtggttcatttaactggaaatgattatttctacaagtttattaaataacaagtccttaggtttcaatatagaattaactatgtcaacataagaatcccaaaatgctagaatgaattggaagttgcaaaacatccaagatgtgatcccaaaatgtaaatgggaccagtgataaattaaacaaactataaactatccttatttcacttttcaatctcttattctgttctcttgcctgttcaccaagtaaaacaatctgaaaactatgcagtggtattttaacttctcctttggaaatattaataaagactaataaactgaaatgttcaatgtatttattaaaatgtttgctatcttcaaactacagtgataggatttttcttatctgttgtttacatattaaataattgatttatagatcatacatcacccaaatattgacaaacctatacaaaaatttttaaataatgttgcaagtttgagaaaaagttttataaaaatggcacaaaaatcagcaaaatattctgtgtatgcatgtttatgccatcaaatacataattcacctagtttgttaagtaaattgctgcaatggccattagtctgggatgatgaaaatatggtcaagaagttttctcctctgctccattttaattttcctccataaatccagatctagtacagccccactaaaaccagccagacaactctttcatatctactttccactttcaccttgggtagatgagcaaaaataggaagtgtttgaacacttgacatgcaccaagctcacgacagcaagtcactgacagagtggggctgacccatctttaaatgtacccatatgctaattagtgcttttcccttcttcccaacccttcctggtcacctctattacttccctattgtaaatcacccttctatataaatgtctcatttttgagaacagtagcctcacaatcctctaccctcctgcctcttaacatggagggtgtgggaaggtaagaagacataggaaatagccatcccatggaaacagctaagataaggcccttcctgggacaaggttatcaaaaggtcgcaaaaattaaaatgtgtcaatacgcatatgttttgtgtctctaagtactgtatgtatgggggtgcggtagttctgtagaaagagtaagttacctacagtactcaaagaaagctctatgattcctaaatgagaaagtgaaaattcttcactaaaaagaaacaaataaaaaatctaactgtgatctctaagtattatttgagaacaggttatatatgagtcacggtacgctgcaatacacaatggaaacaaaaatgagtacaactatctctgcttttaaaagagttcaactgataggaaagactaggcaagagtacatatacatataactaatctaagtattacagcaaaagacaggtgctttagtgttcttgagagtttagagaaaagagagaaagcatttgaaggaaggcaattagtagtctttgtgagaggggtgaactttctgaaatgcccaggtgaatactaaggatctagactagacaggagagagaaagaggaggaaacagccaggtcaaggctgagatatggcacagtggaggacctgggaactggtggtgtggagactggagaacttgtattgacaatgcgaatactagaaagtgacggctgtcaacaatgggaagaaagaaagagataaaaactaattattctgggatggaatctggaagcagatggcaagaagtgttctatacc

SEQ ID NO: 916658 - DNA, 4001 bp, Homo sapiens
gcagaactgtcctcaaggtggaggggaaacctgcaggctgagggacagacctggcttccacacccctctgcttggttaggactggaggagagccaggcaggtggagccaggggtggagccaaggcaggcaccctcctgtccctacccaccactggaggagtagggacaccctgaacctttgctcatcttcatcctgactcagggagaggcagatctcaggaaggcctcaaactcctgccaagcagaggcgggagcctgggaggcgccagctctggggtttgatgaccttacccgcagctctttgtctgagacctgtctaacagcactcctcggagggcctggcttctcctggctccgcctctcctgcccagctgctgggactggggtgtgatatccctggagcctggccctgtcactgccctcctctttcccgcaacccaggaaagaagagtagggtaaggggcaggaatagctcaacctctgaacctgtaaggggacagagactccacagcctaggtgtcttccctcctgccccaccaggtcacttttggggcacagcctggactcaccagcacagggtatcctcggggatagagtctgccagcagtgctctgagcagaggctcgatgccggcccccataagtctcaatgcgggaggccacgagtccttggagggggccctcatgtggaggaccaaaggccttcatcccttctctcctgggtcacctccaaagggccatatcttcaatgtccaggagaaagaggtcccctagggctgcaagagagaaaagaggaatggaagggccatccccaatcagtgaatggcaccaggcgggagaccaaggctggtagggggcctgggagggagggtatagtgggggaggagagggccaagggcttggtcacttgttggggggaacatggctgcctcatctatgacttggtgggagtagggtaggtccaggtacatattgggtaggaagccccttggagatgtacctcctctctcacatgtgtgcatatttggggtacaagctcctgcactggtctcaaatgggaacaagggtcacagacaggtctcgggctttctggatacacccaggtgggagggttctccttgcacctagatataaccccatccccttccccatataaagcttgggaaaaagctggagggaggccatggtgggtggggtgggctgggagtgggggtggctggagacagcccagtctgccaccagtttttgtacagcctgtaagcctttacatatttacatagttgaaacaactgctgccccccctgcaaaaaagccaccaatattttgggacaagtaaatattacatgatattcaaattcagtgtccataaacacagttttgttggaatccatcctcttctgctggtctcctaataacctgtgactgcttcttgctagttgggacagacggtgtaggccgcgaagtctctaatctttactgtctggcctttactgaaaggcttgcccatctcctacctgaaccctcctgaccacagacagggaggtgagtggggccagctgtccggccactgcccttagagaccagccaaatagaattagagtttctccagtttcgggctatatatttggtcctccccagactctgggaataccaccatggagctgggggccaggcgtggggctccatccctcccccctaaacctggagggagggcccgccctcgagtgggcagggcctggaagaggagaggcctcctaaggggcggtgggctcaagaaggctgcgcaggtgtttgtgccccgaccgggtgggcctgaggtcctgcctcagccctcccttaccttcctccgattcaggagcagaggaggaaacgttcgctgtccctcctgccgcctcccaatagtcctccctctgagggcgctgtctccctcgcactgctccctacccagggtcctgtctcagcccagcccccggctcccctcctcccgccttcgggaggccaggccttccttccccttcgccccggcttccaggccccgggtcccggccgccccgcccccgggccgcgtagccctcccgccgctcacctgtgcccacaggtgtcaccgcacccgctgccctgcgccgccctccccgcccgcggggctccccgtcgccgtcggctccccggcgatgccagccagccccgatgcccagcctgggactgggatcgagcggcccgcgggagccgggcagcgcgggtccgggcgaggagggcggggaccgggctggcccctccctaccgccagcaccgctcggggcagaggggcagaggggcggggccctggggaccgagcagcccccgccctcacgcagccaccgccttccccggagaggacagctcacgtggcggtgccctcctttccccttttcggtcgcacctgaactcgacacccgccggccgagcgggagggctgggaccgcgcgccctccactccgggccagacccccgcgaggcgctgcagtaatgagggctgagtaaggggcggggcgccgccgggggaggcggcgagggtgacaacctgtggcaggcacccctctctcctgctggtcgcggcgagtggccggccgtccggtcctccccctgcctcggcctagacccctaagcaggcagggagcccgcctgccagctggaggggcagggggccccgtcgctgtgtggagtccaaagtgtgagccttatctctcagaggaccggctggcctgcctggtggaaggtgatactggaaggctatcctggactttgcctttgctccagggataggcagctgaggcctgacccgcacttctcctatgacctaagactcaggtgggggcaccctcccagttcacctgcaaataagcccactcccggctacaccagggtcacccagcccttgcggtggctgctaaaatagatgctgtggggccaggcgcgatggctcacgcctgtaatcccaacactttgggaggccgaggcgggcggatcacaaggtcgggagatggagaccagcctggccaatatggtgaaaccccgactctactaaaaatacaaaaattagctgggcatggtgacgggcgcctgtagtcccagctacttgggaggctgaggcgggagaatcgcttgaacctgggaggtggaggttgcagtgagccaagacagcactactgcactccagcctgggcaacagagtgaaactccatctcaaaaaaaaaaaaaaaaaaaaagaaagaaaaagaaaaagatgctgtggaaggactgacacatgctgggcattgcatgaaaggaccatactttattttctttatttttaaaatttattttttaaaaagaaaatagagacaatatcttgctgtgtggcccaggatggactccaactcctgggttcaagcgatcctcctgcttcggtttccccaccttttcacttctccaaatcatggcacctcgtctgacagaagcactggatatttgagatagaagtgtcctgtggatgtgtggtcattataatctcacaaccatgaaacccaagaccctgtagttggcaggtggcaggtctgaggctcccagcccctcaccctgactgtggtctatttcctgccaatgaactcaacagtgattgatacggctccttacttcttcagagcatcctgaagttcaggaaacactttcagaagcagaatctccttgagttgccaggggaaaaggcctctattcccttttcccatctaggctatgaaacgcatacatgatcagagtgttctagtcctcactcggactctggtgactctattttgtttggaggaggaatctatatctttgggcagtttctaattttgtattccctgtgtccatcctcaaatctgccctctgggattctctttctctgagcttgctgttgtgtgattgctctgctggttcagaagtgtcctctgttcctccagctccttgaaccagcctgtctcctgctcctggcccagctggtgg

SEQ ID NO: 916659 - DNA, 4001 bp, Homo sapiens
acttcagagggaccttcaagtgaatcagaacaagacttagagaaccagtggtctcaggcaccactttgacatttgcctataaaatggcattttttatgaagcagcatggcttacattttacaggtttcttttttttttccttttgagacagagttttgctcttgtcacccaggctggagtgcagtggcgcaatctcggctcactgcaacctccacctaccgggttcaagcgattctcctgcttcagcctccttaatagctgggactacaggtgcccgccatgacacccagctaatttttttttacatttttagcagagacggggtttcaccatgttggccaggctggtttcgaactcctgacctcaggtgatccgcccgtcttggcctcccaaagtgctgggattacaggtgtgagccaccacgcccggcccattttacaggtttctttggtaccaagaatgtgagcaatagacactcctgaccctcactcactccatctggatgtggcttgggaggagaggtgaggctcacagtggcagtgaaggatgatgtggcactgaggatagagagagcatacctgactctcagcaacttggtaatttgacttggtagttttcaaaaactgaaagctcaatatcaatcgtttatccacatttaatcaaagtgtctcaagtcaaagtccctggttgccatgcatggaccaaagagagatatatccctgagaggtcctaggcagagccatgtctgactggcaggcagcagcctcctggacctgtgttctcagctcccggagcttgctggtcatctgcggagccatcacaattggggccgtatgtgtggggatgggaggagagggacccccttaccttgagtttgggggagtgaagcaggccagcccccacatggcccccgtgcctcttctcgggctctggatctcgcagtctcatgggtgacaggcctcgggcctggccagaacccctggcaaaggggacatactgctggaggcgtcggcgactgggatcctgggagaggagcaggggaagttctgggggtgcctccctttccccagaaaccccagagaggtagtaggggggcaggcttggctctagatgttgttcccccaccctggtaagtcgggctggctcacttctccctgcaaaccagtttggtgtggactgctcctgccctgagtcacagcggccactgccggcaaggctaagctgagtgggcagaggcaagacagcctggctccctgagtgggcctggggaagaagtggggcctcctgccgagcaggtgcacagcacacacatgcctgggctctggtgtgtgtgcccccactgcctcctgctctccgtaccatggggggtgcatggacaaggcgtggtgcacacagcattctggtctctcgtaactctccttgtctatgaccagcctccctcacacatggggacgagggcactcacatgtgcagccttctccccaggggcgtgcagcctgcatcccatccagctgggagtggctgcccttctgtgtgaaaggctgaagccacagccacacagctcctcccagggcaggcctggtcacattccttcatttgcctgtggcctgaattaccccacatactttctagtctcccttctcacccacagcctaggaaagtcccatctccaaaggcaaaattatcgtgcattgaggcaggggatgtcccagccacaagcagaactgtcctcaaggtggaggggaaacctgcaggctgagggacagacctggcttccacacccctctgcttggttaggactggaggagagccaggcaggtggagccaggggtggagccaaggcaggcaccctcctgtccctacccaccactggaggagtagggacaccctgaacctttgctcatcttcatcctgactcagggagaggcagatctcaggaaggcctcaaactcctgccaagcagaggcgggagcctgggaggcgccagctctggggtttgatgaccttacccgcagctctttgtctgagacctgtctaacagcactcctcggagggcctggcttctcctggctccgcctctcctgcccagctgctgggactggggtgtgatatccctggagcctggccctgtcactgccctcctctttcccgcaacccaggaaagaagagtagggtaaggggcaggaatagctcaacctctgaacctgtaaggggacagagactccacagcctaggtgtcttccctcctgccccaccaggtcacttttggggcacagcctggactcaccagcacagggtatcctcggggatagagtctgccagcagtgctctgagcagaggctcgatgccggcccccataagtctcaatgcgggaggccacgagtccttggagggggccctcatgtggaggaccaaaggccttcatcccttctctcctgggtcacctccaaagggccatatcttcaatgtccaggagaaagaggtcccctagggctgcaagagagaaaagaggaatggaagggccatccccaatcagtgaatggcaccaggcgggagaccaaggctggtagggggcctgggagggagggtatagtgggggaggagagggccaagggcttggtcacttgttggggggaacatggctgcctcatctatgacttggtgggagtagggtaggtccaggtacatattgggtaggaagccccttggagatgtacctcctctctcacatgtgtgcatatttggggtacaagctcctgcactggtctcaaatgggaacaagggtcacagacaggtctcgggctttctggatacacccaggtgggagggttctccttgcacctagatataaccccatccccttccccatataaagcttgggaaaaagctggagggaggccatggtgggtggggtgggctgggagtgggggtggctggagacagcccagtctgccaccagtttttgtacagcctgtaagcctttacatatttacatagttgaaacaactgctgccccccctgcaaaaaagccaccaatattttgggacaagtaaatattacatgatattcaaattcagtgtccataaacacagttttgttggaatccatcctcttctgctggtctcctaataacctgtgactgcttcttgctagttgggacagacggtgtaggccgcgaagtctctaatctttactgtctggcctttactgaaaggcttgcccatctcctacctgaaccctcctgaccacagacagggaggtgagtggggccagctgtccggccactgcccttagagaccagccaaatagaattagagtttctccagtttcgggctatatatttggtcctccccagactctgggaataccaccatggagctgggggccaggcgtggggctccatccctcccccctaaacctggagggagggcccgccctcgagtgggcagggcctggaagaggagaggcctcctaaggggcggtgggctcaagaaggctgcgcaggtgtttgtgccccgaccgggtgggcctgaggtcctgcctcagccctcccttaccttcctccgattcaggagcagaggaggaaacgttcgctgtccctcctgccgcctcccaatagtcctccctctgagggcgctgtctccctcgcactgctccctacccagggtcctgtctcagcccagcccccggctcccctcctcccgccttcgggaggccaggccttccttccccttcgccccggcttccaggccccgggtcccggccgccccgcccccgggccgcgtagccctcccgccgctcacctgtgcccacaggtgtcaccgcacccgctgccctgcgccgccctccccgcccgcggggctccccgtcgccgtcggctccccggcgatgccagccagccccgatgcccagcctgggactgggatcgagcggcccgcgggagccgggcagcgcgggtccgggcgaggagggcggggaccgggctggcccctccctaccgc

SEQ ID NO: 916660 - DNA, 4001 bp, Homo sapiens
cagagactccacagcctaggtgtcttccctcctgccccaccaggtcacttttggggcacagcctggactcaccagcacagggtatcctcggggatagagtctgccagcagtgctctgagcagaggctcgatgccggcccccataagtctcaatgcgggaggccacgagtccttggagggggccctcatgtggaggaccaaaggccttcatcccttctctcctgggtcacctccaaagggccatatcttcaatgtccaggagaaagaggtcccctagggctgcaagagagaaaagaggaatggaagggccatccccaatcagtgaatggcaccaggcgggagaccaaggctggtagggggcctgggagggagggtatagtgggggaggagagggccaagggcttggtcacttgttggggggaacatggctgcctcatctatgacttggtgggagtagggtaggtccaggtacatattgggtaggaagccccttggagatgtacctcctctctcacatgtgtgcatatttggggtacaagctcctgcactggtctcaaatgggaacaagggtcacagacaggtctcgggctttctggatacacccaggtgggagggttctccttgcacctagatataaccccatccccttccccatataaagcttgggaaaaagctggagggaggccatggtgggtggggtgggctgggagtgggggtggctggagacagcccagtctgccaccagtttttgtacagcctgtaagcctttacatatttacatagttgaaacaactgctgccccccctgcaaaaaagccaccaatattttgggacaagtaaatattacatgatattcaaattcagtgtccataaacacagttttgttggaatccatcctcttctgctggtctcctaataacctgtgactgcttcttgctagttgggacagacggtgtaggccgcgaagtctctaatctttactgtctggcctttactgaaaggcttgcccatctcctacctgaaccctcctgaccacagacagggaggtgagtggggccagctgtccggccactgcccttagagaccagccaaatagaattagagtttctccagtttcgggctatatatttggtcctccccagactctgggaataccaccatggagctgggggccaggcgtggggctccatccctcccccctaaacctggagggagggcccgccctcgagtgggcagggcctggaagaggagaggcctcctaaggggcggtgggctcaagaaggctgcgcaggtgtttgtgccccgaccgggtgggcctgaggtcctgcctcagccctcccttaccttcctccgattcaggagcagaggaggaaacgttcgctgtccctcctgccgcctcccaatagtcctccctctgagggcgctgtctccctcgcactgctccctacccagggtcctgtctcagcccagcccccggctcccctcctcccgccttcgggaggccaggccttccttccccttcgccccggcttccaggccccgggtcccggccgccccgcccccgggccgcgtagccctcccgccgctcacctgtgcccacaggtgtcaccgcacccgctgccctgcgccgccctccccgcccgcggggctccccgtcgccgtcggctccccggcgatgccagccagccccgatgcccagcctgggactgggatcgagcggcccgcgggagccgggcagcgcgggtccgggcgaggagggcggggaccgggctggcccctccctaccgccagcaccgctcggggcagaggggcagaggggcggggccctggggaccgagcagcccccgccctcacgcagccaccgccttccccggagaggacagctcacgtggcggtgccctcctttccccttttcggtcgcacctgaactcgacacccgccggccgagcgggagggctgggaccgcgcgccctccactccgggccagacccccgcgaggcgctgcagtaatgagggctgagtaaggggcggggcgccgccgggggaggcggcgagggtgacaacctgtggcaggcacccctctctcctgctggtcgcggcgagtggccggccgtccggtcctccccctgcctcggcctagacccctaagcaggcagggagcccgcctgccagctggaggggcagggggccccgtcgctgtgtggagtccaaagtgtgagccttatctctcagaggaccggctggcctgcctggtggaaggtgatactggaaggctatcctggactttgcctttgctccagggataggcagctgaggcctgacccgcacttctcctatgacctaagactcaggtgggggcaccctcccagttcacctgcaaataagcccactcccggctacaccagggtcacccagcccttgcggtggctgctaaaatagatgctgtggggccaggcgcgatggctcacgcctgtaatcccaacactttgggaggccgaggcgggcggatcacaaggtcgggagatggagaccagcctggccaatatggtgaaaccccgactctactaaaaatacaaaaattagctgggcatggtgacgggcgcctgtagtcccagctacttgggaggctgaggcgggagaatcgcttgaacctgggaggtggaggttgcagtgagccaagacagcactactgcactccagcctgggcaacagagtgaaactccatctcaaaaaaaaaaaaaaaaaaaaagaaagaaaaagaaaaagatgctgtggaaggactgacacatgctgggcattgcatgaaaggaccatactttattttctttatttttaaaatttattttttaaaaagaaaatagagacaatatcttgctgtgtggcccaggatggactccaactcctgggttcaagcgatcctcctgcttcggtttccccaccttttcacttctccaaatcatggcacctcgtctgacagaagcactggatatttgagatagaagtgtcctgtggatgtgtggtcattataatctcacaaccatgaaacccaagaccctgtagttggcaggtggcaggtctgaggctcccagcccctcaccctgactgtggtctatttcctgccaatgaactcaacagtgattgatacggctccttacttcttcagagcatcctgaagttcaggaaacactttcagaagcagaatctccttgagttgccaggggaaaaggcctctattcccttttcccatctaggctatgaaacgcatacatgatcagagtgttctagtcctcactcggactctggtgactctattttgtttggaggaggaatctatatctttgggcagtttctaattttgtattccctgtgtccatcctcaaatctgccctctgggattctctttctctgagcttgctgttgtgtgattgctctgctggttcagaagtgtcctctgttcctccagctccttgaaccagcctgtctcctgctcctggcccagctggtggtgggactagttttcgggggtgaagtcaggtgggaaaggaactgcagtggcaagaaaccagagtgtgcctagttcctagcccttccctcttcccattcactgtgtgtgtgtgtgtgtgtgtgtgtgtgtgtgtgtgtgtgtgtgtgtgtgtgtgtggtgagagctagacagagatagagagatgtccagggatgacaagagtagccatgagggaaagagttaataagccaggagaggaggtggtgattacggacagtattaaatgacaccccagagacagctggtgccaatggcccctagcttctcctcccagtgtctcccagaaggagtgggaaggaggaataagagggaagatgaaattgagagagcaccaaagacaagcctgggcttacagtgctctggggtgagctggctagaggggcccagtggcaggtggtggtgggtggcggggtggttaaccctttcacttccctctaggcgttgaggtccagtctccac

SEQ ID NO: 916661 - DNA, 4001 bp, Homo sapiens
acccctggtttagggtatgaaggactagacttttctaaggtcacaaggcaaaacagaggcagagccagggcttgaactcagatctgccagcacagtgccttttggctgtgtaagacagtcaccaggatgcaaaagtgcggtgggcagaggcaaccttgggagctgtgtggcccatcctcccctgtggtcctgggaggaagctgctctatggttctcttccttgctctattgttcttctagaaaaaattctgtgttctgagcctcaccagagcatggctgcgaccataggggtgctatttacatgaaagacatcatgaatataccatgtaattcaacagtactaaattgcatgtgggtggtagccccctatatctgcaatggtggccctgcagctgataaaaagcattcacctggtactgttcacgagggagcaagagctccgagagagaaagccgagcaaagatgcaatggactgcctgagaagggtgtaagctccctggctcaggagtgtgcaaactggtgagacaaggcagaagagattcattcaacatcggatgggacactggactagttcacttagacgatctcatccaatgttaaagtataaagagacagtagagtaataggtaaacaaaaataaatgacaaataaaaattttcacgatcccctgaaagagggagaaaaaagcctcacctggcctcccgttccctctctttcccttccttccttccttccttcctccctccctcccttcctccctccttccttccctccctcttcttctctttctctctttttcttttcttgtcttccttcctttccttccttcctttctttctctttgtctctctttctctttctttcttttctctctttcttttctttatttctttcagaagaggaaaacaagtgcccaaaaaaacaaattaatattttccatctactacaaaaattaagcctggcattaccatcttaagaactaataaatggtccaaaaaataggtgcattcacttgtgaaaagttcccacacggcctcttgctgctttttcaggtctaattgatcggtcgggagtttgtgatgtgtttccaagacttcatcccaggtcttatcctgtacatgagggaaaaagagagaacaaaacatttccacctcagtggattgacctgttggctatttgctttggcttgcagttccaaaggaccaagcaacccccgaaatcatgatttcctgcttcagaccctgggcatccctcttgacagtgactccccaagtgacccaagccacagcttctctctgtggggctccgggatgccaattcctcctaatatgcagcatgaaatgcacaatgtgcattatttctagtttaagattcaaatcaattcagattgatgatgttttgaattatgcttgagaatatcatgagtctttttcagtttattgacaaaaaaaactcaaagaaccctaaacccaggactgggaagtctgattccaggttccgttggcaaaacttattgaaattaactactgaagaagcatgaagtgagagctttagagtgcaaagagacctttagaaattgtcttatcaaaaacaacttaacgtttcaaatgaggaaatccaggcccagagagacgaagagtagtaacacccacttttaacatttgtagaggcttcctggcctatgaagtgctctcacatttgttaccttatttaagataaaacgactttccccagctttcagtgtgtttgaggagagcaggccctgctcagtcctgggttcctctcttgcattttgctcttactataaacaaggcagtaatctggcagcttaaaatactgacccgaccttccccaccccaccaaaaaacgaaaagaaaaagtcaaaccccatagttaacagtttgaaagataccttaagaccgtagaagtcatagcccctgaagctggtaattttcacagaggacaggcagttttccagatcagatatgtgcttgtgtttgtctttgccctgctcgaagatggttagaaacaggattttcaaacattgattctttaatgacatgacttcggtagccttggcatctttcgttcattccctaacattcatgataagagatggcatattttgtctttaagccactaacagttccaaagccatttctgagctctagtaggagctgcagaaccacagaatgtcagacctgggggacacaggcccgtgagactaccttgtccaaacctctcattttacaaattaaaaaaaaaaaaatcctaggcacagaatggtcatatagcaaacagtcttatcatgcctacccattggggtgacatagccttcacagtcttaacttttccaaactctggaccctaagatttattaacatcagaaggtacctcagacatattggttcaacccttaatttagcagatgacaaaataaagcccagtgttcaagcgagttgccccaaacaataattctctgctacagaataccagaatatgctggaaactctattttccttagaatggaatcacccacttatttttgttatagtcattttttcttaataatatttgtttaaaaaatctgatttctaagataatatgtttattgtagaaaatttgagaaaaaacaaacaaaaaaaagcatgaaatgtgtcttcacccctatatacccattggaaatatggtattctgatcatattcataattaatttttaaatggtataatgtaccatatttacacatccttttgcaacttgctttttaagcttatattgtgaacattttctttttagttcattcactattctattgcgacatcatgaattgcccacttaaagagttcattttaccaaccaaagcaggaagaagctatcaaataacaatgtgcaaggcttttaaaagtcagcttggctgcatttcaaatgaatgtttatcacaatttttcaacttgttctattgcctcagagtgcacgatattggcatggatctaaacagttttgtgaaagttaatcaatgtttttttcaggagcaagagaaggcacaggttatctgctgttgcaggtagggggctccctgtgtgctgaaaggagaccgtgtcatagtttcagaatgtgctaatgggctgtggctggtttctctggtagggttatggcactgaaagaggaaacctattgtagactcattagcctccacagcagcaaaggaatcttggaaccagttaaagacctcctactgcaattgggacatatgccttttgttgatgtctgaaaccatagtgactgcatgttgtggaaataaaaaatcagcagccagttggaaaagaaagaggctgagacaatggaagcagcattggagttgtgggaaagtgagtgccaaccccgtgttttgaagggcactcaccatggctttctatgggtttgaccagcctcctggccaaatggctgggtgggtattccagtgaggggagaggagaccattctcccagtggtcacattaactcttgaaaacgacacacccatttagtaccttcttgcctccattgtggtggcagtggttaggagaggcaatgagaagcatttgaaggttacgagagaggatacacagggtaaagaaatcgagaagccaaggttaattctggagtctcaaacttagtaactaagaggtaggtggcatgaagatgtacagtagtcattggtgacatggaactggagcaaaactgaaggttaagactgaatatataaatttttggagtggttgacaaatcaatgagaaaaggcaagatctatggagagctctaatgagagaatggagggaggagtttccaggtctggtgatggggactcctacagttgaaggaacagggccacatcaggggtagaacagactcaaagccagactgcctggaactgctgcatgctccatagcttatgagctgtgtgtcctcaggcaaactagtcaaactctctgaatccatttccccattttcaaaatgagaa

SEQ ID NO: 916662 - DNA, 4001 bp, Homo sapiens
agcctctcccggcggctggcgaccacagcgcaccctgagcagagccacggcaccgccccctcgcaccggctcacgccaggggttcggttccagcgcaagcctctgttgcaggctggcatttctccacgctgagcgggctagcaactcttcagaccacagcacttgcgttgccggtggggggcggagacagggggccacaaaggctggggtgtggcagggagccctttaggttcaatggcttctctgccgagggcactgtgttgctaactgttgaccaagagggtcagacccacacgcctgctgggactacacggaaggggcacagagaagtctggagaagcgaatgggaaagaggggctgcgcgaggagactcagccccaaacaagcgtccccgtttggacagggaaggatggcaatgggatgcagccactagagttttgagtctaactccaaccctccccgcccccctttttacactctccctttggggacctcaggccgtgctccaggtctcggggaccgtccgagaggagccttcggacggccgcccgcggtgtgaacctgagacctggtaaatgtcacccggctgtacccccgccccgccgctcgcccccagctcgttctgcctcggcggcggcggcggctccccggcagcagcgctctccgcggcgccccgggggcaggacttacgcagtggctctcggccgtcttgaagtcccagctgaccctcttggcgcgcgcctggatctcactcattctgaagaggcagagcgccgtggtggtgggggagcgccgctcctggccctctccagcggccgcgctgaacactcccgcccagacgtccagggcctccactaggctggaggagaggagcaggcggcggccgtcggggtggccgtggccgcagtcgagggatgcctggccctggaacagcacctcggtgctctgcgcgatgcgcgccatgctgggccagccggtggcagcgccgctcgtgtagttgtaggggtagtaggggaagtagatgctgccgttccagagaaaggcgtccacgaagtgcaggctgcccgcgccctcgcacagcttgaggcgccccagctcctgcgtggccaggctgcgcccctccgtgtccttgagcgcgatggccgtgtcgtggtcggatgccgcggggttgcagcggctcgccgtctccggctcaggcagcacgtaggtggcggccaccgccaggtaccagcggttgttccggcccgcgcggtacaccacgccggccgtcgagccctgcgggtggcacgacaccacctcggtgccgttgcgcagggagttgcggctcaggttgcccaggggccgcacctcgcaggcgccccggtcgaaggtccagccggtgagcagcagccccccgaggccggccgccccctcgcggtagggcagcagcagcttgctgaagctgctcccgggccggggccgcgcggggggcgccagcgagaccggctctgtgcagttgcccgcttggtcccggtacaggcgcgagaggctgtgctccaggctgtagtccagctggtccaggcagctgccgctcgccacaaacacgccgtcctcctggctcgccgcgatggctccgatggcttgctccgaccgccacacgggctcgtccgcgccccggccgggagccgccagtgccagcagataggcgagcaggggcagtggcgctgcggggcgcggggggcgcggcggcgccttcctccgggagacctccatggggctgggggggccgcccccgggcagggcgcgcggcggcgacggcggctcaggcgcgcggcaacggagacgcgggcggcggcggcggcggttcctgcgcgcgctcgggctcccgcggccgccccatccccgcagctcgcccaggaaggagagcggggagggcggcgcgcggcaggctcgctccggcagcctgtgcagcggcggtggcggcagcaagccctgcgcgctccggcaccgtttcctcctcgccctccttcgccggagagttcctgtgtgcagcgctggcgctcgcggggaggcgcggaggggaagggaggggacgggcggagaggagcgaggcgggcggggagggctggagaggttgggtgcgcttgtgcgtttcactttcccattgtgaaagtgggatgcaactggcccccttcctcatcctctcttcctcctccgccctccgcctcctgcccgcccgcccgccctccctccacgcccatctcccctcccctcttgattcggtgagatagggaggagggaggtctcgtaatttgggttactgtgtaggtggcctctttcatctattcataacaaagctcagccgcccgccgcggccgccgcggccgccaccatcgcccccttggctcgcctggggctcccggggcgcgctaacggcgcacggagcgggctcccgcgcccgtccgcccgcggtgctgctccaacgcccggttttgtttacgacagcagccgggtcggggatacgccaggcgcgcggagcgaggatccagggtgcgaaggggttgcagctgaggccccgggctcgggccacagggctgctgcgagagcggctgacaggtgtggagcggcgagagggaggccccggggaggcgcgcgggagacatggccgagccggagactccggggaccaaggcgcccctgtgacagggtgtgggtttccccgggtcggatgagtgaggtggcagaaaggcaggcgccacactctcgttctggacaatccccagggccggagcgcccatatttgcaaaggttctctaatctcccttggcaacagagtcccaggctctcaagcctagcacttggaaagttctgctcaccatctaacctaatgagcggggctaacatttactgagcacttactacgtgccgggtgcgcttgtgaactcaccacatgggttaagactcataattctcataacagccctattaattagtgactgttattgtcatccctacttagtagtccaggagaatggttatagaaaggttgtggaacgtgctggcattctactgctggtagatatcagagccgagattcgaatccatatctagccccagggcctcttacatacctggctctagttaagtgccacctgtggccattgccataatcccccagagatcattctctgtagtgagactgaaaagttcctcaagttaaatgcaccaaccagcccccgccctgctttctactattagacccaagtccccgtatttccctcgaggctctccatctgtctcatcattacccacttttatcctttggaccccctgaggtctcaccacctcacccagagggtgaataacagctgggttgcccccacagccgccaagaatttctgaagcacagggaatcattgcccactggggaataggttcatgatttctcggaatggggcttcccagaggatgcacaaatgcctcccagcttcccggggcagctgcgggcaccatcagcacccttacagtctggcagatgagccagggggtgcataggagtggagggtgctgaggacctctatggatcgttgggaaatgatctctgttccttcccaggctatttccagaccccaggccccagggagggcaattggctgctatcccctttcttccttccctccaagttccccagctcgagatgctgttttgggaagggaaaggaatgaggtggcttttgtcccatgctgagtcctgccgaaggttgcaggtttcaaacttctccaacagtgcttcaagttctccccagtgctgagggatatggcaggagttctggaaggcttaaggaaagaagggtgaggtggagggagaagaagagaagtgtgagtttctgctctagatgtgaagttcaaggatcctatcatttcagcagtggctctcatacactaaagtcagagtggtcatcttttcattcataagcctttcatttgcaattggataacattatctttgcctggcaggaggca

SEQ ID NO: 916663 - DNA, 4001 bp, Homo sapiens
tactttaaaaatttgaatattcgttagccatttttaaagtttattgtaaagttctcgtaaatattaatactcaatatcatgtaattcctttcccctttttatcttgcataacagagggtgtaaatccatctgttggaagatcaacaattggaacgagttttggaaatgttcatctggacagaagtaaaaatgaaaaagtatcaagaaaatcaaccagtcagacaggaaataaaagctcaaaaaggaaacaggtggatttggatggtgaaaatattctctgtgataatagaaatgaaccacctcaacataaaaatgctaaaatacctaagaaatcaaatgattcacagaatagattgtacggcaaactagctaaagtagcaaaaagtaataaatgtactgccaaggacaagttgatttctggccaggcaaagttaactcagttttttagactataaatttgtgtcttatatgctttaggtttatgtatctataaaccattcaccaaagacatgcttaatttttaagagatcaaggtgtaaattatgatgatttattattttggtctacagtgtatgtaaggttagtatgttaagcattgtttaaaaatactagtaagtcataattatgcagaattttcacaaagtttaatgcacagagaaagcatatcatttcagttactgatacatcttaacactactttcttttaaaacagacatttaacatacacaagttatagtagcagtatgggcttctcctcccattggcaattaaatgcttttattttcttctgaaaagatgatgtggaccaacaggtatcagacttgccaacaaggtcggtagactcttcccagcatacatctgagcactgaaggaagaagaaagtttaaattgtttaaaggactataattatcacacaaaatttattaagaaaaaaagaatggatctagtataactaattctgagtaaaccaaaatgataataattaattgttgctatttaatcccacatttttggcaggtgtaattgagccatggtcttatttgattttgttatgattgcatccaaattcactttaactcagagttctgtttaatggtggtaggatgtaagaattgaattttgaaaagactactcactgtcaaaatctctccttcctataggaaatttagctgagttttcttcatccccaatttctctcttttcttgtgttgattcagtattctgaactccattctcagctgggaaagctacagatccttttagtgcaagataaggttttatagccagattcagtggcagaccatgatttaagaaattatgtttggagcctgtgttctgtaaagagaaggttgatttggtttttagctatcgtattcggagtggaactataatacaattgtataatattcttgttgatcaattcaaagttactctgcactgtttttgactttttaaaaataccttagatgcaaatttataggagaaaaaacactttcagataagaggtgtttgctgggatggaagaactacctggcatgtaagaaatatcgtcagtcgtcctaatgcatattgtgactgtttgcatatacttctgtttataaaagtatcagttttacttttcagaggatttgtaagaatcatttaaattttcattgaaataaacgacaagtcacattgccacttacctttgaaactttattttcctcttcgttcatgaaactgctctcatcatttttatattgttccagggaaggagcaataactgatttttctgcagtgtcttccttctgaaagcctttccccaacctgaatgtattaaataccatgtcatcatctaaatttcttatggacttggatgctgaaagtaaaataccttgagaaaacaaagaaaaagttagtattaatatataggaagagagattcatttttgccattcttagtttgatgtttgcatacagtcaaacaagaaagaaaatgaaaaatttctctgtcagcctgcttggtaaacgattctgtatctttatatattttctagcttgaatagaaagcacttcaaagaattatacttttcatcattttagaaatgactcattagattgaggctaacctttatgcagctgctaatacctacattgttttggttttagtgacacattgtttattttgagtgtgaattttctcagaatctgactaagatccttggtagaatgctttctgttgagtagattatagtctcttgaaaatgggttgttattaaggaagaccacaggacatcaggctctctctatattattgtttccttttgtgtattttctgattaagtaaagatattaaaactcaagttatttcactcaaggatgataaggataaagttttatttccttttaatcctgattaaactgaaataatcctcaaaagagactttcttttataaatacttgatatagtttttggtgattaaagtacatatgcctgtcagtgtgaacaaaaagccattcatgctatatcaaaaattgacctgtcaggtgtattttatctctgcatttacaaaaggataatatgtacaaatatttattaatgaatttagaaattaatgaattagtccatgaaaagaatatttatgtgcccataaacattacttttggatgatgagtttatgttgtatgacttttaattaaacatttcagagttaatttctaattttgaccccaatgaataagataatacattcttttatatgtcttctggtacatatatgtaagaatttttctagagtatatttctcagtatggaattactggatcatggagtatgtatatgttcagctttactaatgccaaaatgttttccaacatagttgtaagcgatttgtgccctcgataagcagggtatgagaatttccattgttccatgtcctagctgactcttgtgtctcattgtccttttaatttgtattttcctaattaccaaagaggttaagtgtcttcccatatgtttctgagccatttatgtttcctcttatgttaaatgctttttttttttttcttttttggctttgtccatttttctattgggttgtctttttctaatttatttatgggagttctttatatattctggatattaattgttagttatatatgtttcaattattttcgctcagtttgtgacatattttcaacccctctggtgtcttttggtgaaccaaactgattaattttaatgtttaaatatttttcttttttctttatggcaactacttttaatgtgttgtttttttttagaaatccttctcaatccttagattattaacgtgttttcatatattttcttctaaaagtttaaatattttgactttcatgtttaggtttgtaattcatctgtaattttgtgtatgatataagatagagatgtaattttactttttccaatgtccttatatatttcttgaagaagtcatcctgtccccactaatctgcagtgccatctctacagtatatcagatttctatatatgtgtgggctcctttcagaacgttctattccacagccaaatctacagtattaatataactttaaaataatttttaatatctggtcaaatttcccagccctctacttacccacatgtttttcttttacagcagttccttagctattcttagtcatttcttttccatataaatcttaaaatcagcttttcaagttccgtaagaacacttgacaggatattaaggttctagttaggtatcccttatctgaaatgcttaggaccagaagtatttttggatttgggatatttttttcagaatttggaacatttgcattatatcagttaagtatcccaaaatctgaaatctgaaatgcttcaatgaatatatattttttagcatattgttaatgcttaacaagtttcagattttggagcatttttggattttggcttttcagatttgggatgctcaacttataatcacattggttttatagatttatagatta

SEQ ID NO: 916664 - DNA, 4001 bp, Homo sapiens
agcctcaaactcctaggctgaagccatcttcctcattagcctcccaagtggctaggaccacaggtgctcaccaccaagcctggctaattttttttttttttttttttgagacagagtttcgctcttgttgcccaggctggaaggctggagtacaatggcacgatctcagcttactacaacctccgcctcccgggttcaagcgattctcctgcctcagcctcctgagtggctgggattacaggcatgcaccaccacgcccagctaattttgtatttttagtagagactgggtttctctatgttggtcaggctggtctcaaactcccaacttcagctgatccacctgccttggtctcgcaaagtgctgggattacaggcgtgagccaccaagcctggcctaggcctggctaatttttttacgtttcgtagagacaaggtctcactatgttgctcaggctggtcttgaactcctgggctcaagcaatcctatgaccacggcctcccaaagtgctgggattacaggtgtgagccactacacccggcctccttatctcttttcttttcttttctttttttatttttttgagacagagtcttgctgttgcccaggctggaatgcaatggtgtgatctcggctcactgcaacctctgcctcccaggttcaagcgattctcatgcctcggcctcccaagtagttgggattacaggtgcgtaccaccatgcccagctaatttttgtatttttagtagagatggagtttcaccatattggccaggctggtctgacctcaagtgatccacccgtctcagcctctcaaagtgctaggattacaggcatgagttactgtgccgggcctcatcccctttctttttttttttttttttgagacggagactcgctctgtcacccaggctggagtgcattggtgtgatcttggctcactgcaacctctgccttctgggttcaagtgattctccagcctcagccttctgagtagctgggactacaggcatgtgccaccatgcccagctaatttttgtacttttagtagagacgggggtttcaccatattggccaggctggtctcgaactcctgacctcgtgatccacctgcttcagcctcccaaagtgctgggattacaggcgtgagccacggcgcccggcctcattccctttctaatgtgtgctgtaaccctagttgattctgctgggggaggatctggaatcatctattgagcatcccaccactagaacaagagaagtcataagataccccattctttctccacttccaactctcctcagagcagcacgggacattccagaccctctcaccaccccacccccgccccttgctcctgtcacgaggcccaatcccccagagccctttcatgtgatgctcagctgagacccctctgcctatctctccagccccagaacaaaaggtctgggctgtgttcacccgtacccatcccaagaggagaggattgtatctccttagtgttcttacccaataccacattctctgactccccactttaaatctcctaccccaagagacgtttcctaaaagagtctcctgcacatttcacccctttggagcccgtgctccagctcactgccaaggaagcctcagaatcagtgccacagagaccttctatccttctgcccctccaagcatatgagattattttcaggcaaaatcccaaatctccatgtagggagggagcccaggtgcccacatcctcactaaatcaaatgagtgggagacgcctgaaatattgccgctatctcccattaggaggacagaaaccagagcagggggaattcatccccaagttcacacctgctcatgtccacatatccacacataccttttgtagcccccacagccagcaaagcacctatcacagccaaatgaagaaggcatctttttagcaccagatccattgtgttcttccctccagcaaccaaaggcactggggggactgggataggcccctatataagaaaagggtgctcatttgcatagcccttcctcttctccctcagagaaggcctgggaggggccggaggagaggaaaaaggaaaaactgacaaagggatcctggtccctagacattgctttcccatcctgctactcaatgacagtttctggtttcactgggtcactctcatcttgatgcactcccgggcaagagctaactgaaaggcagctgcgtaacacataccagacacaacagtttatcatgggagagtgaattaaaccaggaacttctcaaaaagacagaaacagaaccctgcatcccaaaacagagacagtgtcggggtatgctatgaggcagaggcaacgactcctctgaggcccaggattcctttgcaacgagattcccggcttcctggtttccaaaggaggctcctgggccaggtggaatttaaccttaggtcgatacatattttccccaggattggtgaaaatagtgagttagaaatcaagaaatccctacagactagagacataggtaggaaacttggacccaaagcaggtacttgggaagagtgttcagccgccccaccggggaagaaacttgtctagcccccaagaaccaaacttgcctggggcgggatcatttgcggggaggagcgctgggctcgccccccggctctgacgttgaccaatagaaaggcctgggggcggagccagggaaacgcgggaagcaggggcggggcctctggtggcggtcgggaactcggtgggaggcggcaacattgtttcaagttggccaaattgacaagagcgagaggtatactgcgttccatcccgacccggggccacggtactgggccctgtttccccctcctcggcccccgagagccagggtccgccttctgcagggttcccaggcccccgctccagggccgggctgacccgactcgctggcgcttcatggagaacttccaaaaggtggaaaagatcggagagggcacgtacggagttgtgtacaaagccagaaacaagttgacgggagaggtggtggcgcttaagaaaatccgcctggacacgtgagtggcctctgtacccgggactcctaactggggacctccttgattgtcccccccaaccccccacgggcgggtagccgtccagggaccggaagagagcagggagggacttctttagaagtggagaggtgggttgggggccagtagaaggtgaagagtatacttatactccctggggagagtatagggtggtgtggaatccatggaaaactttcttcccaaactgagccggatcgtgcccccaaatgtgcgactacagactcggggagagaaaggaggtctctgagatgaggtccaagactctccatggagtggagttatgtgggaaccggcgagaatcgcctttctgaatgaagagccctcttcactgccccaccctcaccttagaattctctcctctttccaaagaatggcagttgaacctcactggcccctctggggaggctgggggctactcctgcattttttcccctccattacagtctccctgcttcaccttcaccaggcggctttacttacctacccctgggaaaagaggagataatggccttaatatatccaaaaaccacaccctgactacccaagaattagctcttaccatcaccctttctcttctctcactttcctagggggtgctgggtggtgtctccttgggggaaagaaatgactaggtgggggggaaaggaatatttgtaaccatattcccatctctgctttcccaacctctccaagtgagactgagggtgtgcccagtactgccatccgagagatctctctgcttaaggagcttaaccatcctaatattgtcaagtaagtatgcgtctgagaggtgatccagctggaaaggaggataagttctgtctgtacagtgtgggcatttctctctctcacacacctccatttcctcaaactttccttctctaggctgctggatgtcat

SEQ ID NO: 916665 - DNA, 4001 bp, Homo sapiens
cctcccaggttcaagcgattctcatgcctcggcctcccaagtagttgggattacaggtgcgtaccaccatgcccagctaatttttgtatttttagtagagatggagtttcaccatattggccaggctggtctgacctcaagtgatccacccgtctcagcctctcaaagtgctaggattacaggcatgagttactgtgccgggcctcatcccctttctttttttttttttttttgagacggagactcgctctgtcacccaggctggagtgcattggtgtgatcttggctcactgcaacctctgccttctgggttcaagtgattctccagcctcagccttctgagtagctgggactacaggcatgtgccaccatgcccagctaatttttgtacttttagtagagacgggggtttcaccatattggccaggctggtctcgaactcctgacctcgtgatccacctgcttcagcctcccaaagtgctgggattacaggcgtgagccacggcgcccggcctcattccctttctaatgtgtgctgtaaccctagttgattctgctgggggaggatctggaatcatctattgagcatcccaccactagaacaagagaagtcataagataccccattctttctccacttccaactctcctcagagcagcacgggacattccagaccctctcaccaccccacccccgccccttgctcctgtcacgaggcccaatcccccagagccctttcatgtgatgctcagctgagacccctctgcctatctctccagccccagaacaaaaggtctgggctgtgttcacccgtacccatcccaagaggagaggattgtatctccttagtgttcttacccaataccacattctctgactccccactttaaatctcctaccccaagagacgtttcctaaaagagtctcctgcacatttcacccctttggagcccgtgctccagctcactgccaaggaagcctcagaatcagtgccacagagaccttctatccttctgcccctccaagcatatgagattattttcaggcaaaatcccaaatctccatgtagggagggagcccaggtgcccacatcctcactaaatcaaatgagtgggagacgcctgaaatattgccgctatctcccattaggaggacagaaaccagagcagggggaattcatccccaagttcacacctgctcatgtccacatatccacacataccttttgtagcccccacagccagcaaagcacctatcacagccaaatgaagaaggcatctttttagcaccagatccattgtgttcttccctccagcaaccaaaggcactggggggactgggataggcccctatataagaaaagggtgctcatttgcatagcccttcctcttctccctcagagaaggcctgggaggggccggaggagaggaaaaaggaaaaactgacaaagggatcctggtccctagacattgctttcccatcctgctactcaatgacagtttctggtttcactgggtcactctcatcttgatgcactcccgggcaagagctaactgaaaggcagctgcgtaacacataccagacacaacagtttatcatgggagagtgaattaaaccaggaacttctcaaaaagacagaaacagaaccctgcatcccaaaacagagacagtgtcggggtatgctatgaggcagaggcaacgactcctctgaggcccaggattcctttgcaacgagattcccggcttcctggtttccaaaggaggctcctgggccaggtggaatttaaccttaggtcgatacatattttccccaggattggtgaaaatagtgagttagaaatcaagaaatccctacagactagagacataggtaggaaacttggacccaaagcaggtacttgggaagagtgttcagccgccccaccggggaagaaacttgtctagcccccaagaaccaaacttgcctggggcgggatcatttgcggggaggagcgctgggctcgccccccggctctgacgttgaccaatagaaaggcctgggggcggagccagggaaacgcgggaagcaggggcggggcctctggtggcggtcgggaactcggtgggaggcggcaacattgtttcaagttggccaaattgacaagagcgagaggtatactgcgttccatcccgacccggggccacggtactgggccctgtttccccctcctcggcccccgagagccagggtccgccttctgcagggttcccaggcccccgctccagggccgggctgacccgactcgctggcgcttcatggagaacttccaaaaggtggaaaagatcggagagggcacgtacggagttgtgtacaaagccagaaacaagttgacgggagaggtggtggcgcttaagaaaatccgcctggacacgtgagtggcctctgtacccgggactcctaactggggacctccttgattgtcccccccaaccccccacgggcgggtagccgtccagggaccggaagagagcagggagggacttctttagaagtggagaggtgggttgggggccagtagaaggtgaagagtatacttatactccctggggagagtatagggtggtgtggaatccatggaaaactttcttcccaaactgagccggatcgtgcccccaaatgtgcgactacagactcggggagagaaaggaggtctctgagatgaggtccaagactctccatggagtggagttatgtgggaaccggcgagaatcgcctttctgaatgaagagccctcttcactgccccaccctcaccttagaattctctcctctttccaaagaatggcagttgaacctcactggcccctctggggaggctgggggctactcctgcattttttcccctccattacagtctccctgcttcaccttcaccaggcggctttacttacctacccctgggaaaagaggagataatggccttaatatatccaaaaaccacaccctgactacccaagaattagctcttaccatcaccctttctcttctctcactttcctagggggtgctgggtggtgtctccttgggggaaagaaatgactaggtgggggggaaaggaatatttgtaaccatattcccatctctgctttcccaacctctccaagtgagactgagggtgtgcccagtactgccatccgagagatctctctgcttaaggagcttaaccatcctaatattgtcaagtaagtatgcgtctgagaggtgatccagctggaaaggaggataagttctgtctgtacagtgtgggcatttctctctctcacacacctccatttcctcaaactttccttctctaggctgctggatgtcattcacacagaaaataaactctacctggtttttgaatttctgcaccaagatctcaagaaattcatggatgcctctgctctcactggcattcctcttcccctcatcaaggtaatgcttctcatcagctcctctcatcatgggcatgtcttgggggactggtggcaggcaattcagggtgatattttatgattttggcctccttctgagccctcatctcctatacacacacactccccttctttttgtgtctccttccctgctcattatattcattaaccctagggttggactgaacaatcaaagttgaaactctagtgagtcaacctagcaactcaggtgggaggtcagatgaaactcagataaacgggatttgagagcacttggtaaattcctccaaaaagcccttccatttggtggaagacctagctagtgagtccctattgtctattttagggctggattcttcactcccagagctactttcaatctattaacaaacattttttcaatgcacaggatgtagaaaagggatggaaaattgagtaagacttggtccttatcctctctgggctgacagtccattgggagaaatagcttgtaaatatgtaactataatccaacataataaaggctttagtagagttttaggggc

SEQ ID NO: 916666 - DNA, 4001 bp, Homo sapiens
catacgttccaaggtactgaaaatatttcttgctgacagcaaacagtcctccagccatggtaggtgatctgatggggtcaattcttgatatccgcctgtccctttcctgtttggggacagaatgccactgaaatgttaaacgccagtcaaacccaccaatcatgggctcccctatctgcatatagaattcaaaagtattccaatcaattgtgtctataacaggacacacaactgctgtttcatctctcccaatcctttccaaaagcggttccagccaaccggaattacactcacagtgacaatccaggaaagtgaggacgtccccagtggcgaaagtggccccaatcagacgggccctaaccagcccctctcgcttattggtcctaatcaagcgtactctatcaagattgctgatgtaagtttcaagttgtgtcttcaaataaactctgtcactcaagtcatccaccaagatgatctctttcaaaagaactgcaggagaagtttctaaaacactgtgaatggtacggagcaaagtcgaccaggcttcgttatagaaagcaatgataacagaggtggtaggaagtgtcctatagttgaacttctgggacttacactcatacattcttttatcctctatgtgtcgatgcagggaaatcctgtcactgaggtaaatattgatggcgtatctctcaatgagttcttcttgctgcttcagttcatcctcgttgagctggagtttgctggctttcccccactccccaagtgcacgggaatctgcagggggcttcttataaagcggtcgagacaaatcctccgtatttttctggaggtctgagagccttcttgaccccagctccctggcacggccggctcctgcggaggcatgaaaagtagagaccaagagctccacgaagatataggccactgttaaaaacgccagcagcaggcagctcttgcctgcccaagtccacctcaccgccatccggattctcagggctgaggcgcagacgcggccaccaagccaccacgcaggggaagggcggcggaacccacagctcgagctcaggtacttcccagcaggttcttcctttcatgcaggcgctaggctcctttccagccacccaggctttccaggggtcacctgagccctctcggtcctcggcctccggcacagcccaactcctctctccctacttcctcctgctcggctcacaacttttcacaaactctccagccaacaccccaccctccccgggccgaggagaaacccctccccttcccactcactcctcctggtggttagtttgcgaaagtcgtccgccaggcccagaccgctggataggaggctcttggccgggccgggggctgggggccgggatggcagagggggccctagctgcgccccgccgcgctgggccctcgtctccgggtgctctcaaccctcatacaggcccttagccgttctcctagggaccctgcccggacaggaggaaaggtttccggcccatggagtttagtctcattacaaaagcaaaacaagaataagacttaccaagttgcttgccgttggggctgaggtccaaggaggtgatcgcagctttgtggcctttgaaataacgctccagaacggggtcctcctggaaaggaaagttgtcaagttttgaaagccgccgcagacctcgaattctggcggctgggatccacgctgccacttccccggagtccggcttgggaatggccacccaggcggcggcttggctgggcggcggggccgggcagcagcccacccacgggcgcggcgcccagtcctgctacagggagacgccggcgccagctctccccgcagagcccgcaaaacgctctgttcgcgcttcccagagtccagcgcatcgcaggaaccgcggcccctttgaaatgcacgttcccgggccccgcccgctggcccaaggcaggcaggtgcgaggatgcgcctcggctttggtactttttttttttttaatacttcctaggtgattctgacgcaggcgctccacggaaaccctccgagaattctgggggccgtggggccgcccagctcagtccggagctccggaactcggggaagagcgtccgggagccgggtctgggttccgcactccgtccgccccgatggcagagagtgagatacggacgccccgggacgaggggctcaggacccggctacggacacctgcctccatctccctccaggtgcggcttcggcccggacctggccccgcagcccgcgggacaggctccagggagggaccccccccacctccaacccgtccttaccgtggctgaggccatcgggggagtggtcggcccaaggctcctgtgggtgggggaacccggagaggggaggggagaggatggggaaggagaggggaccgtgcggctcccggaaccgtctgcccagagcggcagcgcctcccggtcactacaacaacggcggcccagtcaaaccccgcgctccaggcatggccagccgagccccgagacaccgccagccctgtaaagagaggacgggaggtatgcgccgggtcagctgtggccacacaccaagccatgttaactaacactcgcgttctccctggtttgatgtcaggaagtggggtagtaaccaggactggaataagagcgatgaatggaagggcgttgtgagcctgtgatcgatgcgatcagagttctattacgttttaaagagacagcacccgtgacgtttaaggtgatcccctaccgcttattttgttgacgtaaagctttgacatgaagaggggcagcttgctagttattaatatactaaaaggaactaaatcccctgagggcagatttgaatttatttaaccactgttttccacacagtgccctgcaggatattgatatagttgctggatgtgcgtgatgaatgaatgagtgaatgaatgaataaatgttgtgcatgcacttaataattttctgcgatatgtttccattctcatctgcttatttgcgtataccttagagcactaaacttacacagctggatacttaaagtctttaggaagacttggaaacatggttttttttgtttgttttttgtgagaccacgtttctacagcaggctttgttacacatagtatcatttgtgcttcagccaaacaatgaagttggtagaattacaaaatgttttcaatgtttccaagttataaacttgattcctagatattggtcttagaggtcacacagagacagttcttctaattccaagtccatatcctttttttttttttaaccctgcctcaaagcgtgatgttctgagctgaaaattacatatagtgtaaagatccttagcaacatcaaagggcatgatagaacacagctggtaagacatgtgttttatgcaaatgaaaggtatgctacacaccttaattacagattccctagttgtctagtgattgagtttaattttattgaatatggtacttaacaactaaacaggtaggctttagattacagtattagttaatttaagtatacacttgttaaatatctgttgtatgtttggccttgagggacacaatgatgactaagatatttcccctaccttcaagaactcagcaatctagggttggtgagtctcatgctttagcatttgtaatgttgatttgggggctccatttccagagatgctgaatcaacatatacaaggtgggatccagggcccttctgatgtaacaagctccatagatgattactatgggagtctcagctgtctatgttgagaaacactgcattagtctaggagatgatatgttaagagtgttgatatcagcaacttgtcagcaaactgttgcaggactcttagttttgctacatattaccagtttaggcttgatttattttaaaagcctgccatgtttaaaactaatgctggatactggtgggaatgtaaaatgatgtagctctgtgaaaaagtttgtcagttcctaaaaagttaaaca

SEQ ID NO: 916667 - DNA, 4001 bp, Homo sapiens
agttcttcttgctgcttcagttcatcctcgttgagctggagtttgctggctttcccccactccccaagtgcacgggaatctgcagggggcttcttataaagcggtcgagacaaatcctccgtatttttctggaggtctgagagccttcttgaccccagctccctggcacggccggctcctgcggaggcatgaaaagtagagaccaagagctccacgaagatataggccactgttaaaaacgccagcagcaggcagctcttgcctgcccaagtccacctcaccgccatccggattctcagggctgaggcgcagacgcggccaccaagccaccacgcaggggaagggcggcggaacccacagctcgagctcaggtacttcccagcaggttcttcctttcatgcaggcgctaggctcctttccagccacccaggctttccaggggtcacctgagccctctcggtcctcggcctccggcacagcccaactcctctctccctacttcctcctgctcggctcacaacttttcacaaactctccagccaacaccccaccctccccgggccgaggagaaacccctccccttcccactcactcctcctggtggttagtttgcgaaagtcgtccgccaggcccagaccgctggataggaggctcttggccgggccgggggctgggggccgggatggcagagggggccctagctgcgccccgccgcgctgggccctcgtctccgggtgctctcaaccctcatacaggcccttagccgttctcctagggaccctgcccggacaggaggaaaggtttccggcccatggagtttagtctcattacaaaagcaaaacaagaataagacttaccaagttgcttgccgttggggctgaggtccaaggaggtgatcgcagctttgtggcctttgaaataacgctccagaacggggtcctcctggaaaggaaagttgtcaagttttgaaagccgccgcagacctcgaattctggcggctgggatccacgctgccacttccccggagtccggcttgggaatggccacccaggcggcggcttggctgggcggcggggccgggcagcagcccacccacgggcgcggcgcccagtcctgctacagggagacgccggcgccagctctccccgcagagcccgcaaaacgctctgttcgcgcttcccagagtccagcgcatcgcaggaaccgcggcccctttgaaatgcacgttcccgggccccgcccgctggcccaaggcaggcaggtgcgaggatgcgcctcggctttggtactttttttttttttaatacttcctaggtgattctgacgcaggcgctccacggaaaccctccgagaattctgggggccgtggggccgcccagctcagtccggagctccggaactcggggaagagcgtccgggagccgggtctgggttccgcactccgtccgccccgatggcagagagtgagatacggacgccccgggacgaggggctcaggacccggctacggacacctgcctccatctccctccaggtgcggcttcggcccggacctggccccgcagcccgcgggacaggctccagggagggaccccccccacctccaacccgtccttaccgtggctgaggccatcgggggagtggtcggcccaaggctcctgtgggtgggggaacccggagaggggaggggagaggatggggaaggagaggggaccgtgcggctcccggaaccgtctgcccagagcggcagcgcctcccggtcactacaacaacggcggcccagtcaaaccccgcgctccaggcatggccagccgagccccgagacaccgccagccctgtaaagagaggacgggaggtatgcgccgggtcagctgtggccacacaccaagccatgttaactaacactcgcgttctccctggtttgatgtcaggaagtggggtagtaaccaggactggaataagagcgatgaatggaagggcgttgtgagcctgtgatcgatgcgatcagagttctattacgttttaaagagacagcacccgtgacgtttaaggtgatcccctaccgcttattttgttgacgtaaagctttgacatgaagaggggcagcttgctagttattaatatactaaaaggaactaaatcccctgagggcagatttgaatttatttaaccactgttttccacacagtgccctgcaggatattgatatagttgctggatgtgcgtgatgaatgaatgagtgaatgaatgaataaatgttgtgcatgcacttaataattttctgcgatatgtttccattctcatctgcttatttgcgtataccttagagcactaaacttacacagctggatacttaaagtctttaggaagacttggaaacatggttttttttgtttgttttttgtgagaccacgtttctacagcaggctttgttacacatagtatcatttgtgcttcagccaaacaatgaagttggtagaattacaaaatgttttcaatgtttccaagttataaacttgattcctagatattggtcttagaggtcacacagagacagttcttctaattccaagtccatatcctttttttttttttaaccctgcctcaaagcgtgatgttctgagctgaaaattacatatagtgtaaagatccttagcaacatcaaagggcatgatagaacacagctggtaagacatgtgttttatgcaaatgaaaggtatgctacacaccttaattacagattccctagttgtctagtgattgagtttaattttattgaatatggtacttaacaactaaacaggtaggctttagattacagtattagttaatttaagtatacacttgttaaatatctgttgtatgtttggccttgagggacacaatgatgactaagatatttcccctaccttcaagaactcagcaatctagggttggtgagtctcatgctttagcatttgtaatgttgatttgggggctccatttccagagatgctgaatcaacatatacaaggtgggatccagggcccttctgatgtaacaagctccatagatgattactatgggagtctcagctgtctatgttgagaaacactgcattagtctaggagatgatatgttaagagtgttgatatcagcaacttgtcagcaaactgttgcaggactcttagttttgctacatattaccagtttaggcttgatttattttaaaagcctgccatgtttaaaactaatgctggatactggtgggaatgtaaaatgatgtagctctgtgaaaaagtttgtcagttcctaaaaagttaaacatacaattaccttataatccagcaatttcactgctaggtatatcccataagtattgaaagcagagactccaacagatgccagtgttcaaagcaagcattatttacaatagccaaaaagtggatacaatcctagtatccaacagatgaatggataaacaaaatgtatgtgatatatacatataaggaaatattatcctgccataaaaagaaatgaaattgtgatacaagctataacatggatgaaccttgaaaacattttgctaagtgaataagccaaacacaaatgagcatatattgtatgattccattcatatgaggtacctagaataggtgaattcataaggacagaaagtagaatagaggttactagggctgggggtaagggagactggggagttactgtttaatgggtgcagagtttctgtttgggatgatgaagttctggaaatagatagtggtgatgtttgcacaacattgtgaatgtacttaatgccagtgaattgtacacctaaaaaatgggtaaaatggtaaatttcattacaggtatttcaccccaataataaaataataatgccagaagctgaagagtaatcaggacctcaggattactcataggtatgttacgtctaatattgggcacaggagaagcagaaaagggaagaagttggagatttagaaactagctcacaagaagaa

SEQ ID NO: 916668 - DNA, 4001 bp, Homo sapiens; identical to SEQ ID NO: 916667

SEQ ID NO: 916669 - DNA, 4001 bp, Homo sapiens
aggtaacccacataaagcatgtaaggtaaaagccatcacttgtacttatcccagcagcagccttccccctgcctggaggccatcactgagcttggggcagggcagtggagtggagcacgtgagtgcagtcctgtgtcctgaagcagggcagtcagtaaccgtctctaagctccaagttccaacacaccatgtagaccctaagggtacctgcctctctagggcttgcctgatatggacagacagcgatgagcacaacagcagttagggatccttaccacttggtttctcctctgggaagaattttgttcagctaagtgtctgtaaaaagcttcacgttctcacacgttttttctatttttttttttttgagacagagtttcattctttgttgcccagcctggagtgcaatggcgcgatctcggttcaccgcaacctccgcctgccgcgttcaagtgattctcctgcctcagcctcctgcgtagctgggattacaggcatgcgccaccacgccccgctaattttgtatttttttagtggagacgggatttctccatgttggtcaggctggtctcgaactcctgacctcaggtgatcctcctgcctcggcctcccaaagtgctgggattacaggtgtgagccaccgcgccgggcctcatccgttttctgcttatggcaggccagtcctccggtcatgtttaccgtttgctctggccaccaagcagccgcgtcttatccttgctctattttttttgagactgggtctggctccgtcgcccaggctggagtgcggtggcgcgatcccggctcacagcagccttgacctgccgggctcaggtgaacctccggctcggattcgggagtattaatagctgggacctcgggcgcgcaccaccagcctgtctaatttttcttgtttttacaagagaagggccgggcgcggagtctcacgtctgtaatcccagcactttggaaggccgaggcgggcggatcacctgaggtcaggagttcgagaccagcctggccaacatggtgaaacccggtctctactaaaaatacaaaaactagccgggcctggtggcgggcgcctgtaattccagctactcgggaggctgaggcagcgggatcgcttgaacccgggaagcagaggttgcagtgagccgagatcgcgccactgcactccagcctgggcgacagagcgggactccctgcccaaaaaaataaaacagaggagacgaggtctctctctgtagcccaggctgatctagaacaggatcctgggctccagcgatccgcccgcctcggcctcccccagcgctaggcccccaggcagggtccccggccccgcccctccccgcaccctccccagccgcgcgtccaccccgcagggcctggcccgggtcccgccgctctcatcgcccccgccgcgcggcaggtcccaaacgcagctgcgcggaaggcgaggcccgaaaaacctcagaaagagccgagcagggaaaggccgcgcggcccgcctcgtttccccgcaaagaagccgcgcccgtagcgcctccgcccgccccgagcccctccgtcggcggtcggggcgcgccgccctaccccagtcaggcgcggcgagtgcgggcggctgcgggaaccgggcctccctcccgcctcggcggcgccagccgaggacggccccatggcaccctccggagggccggcccgagagcctcaggagggcgcccctcacctgctggcctcgccatccgcgcctgggtccgcgcgccgccgcccgccgctcctcagagacatggagccgttggctaccacctctgcttcaggggagaaatttggcgcgctcccacccagactcgcgagagccggaaatgccgccgtccatcaagaggcgcgctccgcccctcccccgccccccgaggcgctccaattggcgccggcgcccggcgggggaggtggccggcagggaccggggaaaagtgtgtggtaggcgcgcgcggcgcaccgtggggttgggaccgggcggcgctgcgggccgcggtggggccggaaatgtcaggcggtccccactccgctctcggcgcctcgggctccgcgcccggccagcctgaggtggggtcggtgcccccggcggcacggcgctggggaggcgatggcgccggccgcgtccaggctgcgggccgaagccgggctcggggcgctgccgcggcgggcgctcgcccagtacctgctcttcctgcggctctacccggtgctcaccaaggcggccaccaggtgagcgggggcgcgggaatcggacgccgccccggccccaggtcggccgcagcggcgcggggcctggacgggagcgccgggccgggaccaggctgggggcgcgcccgggtcagaacccccggagcgggcgccctccgacccggcgctgaacttcccgcggcgacacccgcgtccgcagtcagcgattgtgaggcgccttgcggatcccgccctcccagcgcgtggagggcccgcccagacccgggggtcggcgctgaggttccacccaaggacccaacaggggccccgcgcgcccggggaagccacggcaaggggagcgggtccgcaggcgcgggtgaagacagggcgaggggagcgggtctgcggggcgcgggtgaagacagggcgaggggagcgggtctgcggggcgcgggtgaagacagggcgaggggagcgggtcttgggggcgcgggtgaagacagggcgaggggagcgggtctgcggggcgcgggtgaagacagggccaggggagcgggtctgcggggcacgggtgaagacagggccaggggagcgggtcctcatggagcgtgtggagacagggccaagggagcgagtctgcggggcgcgggtgaagacagcgccaggggagcgggtcttgggggcgcgggtaaagacagggccaggggagcgggtcctcatggcgcgggtggagacagggccaagggagcgggtctgcggggcgcgggtgaagacagggccaagggagcgggtctgcggggcgcgggtgaagacagggcgaggggagcgggtctgcggggcacgggtaaagacagggccaagggagcgggtctgcgtggtgcgggtgaagacagggccaggggagcgggtctgcggggcacgggtgaagacagggcgaggggagcgggtcttgggggcgcgggtgaagacagggccaggggagcgggtctgcggggcacgggtgaagacagggcgaggggagcgggtcttgggggcgcgggtgaagacagggccaggggagcgggtctgcggggcacgggtgaagacagggcgaggggagcgggtcttgggggcgcgggtgaagacagggccaggggagcgggtctgcggggcacgggtgaagacagggccaggggagcgggtcctcatggagcgtgtggagacagggccaagggagcgagtctgcggggcgcgggtgaagacagcgccaggggagcgggtcttgggggcgcgggtaaagacagggccaggggagcgggtcctcatggcgcgggtggagacagggccaagggagcgggtctgcggggcgcgggtgaagacagggccaagggagcgggtctgcggggcgcgggtgaagacagggcgaggggagcgggtctgcggggcacgggtaaagacagggccaagggagcgggtctgcgtggtgcgggtgaagacagggccaggggagcgggtccacatggagcgtgtggagacagggccaagggagcgagtctgcggggcgcgggtccgcacggcgcgggtggagacacggccagggaaggtgttttgagaaggtgacattgaacaggctgtgtaaagaagtggagcagaggctctcctggcacagggaacagcagggcaaaggtctctgttaggttttgaagggaaggccggcgttaaagaaaggcggagagaggtgcagcttggactcagtcccgagggagggaagatctgtgtgtggagaaagtgaaccc

SEQ ID NO: 916670 - DNA, 4001 bp, Homo sapiens
gatatgcatagattaagaactcaggactttttagaggtgatggtggattggatacagagtgcaggaagaggaactgttattcttcaatcagaaggctggaattatagcactgttcacttcatagctgtgtaaattcagataagaaatagaaatctcccaggcttatttcttcagctctctggagaagcggtccgatagcagttagggatgaagactcgagtcagactgacaagagtccaaattccagattagccactaccaggcttctaatgcaaggctatttacttaacatctttgggcctctctggcaaaatgggggtgaaaatagtacttatttcagaggattaaataacataatgcatgttatggttaaacagaacctggcacattagcaagtgctcagtgaatgctggctctttgatattcacttttcacggttaaaatacagttttgcagccgggcacggtggctcacgcttgtaatcccagcacgttgggaggccgaggcggtggatcacgaggtcaggagttcgagaccagcatggccaacacagtgaaaccccgtctctactaaaaatacaaaaattagctggcggtgatggtgggcgcctgtaatcccagctacttgggaggctgaggcaggagaattgcttgaacccgggaggcagaggttgcagtcagccgagattacaccactgcactccagcctgggcgacagagctagactccgtctcaaaaaaaaaaaaaaaaaatagttttgcctgatgatcagcagcctattgcatgcacttatagactgaatctgttggaactgctaattcaacttccttaacttgtcaaactattataaagaggttttgttttgttttccttgagacaaggtctcagtcacccaggctggagtgcagcagcacaattacggctcactgcagcctcgaccttccaggctcaagtgatccttccacctcagcctcctgagttgctgggacaagtgcacgccaccacacccagctaatttttgtattatttgtagaaacagggttttgccatgtcgcccaagctgttctcaaactcttgagcccaagtgatccgcccgccttggcctcccaaactactggtattacaggccaccacgcctagccaaggaggttcttataatccgatagacttactgatcatgtcactttcctgcttaaacccttcaaaagctctgctccaagacaaagtccaagctctgtcagatgtttattgaaacttttcataatcaagacccttacttaaccctgtcttttatctcttctcctctatttttcttcactctaatactactggatttactttccttcctcaaaaacatccaatggtcttgccgaggaggtttcaagtatcctgttctctttccctgaaatctctcctttgctatcttctccggccacgtctccacttccctattccacgtcagtgtagattttgaggctcagagagattacaaaatgtgccttatcagataacaaaatatgtcgacagccgcacttcactgggcagctcgctgtggggcagctgtccttaacttccgagaagctgatgaaagctgtggagtctctcccccagaaaacacacaggcaaattctttagtaaatattgagggcgtttaaaattcccctgcaacccaaactggaacttcaagttaaaaggaaagatgactagcttggaattcagacgatctggttttacccccacagccggctgtggtgcctcatgcaaatggcctgagctccctggccccgtgtcctctgtaagactgcaaacatgcaatacgtcccccacagtaagtgcgagggtcagtcctccccacgcacacctatgctggaagagctccaaccctagagccagcagcggggcttctcggcccccgcagcggctgacagctcctctgggatcagccttcactcgcgcacgcggaggccggctctggaaaaaagactcgcaagcgcgacgctctgggcatgcgcagaagcccggcgcatgcgcacaaaccgccagcccgcccccttggcggcccgagcactccgggcaacgccccctcagggcgcatccttgtccctgacgctccctgcgtgcctggcactgacctctacagtcgggatcggcgccgccagctgctccggagtcaggttcccaaactcctccgctagcacgtccatgctgctcacgaaggaggaagaaacagatagaacctccgcgcccgccttccctgcaccaagcaaactgcaagactcccggcgaacggtgcgcggaggcctaaactgtccccgccgtgcgtgttagctagagacgcggtagaaaggttccgcccgctccctgcccgaatctgcggtggaacccggatgtggccgaggccgagtaaggaaagtacgccctctggtgtagctcggaggtctggcgcagggaatcctaagccccagctgtcaggtttcttgccaattctctggtaattgagaccagcaaaacatagtggttgtcattttaaaagtaatccgaagaaaagtgtaaacgcataatttacgcaacttgaaccactgaggcagagaattatttaatgtagtccaaaattctatgcattgtttagtatggaagagcaggaaacgtcccaaatgcctaccaatagaagattgattaaataaatgatggtacatgcgtgtaatggaagagtgttgaaaattctcaaaagcactagatggaagatgtaggagtaaatacccagcgcatggagaaatttaatatgaaaagatgacatttacgttagtaggggaaggatggcctgtccagtaaataatgtttgaagagctgattacccatttggggaaaaaatacatgtaagtgaatcttttgtggattaaatattgaaatgttaacaaaaacttagaagaaaatgtaagtgcagatattcataacattgagatgttgaagactttcaagacggcaacagtcaaatcataaaggattttataatctaaacacgattttatgattccacggaaaatttttaattttctgaacagattttaaaaaatcaccaacaaatagaattaataaaaaataaattggcagaagacaaagggctggtctctctaatttaaaatgagctcatacaaatcaacagaaagaaaaatcctattagaaaaaacaaggcaaaatgcaccaattaattaatgggtacggagtttcggtttgggaagatgcaaaagttctgtaaatggagaatggtgatggttgcacaacagtgtgaatgtatttaatgctgctgacctgtacatcattttaaagggttaaaatgctaagttttatgtatattttacaacgataagaaaagttatgaaaatttgtaagtacatatatgctttccaatttctccctcataaaggtagaacccttgcaccaggttaattattcttatttactaaagagctacttaaatttcagtacttgtattttctttttttttttttttttttttttttttgagacggagtctcgctctgtcgcccaggtgggactgcggactgcagtggcgcaatctcggctcactgcaagctccgcttcccgggttcacgccattctcctgcctcagcctcccgagtagctgggattacaggcgtgagccaccgcgcccggccgtattttctaagtattgcactgatatctgaaatacgagaagaatggaaaaaacaccaaaagtagaatcaaccctgcctttgaagttcttacaatttacttattacagagacaagatacaacttgtgtctcatcattgtgcattaccagattgcaaccaatttagcatctagcctagaagggactgtgaaagtgatttatagatggcagaggatctcaaggttggctcaagtgtgttggttgtctgtgccaaagtcttctttgctttccattatcaaggtgattctccgactttagggtgtatcagaatcacctggagagcttgtt

SEQ ID NO: 916671 - DNA, 4001 bp, Homo sapiens
tcacttttcacggttaaaatacagttttgcagccgggcacggtggctcacgcttgtaatcccagcacgttgggaggccgaggcggtggatcacgaggtcaggagttcgagaccagcatggccaacacagtgaaaccccgtctctactaaaaatacaaaaattagctggcggtgatggtgggcgcctgtaatcccagctacttgggaggctgaggcaggagaattgcttgaacccgggaggcagaggttgcagtcagccgagattacaccactgcactccagcctgggcgacagagctagactccgtctcaaaaaaaaaaaaaaaaaatagttttgcctgatgatcagcagcctattgcatgcacttatagactgaatctgttggaactgctaattcaacttccttaacttgtcaaactattataaagaggttttgttttgttttccttgagacaaggtctcagtcacccaggctggagtgcagcagcacaattacggctcactgcagcctcgaccttccaggctcaagtgatccttccacctcagcctcctgagttgctgggacaagtgcacgccaccacacccagctaatttttgtattatttgtagaaacagggttttgccatgtcgcccaagctgttctcaaactcttgagcccaagtgatccgcccgccttggcctcccaaactactggtattacaggccaccacgcctagccaaggaggttcttataatccgatagacttactgatcatgtcactttcctgcttaaacccttcaaaagctctgctccaagacaaagtccaagctctgtcagatgtttattgaaacttttcataatcaagacccttacttaaccctgtcttttatctcttctcctctatttttcttcactctaatactactggatttactttccttcctcaaaaacatccaatggtcttgccgaggaggtttcaagtatcctgttctctttccctgaaatctctcctttgctatcttctccggccacgtctccacttccctattccacgtcagtgtagattttgaggctcagagagattacaaaatgtgccttatcagataacaaaatatgtcgacagccgcacttcactgggcagctcgctgtggggcagctgtccttaacttccgagaagctgatgaaagctgtggagtctctcccccagaaaacacacaggcaaattctttagtaaatattgagggcgtttaaaattcccctgcaacccaaactggaacttcaagttaaaaggaaagatgactagcttggaattcagacgatctggttttacccccacagccggctgtggtgcctcatgcaaatggcctgagctccctggccccgtgtcctctgtaagactgcaaacatgcaatacgtcccccacagtaagtgcgagggtcagtcctccccacgcacacctatgctggaagagctccaaccctagagccagcagcggggcttctcggcccccgcagcggctgacagctcctctgggatcagccttcactcgcgcacgcggaggccggctctggaaaaaagactcgcaagcgcgacgctctgggcatgcgcagaagcccggcgcatgcgcacaaaccgccagcccgcccccttggcggcccgagcactccgggcaacgccccctcagggcgcatccttgtccctgacgctccctgcgtgcctggcactgacctctacagtcgggatcggcgccgccagctgctccggagtcaggttcccaaactcctccgctagcacgtccatgctgctcacgaaggaggaagaaacagatagaacctccgcgcccgccttccctgcaccaagcaaactgcaagactcccggcgaacggtgcgcggaggcctaaactgtccccgccgtgcgtgttagctagagacgcggtagaaaggttccgcccgctccctgcccgaatctgcggtggaacccggatgtggccgaggccgagtaaggaaagtacgccctctggtgtagctcggaggtctggcgcagggaatcctaagccccagctgtcaggtttcttgccaattctctggtaattgagaccagcaaaacatagtggttgtcattttaaaagtaatccgaagaaaagtgtaaacgcataatttacgcaacttgaaccactgaggcagagaattatttaatgtagtccaaaattctatgcattgtttagtatggaagagcaggaaacgtcccaaatgcctaccaatagaagattgattaaataaatgatggtacatgcgtgtaatggaagagtgttgaaaattctcaaaagcactagatggaagatgtaggagtaaatacccagcgcatggagaaatttaatatgaaaagatgacatttacgttagtaggggaaggatggcctgtccagtaaataatgtttgaagagctgattacccatttggggaaaaaatacatgtaagtgaatcttttgtggattaaatattgaaatgttaacaaaaacttagaagaaaatgtaagtgcagatattcataacattgagatgttgaagactttcaagacggcaacagtcaaatcataaaggattttataatctaaacacgattttatgattccacggaaaatttttaattttctgaacagattttaaaaaatcaccaacaaatagaattaataaaaaataaattggcagaagacaaagggctggtctctctaatttaaaatgagctcatacaaatcaacagaaagaaaaatcctattagaaaaaacaaggcaaaatgcaccaattaattaatgggtacggagtttcggtttgggaagatgcaaaagttctgtaaatggagaatggtgatggttgcacaacagtgtgaatgtatttaatgctgctgacctgtacatcattttaaagggttaaaatgctaagttttatgtatattttacaacgataagaaaagttatgaaaatttgtaagtacatatatgctttccaatttctccctcataaaggtagaacccttgcaccaggttaattattcttatttactaaagagctacttaaatttcagtacttgtattttctttttttttttttttttttttttttttgagacggagtctcgctctgtcgcccaggtgggactgcggactgcagtggcgcaatctcggctcactgcaagctccgcttcccgggttcacgccattctcctgcctcagcctcccgagtagctgggattacaggcgtgagccaccgcgcccggccgtattttctaagtattgcactgatatctgaaatacgagaagaatggaaaaaacaccaaaagtagaatcaaccctgcctttgaagttcttacaatttacttattacagagacaagatacaacttgtgtctcatcattgtgcattaccagattgcaaccaatttagcatctagcctagaagggactgtgaaagtgatttatagatggcagaggatctcaaggttggctcaagtgtgttggttgtctgtgccaaagtcttctttgctttccattatcaaggtgattctccgactttagggtgtatcagaatcacctggagagcttgttaaactaatctcagctttctgattggtaaattggggctgaaattttgcttttttggtggggggcggggatggagtcttactctgtcgtccaggctggagtgcagtagtgcaatcttagctcactgtaccctcccaggttcaagcgattctcctgcctcagcctcccgagtagctgggattacaggcgcgtgccaccatactcaggtaatttttgtatttttagtagagacggggtttcgccatattggccagtttgggctcaaactcctgacctcaggtgatccgcctgcctcggcttcccaaagtgctgggatttcaggcgtgagccaccgcgctggctgcaaatttgcattttttttttttttttgagacagagtctcactctgtcacccaggctggagtgcagtggctcggtcttggctcac

SEQ ID NO: 916672 - DNA, 4001 bp, Homo sapiens
ggatagcttcccgctctcctggagaaggcagataacagggatgaaagatatctttgggagtgatttcttcagcttaaggtcagtcactgctcagtgggcactgggctagtgttgcttaccttcatcagtgcagttctgcaacaagatcaacagctgtctcctgttgtactgaattaggaacttctgacatgttcttattgtacctggcatatgagttactgtggtcaacagcttgtgaaagatctcgaccttacagactttcagaggtagggggaagtgtcttgttagcgggacagcagcaagacccacccaccagtttagactgaactgtgaacgtgtcaccaattgaaaatcagtagccataccacctcactcctacctcccacatgtaatgtgttgaaaaagcatgggtaacggtgtcctttgttctccaagtatgtgatgaagggaagagctgaccacacaagctgatagaattcttttctgcatcgaagtagcactattccagtataggcattgagatatcgaactacaacaggaaagaaaaatcattttggaaaacttttgctctgtgtggtggctcacgcctgtaatcccagcactttgggaggctgaggcgggcagatcactttaagtcaggagttcgaggccagcctggccaacatgatgaaaccccgtctctactaaaaatacaaaaattagctgggtgtggtggtgcgcacctgtaattccagccactcaggaggctgaggcatgagaatcgcctgaacccaggaggcagaggcagcaatgacccccgatctcgctgctgcactccagcagcctgggcaacagccagactgtctcgaaaaaaggaaaactttggagtaacagagcctactatgtgccaaaagtatgttgtaggcaagtggcacgtagatctatcagcgagtaaaagagaaaagccaaaacacccactgtgttgcacaccactcagaactggtgaatgaatttagaattgaaaatgctttctaattcactagttaattcaataaataggagcaggtaggaggcgatccgttttaatttaggaaaaacccccacaaaacccttgcctgaaaaacaggctgttttactgcatttgggctccgtaattattgtagcagtcagctctcagtctcacctgacttaggagagttaagtctatctgcatttaactctccagaagtcaatctcaaacaaggttaaagtgggaactaatttaagtggtgtgaaagaagggcccctctgtcctagctcatcctgtatttacatatattgacaatcatgtgttctgtactttaccaactatttaagggctttcccggagtacttttgacaatttttttccatatgatgttaatgtaatcggtcatataatagctcttactaggaagtatacacagcttccctcatttaattctctaccctatcaaattcaatcacaaccaattacagaaattacctgtcaagcaggtaaaaagaggcttctagctcaaagccccactgccttcgggcccctccttttagcgctctgctaatttcggactctcgcttggggtcccaggcgcttaaagagataccttacaaaaaacggtgcacgggcttggccactcgtgccccttctttcttcctccggcgcctgccccctccacatcccgccatcctcccgggttcccctcttcccccagcgcccttgcacccgcgaagccgatggagcaggcggctgcgccgaaagttccgtgcaccctggcgatcgtgtcccgtacgaggctgctcagaactcggtcatcgaggcttaggcggcagcgggggtcgtcagacaccagttcgcagagcaggtacctgcggcaggcgagaggaaggtggacactagcggggccgcgaggacccagcaaggcactgggagggtctggaagggaatgcttacctgtgcttgaaccgcaccatggctgcctccgcgctctccggtccggcgtgcaaaccggatgtgaattctgtccgctgccaatgggaagcttgcttccgcagcctttcagccattcagagaaggagacaggatattagggcggagctagaaagttgagaggccgaagtctgtcagctctctcaagccccgcccaactgcgtttgtaagcgcgcatgcgtcctgcggagggtcactgactagtttgagggctgaaccccgggatggagcgccttgcagctgtaatggatggttctgttgcacactgaagtttacaatagtgtgtaggatgtagccgctacccttggggccctgggaaccttgcaccacagttatgtatgcgagtatattctctccccaaggtgaacggtggagcttttgagggcaagaccctgcacctcacagcccaggcattgacaaacgggaaatcggacttttattttcaggtttgagctcagtttaattcttccatacagctaaatatgctattgctgtttgggcctttcagcaatcttagggaggcgagtgtgccgtctcgttttttgctcgcagaaacaatacgtggtcattgtattttccatttccgtttaccttttttttttgacagaaaagcacaaagaagcaaataaattataatcccagcactgagagagaataactgttgtcgtgtagtgtgttttcttctgtcattttctccctgcgccagtggttctcaaagtgccgtctggggaccactgagatttcctaaattcactcgatttgggagtccccgaagtcaaaattactttcataataatgctaagatgttacttgtctttttcattctctctgagtgaacagtcaagttttccagaggctgcttgacgtgatgacgtcactgctctaggaattgtgtattgttttttaaacgtttctcaactttaatgtccatagtaaatataacccacaaaactaaaagctcttgggcaccctcagtaacgtgtgtaaaggggtcctgagacagagaaaacagcttgagaactatgccctctgttaaattatgttttttcttttatttttaagtattttaaaaaaaatgtcttatggggtattacataaagtacatattcttaagtgtattcatctcaatgaatttttacatatggatagacttctataaccacctccaagattaaaataaagagcatttccagtatcccagaaggttccctgagccctcttccagtcaaattgcttactgctatcagccactattaccacttctaccctgctagattaattttgcctgttcttaaactttatataaatgcagccaggaggctggctgcaacctctgcctcctgagttcaagcgattctcctgcctcagcctcccgagtagctgggattacaggcacctgccaccacgaccagctaatttttgtatttatttatttagttttttgagacggagtctcactctgttgcccaagctggagcacgatctcagctcactgcaacctctgcctcctggattcaggcgattctcctgcctcagcctcccaagtagctgggactacaggtgtgtgccaccacaactggctaatttttgtatttttagtagggacagggtttccccatgttggccaggctggtcttgaactcctgacctcaggtgatccacccacctcggcctcccaaagtgctgggattacaggcgtgagctaccacgcctggccatttggctatattttcatgtcagctcttcagcgacaatactgttttttagctgtgcagtattgcattgtttggacgtaccattgtgaagttggtcagtatccctttggtagacgtttacattatttctagattttcttgttatacccaatactttgatgcatggctttgtagcttagtctttatgcccatccctgattatttgtagaagtgtcttggccttggctggtcctgtgaggtccgtaatgggggcagctttcacaacctatttttgcaagatctggaatgagttctgaattttc

SEQ ID NO: 916673 - DNA, 4001 bp, Homo sapiens
agcttcccgctctcctggagaaggcagataacagggatgaaagatatctttgggagtgatttcttcagcttaaggtcagtcactgctcagtgggcactgggctagtgttgcttaccttcatcagtgcagttctgcaacaagatcaacagctgtctcctgttgtactgaattaggaacttctgacatgttcttattgtacctggcatatgagttactgtggtcaacagcttgtgaaagatctcgaccttacagactttcagaggtagggggaagtgtcttgttagcgggacagcagcaagacccacccaccagtttagactgaactgtgaacgtgtcaccaattgaaaatcagtagccataccacctcactcctacctcccacatgtaatgtgttgaaaaagcatgggtaacggtgtcctttgttctccaagtatgtgatgaagggaagagctgaccacacaagctgatagaattcttttctgcatcgaagtagcactattccagtataggcattgagatatcgaactacaacaggaaagaaaaatcattttggaaaacttttgctctgtgtggtggctcacgcctgtaatcccagcactttgggaggctgaggcgggcagatcactttaagtcaggagttcgaggccagcctggccaacatgatgaaaccccgtctctactaaaaatacaaaaattagctgggtgtggtggtgcgcacctgtaattccagccactcaggaggctgaggcatgagaatcgcctgaacccaggaggcagaggcagcaatgacccccgatctcgctgctgcactccagcagcctgggcaacagccagactgtctcgaaaaaaggaaaactttggagtaacagagcctactatgtgccaaaagtatgttgtaggcaagtggcacgtagatctatcagcgagtaaaagagaaaagccaaaacacccactgtgttgcacaccactcagaactggtgaatgaatttagaattgaaaatgctttctaattcactagttaattcaataaataggagcaggtaggaggcgatccgttttaatttaggaaaaacccccacaaaacccttgcctgaaaaacaggctgttttactgcatttgggctccgtaattattgtagcagtcagctctcagtctcacctgacttaggagagttaagtctatctgcatttaactctccagaagtcaatctcaaacaaggttaaagtgggaactaatttaagtggtgtgaaagaagggcccctctgtcctagctcatcctgtatttacatatattgacaatcatgtgttctgtactttaccaactatttaagggctttcccggagtacttttgacaatttttttccatatgatgttaatgtaatcggtcatataatagctcttactaggaagtatacacagcttccctcatttaattctctaccctatcaaattcaatcacaaccaattacagaaattacctgtcaagcaggtaaaaagaggcttctagctcaaagccccactgccttcgggcccctccttttagcgctctgctaatttcggactctcgcttggggtcccaggcgcttaaagagataccttacaaaaaacggtgcacgggcttggccactcgtgccccttctttcttcctccggcgcctgccccctccacatcccgccatcctcccgggttcccctcttcccccagcgcccttgcacccgcgaagccgatggagcaggcggctgcgccgaaagttccgtgcaccctggcgatcgtgtcccgtacgaggctgctcagaactcggtcatcgaggcttaggcggcagcgggggtcgtcagacaccagttcgcagagcaggtacctgcggcaggcgagaggaaggtggacactagcggggccgcgaggacccagcaaggcactgggagggtctggaagggaatgcttacctgtgcttgaaccgcaccatggctgcctccgcgctctccggtccggcgtgcaaaccggatgtgaattctgtccgctgccaatgggaagcttgcttccgcagcctttcagccattcagagaaggagacaggatattagggcggagctagaaagttgagaggccgaagtctgtcagctctctcaagccccgcccaactgcgtttgtaagcgcgcatgcgtcctgcggagggtcactgactagtttgagggctgaaccccgggatggagcgccttgcagctgtaatggatggttctgttgcacactgaagtttacaatagtgtgtaggatgtagccgctacccttggggccctgggaaccttgcaccacagttatgtatgcgagtatattctctccccaaggtgaacggtggagcttttgagggcaagaccctgcacctcacagcccaggcattgacaaacgggaaatcggacttttattttcaggtttgagctcagtttaattcttccatacagctaaatatgctattgctgtttgggcctttcagcaatcttagggaggcgagtgtgccgtctcgttttttgctcgcagaaacaatacgtggtcattgtattttccatttccgtttaccttttttttttgacagaaaagcacaaagaagcaaataaattataatcccagcactgagagagaataactgttgtcgtgtagtgtgttttcttctgtcattttctccctgcgccagtggttctcaaagtgccgtctggggaccactgagatttcctaaattcactcgatttgggagtccccgaagtcaaaattactttcataataatgctaagatgttacttgtctttttcattctctctgagtgaacagtcaagttttccagaggctgcttgacgtgatgacgtcactgctctaggaattgtgtattgttttttaaacgtttctcaactttaatgtccatagtaaatataacccacaaaactaaaagctcttgggcaccctcagtaacgtgtgtaaaggggtcctgagacagagaaaacagcttgagaactatgccctctgttaaattatgttttttcttttatttttaagtattttaaaaaaaatgtcttatggggtattacataaagtacatattcttaagtgtattcatctcaatgaatttttacatatggatagacttctataaccacctccaagattaaaataaagagcatttccagtatcccagaaggttccctgagccctcttccagtcaaattgcttactgctatcagccactattaccacttctaccctgctagattaattttgcctgttcttaaactttatataaatgcagccaggaggctggctgcaacctctgcctcctgagttcaagcgattctcctgcctcagcctcccgagtagctgggattacaggcacctgccaccacgaccagctaatttttgtatttatttatttagttttttgagacggagtctcactctgttgcccaagctggagcacgatctcagctcactgcaacctctgcctcctggattcaggcgattctcctgcctcagcctcccaagtagctgggactacaggtgtgtgccaccacaactggctaatttttgtatttttagtagggacagggtttccccatgttggccaggctggtcttgaactcctgacctcaggtgatccacccacctcggcctcccaaagtgctgggattacaggcgtgagctaccacgcctggccatttggctatattttcatgtcagctcttcagcgacaatactgttttttagctgtgcagtattgcattgtttggacgtaccattgtgaagttggtcagtatccctttggtagacgtttacattatttctagattttcttgttatacccaatactttgatgcatggctttgtagcttagtctttatgcccatccctgattatttgtagaagtgtcttggccttggctggtcctgtgaggtccgtaatgggggcagctttcacaacctatttttgcaagatctggaatgagttctgaattttcccat

SEQ ID NO: 916674 - DNA, 4001 bp, Homo sapiens
aataacctgggaggaaataaggcagggaccccaggtgtgagggtagcatccagctccaccccaaacccagatccccacaccaccaggggaacagactaatggacaaatccctcaacctgctctggcctcagcttctgcatgagtaaaatgcaggattcacactctaagggctacttcctttattccatcctcagagctatggtggagcaggaataggtctggatgtggattcagagacctgccttgttctgccacattttagctgtgtagctttcattgctctgaacctcagccttctgtcttgtaagatgggaataaaaatctccatctaatagatttgtactccaaagaaagtgagatgatgtatgagaaagcacctagcataaagcctgaccacagcatgggtgctccataaatgaaaactcccacgtaatgtgagcacctccaggacagggtggtggctacacccctgcccagcttcagcatcggcagaaagccgccgcagaggagataggaacaacagcttgacgtctgttcgagtttctatgacccacagcccaagacctggccgccatcccctggccagcctctccacagtccccaccctccagccctgtctttggccacttgcctgtccctgagcattggtgaggatctgactgctgatccctggcatgctgggaatggcgctggtaatgactggagctgtagtgagggaccccaggatctgggtctgtcccccgagggaagcagcactgatctgtgggtggaggaagagccttgctcagaagccaaggggtgagaagaaccccgggcagagggaagaggacagagggcattggggtgggtagatgtgaatgtgggcttcaggcccatgtctaccggctggatggtttccagggctaggggtctaccggctggatggtttccagggctaggggtctacctgctggatggtttccagggctaggggtctaccggctggatggtttccagggctaggggtctaccggctggatggtttccagggctaggggtctaccggctggatggtttccagggctaggggtctaccggctggatggtttccagggctaggggctgcaggggtcagcagggaagggcagggccacagtcatggaaaagtaactcgggttaatctttcaggccaggcctgggagggtagaagggccacactggagaggctgatgtgatcctagtcatatctaacgcctcccactgccaagccaggagctacactggacagacaccagcatagagctgtaagctctgactgcaccgtagggacagctcacaagttttcaacccccagacgtcatcccaccctccaagcctggtccagtggttcaggttctggagaatgtgcccagccctcttggcagaggttgtctgcttttatctgggatggacgggctggcagctgcaaggagaaggcctcagagggagcccatctctgctgatgtgttggaaaagggctgttttcggggggggctcgtcctccactgtgggaagggtcagttccacccttggcccatgattccgtccatccctggtcagccctgggtgagggcagcagcttacgattcctgggctaaatgcgaagcctgcaggctggacggtgatctgtgggggggtgtccactggcttgggggtaggggcagcagcggtggcagcagtgggctgcgggaggatggcaggtgtggtctgcagcagcggctgggtctggaacagcgtctggggctgggctggtggccggggttgggccgtcgaggaggcctgtactggtgcggcagcttgtaccggtgccggaagagcggtgttcagcacagcagctgctatggagcaaggcagagacagaggtgctcaaatgcctagccactgctcacagcggctccaatcccaagggatctggcacaagaaggagagggggttggggcagtgggctcagtggggcaggcagccacgattcccttgatccttgaagggctggcgcacgccagcatctcttatcccccctccctggggccaggagatgtgtaggttcaagaaccagacgttgaatcttcttgtagtccttcccaggaggccggtcatggggtgagttctggcgtggggggagaggggcagtctcagacagctggccgaagtacggcaggcctgcggggccagcgtggcgtcacggcctacagtcccgaggtggtgcagcagctctgcggccggatgcccaagacaccggatccagactccagggcggttgccctgggtgggccgtgggttctgagtccgacatggcaagcacacgtgcgggggtgtagtagagggtggggggcctggtgcagtcctgggaagagttgccgttaccttggagaccggctaaaggtggcttgaacactccccccgtaggagaagcagcggtcagtcctgggagggcagccacagttgctgtaggaattgtccacacggccagcccctgctgaccagccacttgacctgcaatactgatggggataagaagaggttgagtaactgcccctgctggaaccataactcctgtcagaactgtggctaagttttcctgagtcaagacctgcaaaagcaaacaagatttcaaaaagaaaagaaaaaataaaaaatcaacattgacagcgcaaacactgggtctctgagacccagctgagcacaaacaaagcattctgagggcgatgggccgaaggccacatgaggatggggaagagccaaaccctagctggaggcccaaacctgagggggtgcctggaccgactatcctgccttcagagaagtcgcctaaatccagggcaaggcggccctgctcacaggatgggaagggggcacaggcctcccccaccacagcctgctgcctgccaggccttccgcgagcccttgctgacaggccccgtgcttagtggccagggaacagggagcagaggctgatggaaccaagtggtcaaggccccgcagaggctaatggaaccaagtggtcaaggccccgcagaggctaatggaaccaagtggtcaaggccccacagaggcctccgagaagtttctgaaggaccatacccttggctggatgccttggagtcagggaatgtagcgaaagggacagggagctctgcctgcctgcaggatcctgaaggcagcctctcatggtgctggggccactccctggctctaaatgaggactctgaacaatccattaactcttacaggcatccactggagggccggcaagggtattcattcatttagtcatttgataaacagaaactctggctgcgtgaaagagttaatgttatttctgcaatcctggcaggcccaaggagatgattctgcaaatgtagatccccttttccaaatgggcctgatctaggcaggggtgaggctggatgtgcctagtgggagagtccctccctcaagccatagccccttccctgtcctgcccccatgaagttcccagattccatggcttccccatgctggctgtcccatgcctcgctcctgcccccggccttctgtccagctcccgagggcagcccttacctggggggcagcttgtacagccagtggcgtcagggtctgcgatgcctgaggctggcttggggcttggctgaaggtggcaatggcagtggcagggctcggagggatccccgggggtgacttcacttcacaaggcattgagagaaagaaggacaaggagtgagcctgacgtgagtggaggggtcaccacagcagtacatgacatcccatctgcagcctgaagcggggaccctcagccccatgctgcattgctacatagcccaagaccaattgttggtcttccctggcccatgaggcagcttcctgaatgctacggtggtgaggacaggaggctggggagccctgtgccagctctgggaggtaggccaccccttctcacatctagctgaagaagatacccaggtgagtgttagccctcatttcct

SEQ ID NO: 916675 - DNA, 4001 bp, Homo sapiens
taggttacctgactgagaacacacagcaaaacatataaagggcaattacaaatgtaagtattaatttctattataaagtgatcaacattaatctttgtagaaacaatattttacctttacgactcattctgctgctgtaaaggtttaattctagtagatacttttgaactcttcaaatccaatttataaaaatcaaattatgcaaaatttacttaggaaataagatgaatatatgctgcttataccttgcagtcaacccaaatgagtaaatccaaagtcttcttatcaaaattagaaaaaaatagtctacaaaaaaataaggccactttcatgaactagcttagtttctttcattagaattcagattctaacataaattacaaaatatttgattaatccttaaaatgcagtataacatttcttaaatgcacattttgcacattttaagtattaaaagcaattaaagatatatattcaatataagagttaaacacccttttaaaaaatggatgacatctgaagcagcttgcacagtccggaaggctatggtcattcaatgtctagtgcgtttcacccagatacatcacttttaacttttataatcagtatcaatactaaaaactgcattcatcacataatttctgaaaagccagaaagggcattttaacaatttgccttgatatttgctttttcatcattcccccctcaaagtcaatttgatatataaattatgttatcttcatctagatattgatgctttcctcattaaattactgaaggttttgaaacctagtcagagacattgttaattttgttgagaaagaaaaaaagtaataataaatctgattggcttaattatcccagtgcttaaatttagccggaagaattttatatcaggaaaataactcctttattcttagcacatagccttgactgtcttttaaatttctcagatttcaaaataaaagtttgaatgcccactggagtcctcactcaagggctttcaagatccaatgtgttccttaacaatatatgccatccaagcagtacctcttcagatatgagagtgctacaaaaagctttttttcttttttctgtcaacaaatgactttatttaatcatatcactaggaattcggccctactagaggtaagaatgtaattattatccatagtgagtttcttctgaaaacatttagtcttaagaaccatcccagctccacctcagttaacctacaaggagtaattcagtgagagaaatcctagccattgtctgattacattacatgaatattctccctcctatttaactctttgaaagcctctgtcctcgggaaatatgattatcacctttaatggacacattttacactttctttaccctagtgcatttacggacagccagagccagctcaacccacactactggacagttatctctcagccacaccccccaccaccttgaagaagttgacttcatcatttccacactaaaattgttcatcctgcccaacaggacacagccaagtaggcaggaggtagagagataggagatggagaggatgaggtgaaagcaaaaggcacctaacggtaatcaacaaggaggaatttgcatctcatcttccctgggggcggggtggggccggggaggtggtcaaaaaatacagcgaaaggagacagtaaaactcaaagacagcttctgtacctaatgtctgtgatttcgggtccttgcttcttcaattgatcaatgacaaccgcagtctccggcttgaggagaagggaggctcacacccagcactcctggaccatttccctagcaacgggaggagaaaggcagctcagacacacgcgtgccccggcgccctcccggaacgtgccccggcccggtggcgtggcaggagctcggcatcttcccgtggctccgtcagcagccaaaaggagaagcgtccatcggaaaaatggcatattacaaattttgctttgggaagcaaagctcggttcagaccattgtcaaaggaggagagggggaggcggctcttaaagcagccgcggcccctttgccagaacagccgcagctccccgcgtgcagctggagccccggggcggagaccggagaccggggactgggtttgactttcagaaacttaaccacgcggcgccgctccccctccgcgcccgggccacccggggtgtgtggggcgtccctccaaaagaaagcttggagaaaaggcgtgagaagtatctgggagagaagttctccacccagtctcccctcctggagcccctctggagtttaaggctaaccctgggagttagaaacctaaaggaaaacgagtccctagggatgcaaaaagcaggacaggtctcctcctggcccccagcctgtttccgcgcgctcccgtgtctcgtttcacttaaaggaggcgctttttctctggaaaggcaaacatcaccccacgccgtcccccggccccccttccctcccccccgccgcccccccgccgccacagcacacacacccatttttctcctcccggcctttctgcaagcctctttgcttgcttcaattggccggaagaaccaacctgctggcagccggtgaggacgctacagcatcttctctcctcacttgcctcgtgcggtggctgctactcctcctcctccgtctcctcccctcctcctccttggcagccaccacctcctcttcctctggaacaagggcttcccctggaagctgctgcagtggtttccaccggcccttaaataaattctgaagtaatcacgtctttgctctcctcctcacgcacacgcgcccgcggatacactcgtctcccccagagccgctcccgggctgccgaggctcgctctgctcccagtgccccctgcgaaggcgagggccagggatgggcaaagtgggaagggggcacacgcttccccgcctgggcttctttcacacaatgggctctacagccttcgcttgtgtcagcctgcgctggtggggatgggaacggacttgggcaccttttggctccccggtcttctgtgcttgtcatttctttaagcagctttcttcccactgggccagggcatggtagtcatggttgtagggacctgagccaatctagggtgtggcggcatctgtcatttctcattacctcttcagttcttcttcattcatattgttttggtaatgggaattgtatgttaagtattccctgcccgagtaaattttagctttgagcagagtctggtctctccatcgcgctccagtcccccttatatctccacctccctttacctaccctcttttctttccgttgctgctgtccattcatacagactgaggaagcaggagacaaaatcagtacctactctgagcagaaagggaacgtttctgtgagggagagtcacgaatcctgctgggtttggtgaaaatgaagaggacatgcatgaaggaattggaggattaaacactgaatatattttgggggttactgaaaatattctgagtgtgctacacgaaagccaaaagacgtgttttacttttgtgtaacgccaagagtccaaagttaacaaagaactagtatgtaaataactgttcacttaaaattaactacaatatccaagaaacaatctttgtttctgagggaagtatttaattcagttagcgactttacaatggaaagtggggtaaagctcatgtatttacccaacttctattctagactgttatttaaattttacaacacaacacaatcctataagaagtataaaaataatacgaaaattcattagatgtcaactggagcactatttctcagacataatgtgcatacagatcatccatggatcttgttaagttgtagatactgattcaccaggaatggggtgaaacctgaaattctacccttctaatgactcccagatggtactacacttgaggaggaagggtctagaccacccaatcgacccacaatttgatgtggcttaaatacccctaac

SEQ ID NO: 916676 - DNA, 4001 bp, Homo sapiens
gctatgatgaaaagtggcttagggacttagaaagtctattaaatctacactcaaaagaacttgatttgattccactcctaaggcaggtgaaccaggacaagttactttacatgttaaaactttagttctctctttcatgaaagagggccaataatctatgcttagaggaaaaaaaagaaaatatataataggttacctgactgagaacacacagcaaaacatataaagggcaattacaaatgtaagtattaatttctattataaagtgatcaacattaatctttgtagaaacaatattttacctttacgactcattctgctgctgtaaaggtttaattctagtagatacttttgaactcttcaaatccaatttataaaaatcaaattatgcaaaatttacttaggaaataagatgaatatatgctgcttataccttgcagtcaacccaaatgagtaaatccaaagtcttcttatcaaaattagaaaaaaatagtctacaaaaaaataaggccactttcatgaactagcttagtttctttcattagaattcagattctaacataaattacaaaatatttgattaatccttaaaatgcagtataacatttcttaaatgcacattttgcacattttaagtattaaaagcaattaaagatatatattcaatataagagttaaacacccttttaaaaaatggatgacatctgaagcagcttgcacagtccggaaggctatggtcattcaatgtctagtgcgtttcacccagatacatcacttttaacttttataatcagtatcaatactaaaaactgcattcatcacataatttctgaaaagccagaaagggcattttaacaatttgccttgatatttgctttttcatcattcccccctcaaagtcaatttgatatataaattatgttatcttcatctagatattgatgctttcctcattaaattactgaaggttttgaaacctagtcagagacattgttaattttgttgagaaagaaaaaaagtaataataaatctgattggcttaattatcccagtgcttaaatttagccggaagaattttatatcaggaaaataactcctttattcttagcacatagccttgactgtcttttaaatttctcagatttcaaaataaaagtttgaatgcccactggagtcctcactcaagggctttcaagatccaatgtgttccttaacaatatatgccatccaagcagtacctcttcagatatgagagtgctacaaaaagctttttttcttttttctgtcaacaaatgactttatttaatcatatcactaggaattcggccctactagaggtaagaatgtaattattatccatagtgagtttcttctgaaaacatttagtcttaagaaccatcccagctccacctcagttaacctacaaggagtaattcagtgagagaaatcctagccattgtctgattacattacatgaatattctccctcctatttaactctttgaaagcctctgtcctcgggaaatatgattatcacctttaatggacacattttacactttctttaccctagtgcatttacggacagccagagccagctcaacccacactactggacagttatctctcagccacaccccccaccaccttgaagaagttgacttcatcatttccacactaaaattgttcatcctgcccaacaggacacagccaagtaggcaggaggtagagagataggagatggagaggatgaggtgaaagcaaaaggcacctaacggtaatcaacaaggaggaatttgcatctcatcttccctgggggcggggtggggccggggaggtggtcaaaaaatacagcgaaaggagacagtaaaactcaaagacagcttctgtacctaatgtctgtgatttcgggtccttgcttcttcaattgatcaatgacaaccgcagtctccggcttgaggagaagggaggctcacacccagcactcctggaccatttccctagcaacgggaggagaaaggcagctcagacacacgcgtgccccggcgccctcccggaacgtgccccggcccggtggcgtggcaggagctcggcatcttcccgtggctccgtcagcagccaaaaggagaagcgtccatcggaaaaatggcatattacaaattttgctttgggaagcaaagctcggttcagaccattgtcaaaggaggagagggggaggcggctcttaaagcagccgcggcccctttgccagaacagccgcagctccccgcgtgcagctggagccccggggcggagaccggagaccggggactgggtttgactttcagaaacttaaccacgcggcgccgctccccctccgcgcccgggccacccggggtgtgtggggcgtccctccaaaagaaagcttggagaaaaggcgtgagaagtatctgggagagaagttctccacccagtctcccctcctggagcccctctggagtttaaggctaaccctgggagttagaaacctaaaggaaaacgagtccctagggatgcaaaaagcaggacaggtctcctcctggcccccagcctgtttccgcgcgctcccgtgtctcgtttcacttaaaggaggcgctttttctctggaaaggcaaacatcaccccacgccgtcccccggccccccttccctcccccccgccgcccccccgccgccacagcacacacacccatttttctcctcccggcctttctgcaagcctctttgcttgcttcaattggccggaagaaccaacctgctggcagccggtgaggacgctacagcatcttctctcctcacttgcctcgtgcggtggctgctactcctcctcctccgtctcctcccctcctcctccttggcagccaccacctcctcttcctctggaacaagggcttcccctggaagctgctgcagtggtttccaccggcccttaaataaattctgaagtaatcacgtctttgctctcctcctcacgcacacgcgcccgcggatacactcgtctcccccagagccgctcccgggctgccgaggctcgctctgctcccagtgccccctgcgaaggcgagggccagggatgggcaaagtgggaagggggcacacgcttccccgcctgggcttctttcacacaatgggctctacagccttcgcttgtgtcagcctgcgctggtggggatgggaacggacttgggcaccttttggctccccggtcttctgtgcttgtcatttctttaagcagctttcttcccactgggccagggcatggtagtcatggttgtagggacctgagccaatctagggtgtggcggcatctgtcatttctcattacctcttcagttcttcttcattcatattgttttggtaatgggaattgtatgttaagtattccctgcccgagtaaattttagctttgagcagagtctggtctctccatcgcgctccagtcccccttatatctccacctccctttacctaccctcttttctttccgttgctgctgtccattcatacagactgaggaagcaggagacaaaatcagtacctactctgagcagaaagggaacgtttctgtgagggagagtcacgaatcctgctgggtttggtgaaaatgaagaggacatgcatgaaggaattggaggattaaacactgaatatattttgggggttactgaaaatattctgagtgtgctacacgaaagccaaaagacgtgttttacttttgtgtaacgccaagagtccaaagttaacaaagaactagtatgtaaataactgttcacttaaaattaactacaatatccaagaaacaatctttgtttctgagggaagtatttaattcagttagcgactttacaatggaaagtggggtaaagctcatgtatttacccaacttctattctagactgttatttaaattttacaacacaacacaatcctataagaagtataaaaataatacgaaaattcattagatgtcaactggagcactat

SEQ ID NO: 916677 - DNA, 4001 bp, Homo sapiens
agacctcaggatcaaatattttaggaaattaaaaatgtagaagaacagagtttatgtttggtaaaatttatatcttatcttaattcctacggtttttacaagaatatgttattatcgacaaaaagggggtagttaaaaatcgttgcagtgtgttttcaaagaaagtcacctgccaagaaaggtgtcagtaagatctttactgaaagaattgtaaaaagcctctgtcatgaccgagcatatggaatgaactgacccttaaactttaagagactgaagtagaatacctaatgtcaaatgctacccaaagagccagctgcaggatattgtaagaggtgttcatatctcagtgtacagaggagaaaaaaaagtaataattctgtacagcagccccagggcacttgcattttgaatcactgccacaataagcagatcaccagtaggaagagaatatattttgtaaaaccacagacttgcactatcagtagacatcagtgtaaaacagaagaggcaacagaattaaaaatagaagtatagaaaggggagagagaaagagtaattatatctactgcctacagtttgcaaaggcaagagacttataattcagatgtgcatttatttagagatcccttcaaaaaattctgaccacctttattatattaattctctaggccgttatacttattttttccaagtatggtataattatacagccagaataattaaatgtcaggctgtctatatttccataatgtataatatacagggaaaagaatatcaagttcctttttcatgtaacgatgatatgactgaattacaaagtaaaccttaggaatgaaaggcacaatttgaagataaaaagaagatagaatctgatctagtttagacttagccattttctagactgatggctgatttattcacaggcaattgaaatacatttagtaggtaacagctttctaactcatatttatattataaatcattttgacttttcgataacacagaaaatcttccatcttaatgagtttctactctatttcaaattggaaagcatactaaacttggttcttaaacctcctgtattgtttattgtctttatgttatacacataagaaaattaaataatgggaattatgttaaactgtgtatatgaaatgcaaaatatttttctaagccaagaggacttagtttgcaaagttcataaaatgtgttttaatcttactctttctgcgacgcacaaggaaagtaactctacaatgtttaccatattataaccataaataacaatatcaggagacacaacacatctcataaaccttcaaggatgacactgtagcagatttaaaaattcctgtggaaaattgtgttcactatttttttttttaattcacagagactcctaatgccatcctatacccacagtttaaagtagattaaactgacatgcacattattcattccatacattttcttcaatacttccaacctttttaagtctttcttcctttatatagcactttgttaaaagtttgacaatacattaacttactaagtagtgaagccatttaaagcacacttacttgaaaagtgtaaaaccgggtcccattaggaggatgcactttaggggagccagaaacggtgttcatatccgagaaaatcatttctgatcactgagacaatataatccacaaggagctacagatgcagagcagagagcttagcgtacagataaatccgtgcatgcattgagggagactagagggtaaaatgaaatctgccccatccttcttacatacacagtgatagcattttgaattgttcttctacatttgaaatcttagctgaaagatcatcagccaccgaccttttgtgaagctagttctctagaacatacaatgttttttaaaaaattaaaaacacagaaggaaaaaagcaagaaccaacgataaatggagcttgtgcagaatctggcagtgctgtggacctgcccatctgttctcagtgataatcacctccctccaccacagtctagcagagtgattatgctaaatatcctggttaaccaataacatacagtttcatttcagggaagcatgcacagtgtattcagaggacctcttctgactaacctgaagcatgtttcatatactgtttaaagctctacttagtaacaaattgctgttttatcactcttatttctgtatctttctaaatcttttagtcactcccagacttttcaacaagatgtgattttttttttacaaagcctttttttttttaaagggagttcttttataatttatagatcaaagtatattacagctgttacagctggcccggatattgagaggcaattgcatacaattcagtaagactgtatatactaggagtactatcaaataaaatgtaccaaatattttccacttttctgaactgctatagaatgtcatgaatacgaatgaaattattattatctcatttccccatcttagctaaaaaatcattatgtttgacaatcagtgcttcaaaaagtaccacatatttgttttaaataatcacaaccttatttcatatacatatatacacacaagaattaataaaaatatttaatacacatgaagattttcaactcaaaaatccaaaaatattgaatgcaaacatgtaggttttgttgcaaaatatgttctttttgtatatctttaacaaattcttcaatttgtacaaaagatcatattcagatgacttgacaacttttagaggtaaaaataaatgttccatttacacatcgttcaaatgtggagacttcagtaggataggaaacagaataagccaaaagtggtgtctttgtgaatgtatctaagatgacatagtcatacataataaaaaccacctactttaaacctgaaggctgtaaaggatgatgatttacacatacaacctaaattattattcattagtatttctgattctccaattatgcatgaagtttataacatcaatggaaaggatgcagaaaagtgatcctcaattctttagatgggactcctacattctgataaattaagtgtgtaggtaattatttaactagcaaactgctaaataaaccagaaaattattttaataaaatcttaatttgggaataatttctgatttatagaaaatctgcaaagaaagtacagagaattcctgtatgtccttcattcagtttttctaactgttatcttacattaactatgggacacttgtcaaaactaagaaactgatgttagtgtattattattaactaaactcaatactttacttggattttactagtattgacattaatgtgctctttgtattttaggttcaaattcaggataccatatttacttagttgtcatgtctctccagtttcttttggtgtgtgacagcttttctttgtttctcatgaccttgatggtctggagaggaactggccaaatgtaccatagaatatcccctaatcccatgaaatcatacatgtttgcctgttttcatcctgattacactgggctatgaatggataagcataccacaaaggtgaagtgtcctcaatcacatcatattagtggtacatgacatccagataacattattaatgatgtcaacctttgtcatttgacaaacaaagtttttgcctggtttctctactataaagttactattttccctttcccatactctattatttggaaagtagtacaccctcaacagggttggtaagaaatggcggaaattaagcttggccccttggaagacagagtacctacatatattaaatagatttcttctgtaatggctggcctcttttccttcaattatttactttttcagttatttacttacaacagtatagactcatgtatacttactttacactctggtttgaaatttaatattacataatttaatatgtttttcatattgtcccagctttaatcattggtagctcctttatttcaggttgtctcctgtgtccc

SEQ ID NO: 916678 - DNA, 4001 bp, Homo sapiens
attgcattttaagctacttctgtttgccttttctcagaccacattttaaatcagaaactattggttattcttcaagtaagaaaaagtgagcaacaagctaaatcttagaggtgttataaaaaattcagaagaactcacttctattgtctgaagaaagaagaaatcatgaaatcatattttttaaaatttcactttctggacatctactgcaatgtggaattaacaatttataatgatacttaaattattagagaaataacaaactctagctattcagaaacctaatattacatgtcacaaagtcagtggaaataagttggcatcatagatacttaaaataaaccttgccagaaaattatttttgttgttaaaaattatttatttttctacaaaacacacaagtactataagacattatttaaaataatgtattctttttcaaagttatagaataaaattaaactaagagtgtagtaattgcataggggccatgtatttgaagttgtatgagaggaagtcatgtcttattactttctaatgggtaaattaatcaaactaactttttgtcaaaacattttccctattttggtttattttatgtactaatggaaaatgtctagctaaaatagtgattggcattcaatctagatttctaaaatgatgtgatcatccgggttttataccctaccttaatttatgctctggaattggtaaccagctctcataactcttgctggtctggtagctgccaactatcaatgagacatatataactgtaaatcacattgcagactgtacagaagcactatttctgaaataatgcagctgaaaatactgggttcctaaaccctctactgggattgatactagttcttttgatgatataaactcacttacattttgacttttagactggtgtgtaggtatcagtcacttgacacgtgaatatttcaaatcaccttccccccaaaaaagtattgacttgtgtctcatcacttttctattttgcataccaggcaaaggatatataaaatattttcatcataaaagcacagcatattttaatacatttgcctcatatgaacatgtgaatataaaagatttatatatcatgcaaattttttattcatcccaaatttgatcttacacttttttaaataaaaaatatgcattcctttctaagaatataccaggcatttttaaaaactaagtaaatggatcatctgaccattacaatgattgcagctgtatataaaacaaacatgagcattgcaaaatattcatgtgattttacccttctatcgttttaccttttcttctagagcagccattctttcctttaagtgtagttgtaggcgttcattggattcagtcagaagtctatcaaccgtatccgataatctcttgttatgctcctcattcattttctctctttgcctagccttacattttaaaaaatgacataaaaatccattcaaaaactgtttgagattatttttatagtgttgctagttttaaattgaatttaattttacatctgttttgattaaagtggtggaaacattttattcaagtcaacaggtcatatttgtaagttttaaatataacccatactcagttaaaggctttcttcttatatacagaatacgaattcataaaccaatgattggggggtaatagttcttaatatacatactctttgaagttcttgattcttctcttcaagttgaccctctaaatgtctcatacgttcttcaatatttccatgtctctcttcagcctgttaagaaatatgaagaatacacctgaaatgtaagatttggttaacacttttcctctaaataaattgaaataaaatgtaaagcaagctactaccaactgcaaacatagtttttaaaaaataaactttcttcaaacaggcagctgaacagcattgcttgaaatgtgtcagctacaaaggcctgttacatccaagcatcagcaaaacattggagttatttatgagcaatgaaatcagccaaatgtaacatgcagactgtgcatggtttgaacacaaacctgccattgtccaatcttaagctcctgaagcactgaactgcacagatggttgattatcaataaataaaagtaacataatttttataaatgaaaagaaaaacttagatggattctatttagcaatagaaagtaaagtccagtaggactaccttcctacgtatggagatcatttcttgtagtttagcttccataacatattgataatcatcagatgaggtagaagaggttggatcagactaacgagtcaaggaaaaggagagggacaaaattgaaaaatcagaactaaagacactgacaccaaacagaacatagcacagaatgcttaaaagaaaagtgtgacagcaaatttaatactttaatagacagaattttatgtggaaagaactacattgatatttggtgaacacgatgcagttgatggttttaaataaaaaacaataatatactaaaataaaaagctatcaacctaagatatgaaaggttagtgatggctggcaatgaaagactactacagaatgaataaagcaactctgaaagagttatataataattggaattatgggaaaccaaacaccagaatatgtctctgatagattgttaaaagtttgtattagggtttgtttgtctatattacttaaaaataatggaaacagtagtttcacaatgttgaggaaaatgctagacaatgactcaggtgtaattaatttggaacaaaatttattctaaaccttgctctgtagaaaaaaagataaaaaaactaagcctgggggttattgtgagtagtccccaattcaagcaagattgagtttcctcagcaacaggaaaacttatgaaatgacttctggtctctgaatgcacactatggtcattggtctagaatctaatggcctactctcagatacttggtctcaaatattggtctaacggtccactctcagatattggtctagaatttaatggcttactctcagataggtttaattagaaattttaaatgaaaatgattgaaagtcctcaaattatcaattgacaacaatgctgtgagaacaagaaatcttgtttgtgactctcctaaatgacattaggggccaatcccaaactgttcctgcattgatttgttgctgtggaaacaaaatagtgcctaaagtgaataggcagcacagtttccttgtaagctcatgtttgcccagtgccaaggttagatacatgtcttggaggtgaccgtcaggttaccacaggtgcagagtgttcaacacatgtgacattgctgatagcaaaattgttagtatgttatgcaaggattacatatgaagttatatcaacattttaatcattgcaagttaagtaattattacatttaaaggactctatgtcaggactacaaatttaactccacagcatattctgtcacattttataagctcattctaaaacagtgaaactcactttatgccaatatagaactatatataaatatgtcatgcagtaactgaaaagaaatagtaacctattcatttgattcagatgcatatatactattttatgcaataaattcaaatttaatctatgaaagcaaacatttaacatttcaattctggtgtgcttatgcaaactacaattcaacatttacattttgtaaggctttccttctgatattcttattttataaatgtggaagataataaagacatgataaccaattcctttcctccaagtcgtcctcaaatttccaatttagaagctatacagagttaccatggtccccaaatgccataattttttaaataatattatttaaaaatatattttattaaaaataaaaatttaaataatattatttaaattttagagtaagtggatcaaaatgttgttgaaattatataatctaaattcataaagatatctgtgatccttcaaaattacattttaacatgcagttagta

SEQ ID NO: 916679 - DNA, 4001 bp, Homo sapiens
aatctggtaattgtgtaatctttatcagcagagcaaaaagctgaaataaattttaaaacaggtatatacaatatcatatctagaatgtattaattacttaggtatgagacactattcaaagctctttacagattttatttctttaattctaaagacaacatcatgagataggttctatgattgtaccaattttagcaacaacaaaggagatatggaaagtcacaaatgtgtgtggcaggcatagcaggaatttaaacagatgataaccctgagttaagaataacccgtggaatttctgatttgtgggtggaagaagaattctcactcttaactgttttttaaaaaattaatatagtgatgtactagttttgtatagtcatcataaaagaaaaaaatcttcaaagaaattgctattacaaacaaaatattcatgactaacaagcataaaaataaggccatgtctgaaatcatgttcacccacatgaaacattaaactcagaatcagccagggaggctgatgtgcaactaattagaaaacattctaattagttttctttatagttttccttgtttttcatctttatcctttccttaatcttcaaatggcagctgggtagatgtggtgaagttacatacacaacaataatttaccaggaaaaggaaagccatgttcaataagattttcattgcaagatacataacaaaaaaatctgttaattttcaagcaaagcaatgaaagctgaacactccctagcatacagagatgattctgaaaaatattgggtcaattttgtgaccatttttgacccatatctgggcattttccaatagtgtcaagagacatcatttacatttgaaaatgcgtatacaaaggaaaaaagaaacctctcaccactgccaacagacactttgtgatgggtgtgtcaattagcacaaacttttggaaaattattaagaaaataatacatcttcaaggaaaacattataagaaaataattagaaatgaacatcaagatttataaacaataatatccataggtaaaattgattaaaatgtaatttataatcatgcaaatttggataacataggaaaatatttcaaataatagtacatttttaaaaaggactgtacaggattatatctaccagtagatttcaaatacacaaaaatatattcaaagttgcatcaagctatttcctctatactgtaggttctgtgaggggaaaaacgaaaaacaaccctgatgtttactttcatacctttggcatctacatcagtatatggaacataatcaatgctcggtacaaaaaagaaagttaaatgatgaatgaatacatgtatttcccttcatatatattcaatatatgcctggtaagcagtcctttaagaacccaacatttccaagtcctgagctgattgtctaactgaatagaccaaacatttctacaggaagcagacagtgtctattcaaagaaagagtcctttcttctactcttagttttgctaaattgggcagtagaatgtttctgtttgttaatttgaaaaaaaaaaagataatagtctaacaactttttaggtttcttgtgcagtttatgtgacacaaggcatgaaaaacatttagcatataaacacatagcactaaataaatcagaggtgcagttactccagtaaacggaatctctcaaggcctatagagatgtattgtgtgattttctttttctgcctgcttttaagtttttttctgtagtgtccgtcaatgtcagcatgttagctaacaatgtgtttaatacttagcagatgctgtcttatcatcccttacttaaagtcccttaacggctccctaatgccttcattacaaaatctaaacacctcatgctgacacaaaacatacctgatgtcctggtcggcctctggctctcccttcccatctcccactgctatctcttatgtacctgcagccaaaacaaattacttacattctctgagcattctaccttctaaactttgtgatgctggacccagcctaaaatggaatttttctttaatctaaattctaatcttcctttaaagttaactcattagtttttattgcacttaaaaataattttagcttttctcaaaaatgtttaatttctaaactttttattgcttatttttatttcaaaatatttggggttcaggtggtttttggttacatggatgagttctctggtggtgatttctgagattttggtgcacctgtcattcgagcaatatactgtatactcaatatgtagtcttttttccctcactcccctcccattcttccccacaagtcccaaaagttcattacctcattcttatgcttttacagcctcatagcttagcttccacttataaataaatgagaacaaaatattgtatttggttttccattcctgatttacttcacttagaataatcaccttcagcttcatccaaattgtagcaaaagacattattttgttcctttttatgcctgagtagtattccatggtgttaagtaaaaagcttctgaacagaaaaataaataatcagcagagtaaacagacaacccactgggtaggagaaaatatttacaaactacgcatctgacaaaggaataatatccagaattgacacagaactcaaccaaatcagcaaggaaaataataataatcccatcaaaaagtgggcaaaggacatgaatagacaattttcaatagaagatatacaaatggccaacaaacatggaaaaatgctcaacatcactaattatcagggaaacgcaaagttaaaccacaatgagataccaacttattcttgcagggatgtacataatttaaaaagtcaaaaaacaatatatgttggcatggatgtggtgaaaagggaacacttttacactgctggtgggaatgtaaactagtacaaccactatggaaaacagtatggaaattccacagaaaactaaaagtagaactaccatttgatccagcaaccccactactgggtatctacccaaaggaaaataagtcattatacgaaaaagaaacatgcacctgcaagtttacagcagcaaaattcacaattgcaaagatatggaaccaacctaagttcccatcaacccagtggttaactttttattttgaaaggattttagatttatagaagagctataaagatagtacacagagttcacatgtacctttcatcctctttcctctaatgttgacatcttatggtatgttcaccatactaagaaattaatatttgtgtaacagtttacttttatttttaaaaatgattttatgtagttttaaaaatctatgccacttgaaattggtcaacaatatataataaagatagaacaatcaggcatacataggtgggtaacctttctctgaagatcattgtcataagaatgttttctctatattttccattagcaaattatgaagtgaatccagatttgtcatctatgacatttaaatggcaataaattagcagcctgatttataaatgattttcctctcagtgccagaattaaactgcattgctctacaaaaatgaacaagcaaagaaaccacaaagtcatattcaagtatttgttttttatctttttgtttacccatatgattatttcttgaattaatactacatgagcagattgatttggaattgttacaacagacaaaaaatcttttatctctgcctcactagaacttccagaatttaattaaaatttattcattgattctgccctcttctatcccagtcaagttccccccctgaacaaatacagtatatagggtcagtgcaatgagcagaattgctcagaaaatgtcctctctcctattaaccttacccacatgtgaacatctactgatgttagcatttaaaacaccttatctttcttttattctaaaagaaaattaatttaagtaataagtaaaattcagaattaaggtcttcactgttacattctatcatagtgcaattcaca

SEQ ID NO: 916680 - DNA, 4001 bp, Homo sapiens
taatttctgaaaagccagaaagggcattttaacaatttgccttgatatttgctttttcatcattcccccctcaaagtcaatttgatatataaattatgttatcttcatctagatattgatgctttcctcattaaattactgaaggttttgaaacctagtcagagacattgttaattttgttgagaaagaaaaaaagtaataataaatctgattggcttaattatcccagtgcttaaatttagccggaagaattttatatcaggaaaataactcctttattcttagcacatagccttgactgtcttttaaatttctcagatttcaaaataaaagtttgaatgcccactggagtcctcactcaagggctttcaagatccaatgtgttccttaacaatatatgccatccaagcagtacctcttcagatatgagagtgctacaaaaagctttttttcttttttctgtcaacaaatgactttatttaatcatatcactaggaattcggccctactagaggtaagaatgtaattattatccatagtgagtttcttctgaaaacatttagtcttaagaaccatcccagctccacctcagttaacctacaaggagtaattcagtgagagaaatcctagccattgtctgattacattacatgaatattctccctcctatttaactctttgaaagcctctgtcctcgggaaatatgattatcacctttaatggacacattttacactttctttaccctagtgcatttacggacagccagagccagctcaacccacactactggacagttatctctcagccacaccccccaccaccttgaagaagttgacttcatcatttccacactaaaattgttcatcctgcccaacaggacacagccaagtaggcaggaggtagagagataggagatggagaggatgaggtgaaagcaaaaggcacctaacggtaatcaacaaggaggaatttgcatctcatcttccctgggggcggggtggggccggggaggtggtcaaaaaatacagcgaaaggagacagtaaaactcaaagacagcttctgtacctaatgtctgtgatttcgggtccttgcttcttcaattgatcaatgacaaccgcagtctccggcttgaggagaagggaggctcacacccagcactcctggaccatttccctagcaacgggaggagaaaggcagctcagacacacgcgtgccccggcgccctcccggaacgtgccccggcccggtggcgtggcaggagctcggcatcttcccgtggctccgtcagcagccaaaaggagaagcgtccatcggaaaaatggcatattacaaattttgctttgggaagcaaagctcggttcagaccattgtcaaaggaggagagggggaggcggctcttaaagcagccgcggcccctttgccagaacagccgcagctccccgcgtgcagctggagccccggggcggagaccggagaccggggactgggtttgactttcagaaacttaaccacgcggcgccgctccccctccgcgcccgggccacccggggtgtgtggggcgtccctccaaaagaaagcttggagaaaaggcgtgagaagtatctgggagagaagttctccacccagtctcccctcctggagcccctctggagtttaaggctaaccctgggagttagaaacctaaaggaaaacgagtccctagggatgcaaaaagcaggacaggtctcctcctggcccccagcctgtttccgcgcgctcccgtgtctcgtttcacttaaaggaggcgctttttctctggaaaggcaaacatcaccccacgccgtcccccggccccccttccctcccccccgccgcccccccgccgccacagcacacacacccatttttctcctcccggcctttctgcaagcctctttgcttgcttcaattggccggaagaaccaacctgctggcagccggtgaggacgctacagcatcttctctcctcacttgcctcgtgcggtggctgctactcctcctcctccgtctcctcccctcctcctccttggcagccaccacctcctcttcctctggaacaagggcttcccctggaagctgctgcagtggtttccaccggcccttaaataaattctgaagtaatcacgtctttgctctcctcctcacgcacacgcgcccgcggatacactcgtctcccccagagccgctcccgggctgccgaggctcgctctgctcccagtgccccctgcgaaggcgagggccagggatgggcaaagtgggaagggggcacacgcttccccgcctgggcttctttcacacaatgggctctacagccttcgcttgtgtcagcctgcgctggtggggatgggaacggacttgggcaccttttggctccccggtcttctgtgcttgtcatttctttaagcagctttcttcccactgggccagggcatggtagtcatggttgtagggacctgagccaatctagggtgtggcggcatctgtcatttctcattacctcttcagttcttcttcattcatattgttttggtaatgggaattgtatgttaagtattccctgcccgagtaaattttagctttgagcagagtctggtctctccatcgcgctccagtcccccttatatctccacctccctttacctaccctcttttctttccgttgctgctgtccattcatacagactgaggaagcaggagacaaaatcagtacctactctgagcagaaagggaacgtttctgtgagggagagtcacgaatcctgctgggtttggtgaaaatgaagaggacatgcatgaaggaattggaggattaaacactgaatatattttgggggttactgaaaatattctgagtgtgctacacgaaagccaaaagacgtgttttacttttgtgtaacgccaagagtccaaagttaacaaagaactagtatgtaaataactgttcacttaaaattaactacaatatccaagaaacaatctttgtttctgagggaagtatttaattcagttagcgactttacaatggaaagtggggtaaagctcatgtatttacccaacttctattctagactgttatttaaattttacaacacaacacaatcctataagaagtataaaaataatacgaaaattcattagatgtcaactggagcactatttctcagacataatgtgcatacagatcatccatggatcttgttaagttgtagatactgattcaccaggaatggggtgaaacctgaaattctacccttctaatgactcccagatggtactacacttgaggaggaagggtctagaccacccaatcgacccacaatttgatgtggcttaaatacccctaactacaggaaactcttcacctcacaggatagcctagtctattttcagacaaacttcatattgtaatagcttcaacatactaatcatatatcagtactcataactttcactctctagaattctacacaaaacataaaaattccttatacatgagagatattcttatttttacatatagctattatgtctatttttacaagaattccttccttattaaaccttggtttgaatttccttggcaatcaacgtttgttaattactggctcagatgttcctactgtttccaagaagagttttgatttccttgagtcccattcgtatgtcaaatacaagttttaattgtaagtataatccccacatacagttgacacagcatagttaaaggctaacccatggtaggtatcgcagaaagaaaaactttgataatgggaggcagaaaaaaatatcacgagttaaaggatattttgttaagaagatacagtcttcatagtaaatttcagctgaaaaacttgacattatcactgctaacttcactgcaaagagtgtaaataatatattaaaactgagaaagactgtttaaagtagcaattttgcatgaggcattaggtgagccgattcacatgagaagagttaccacc

SEQ ID NO: 916681 - DNA, 4001 bp, Homo sapiens
ccacagctctatcctactgaaaaagtacactggaaaatacagtatgttttatgtactccccatagaacataaatagaaaagacttgttcaccattattgcagagccatttgcaatttctgtgtcttaagccaaaatacaaaccaaaattaaaatgttgtctttccaataaagcgaattttcctttctcaaaaagcctgctattttatccactctatttaattttttcaggaactaacaacaatacagacccaggtatgtcataaacaacagcacaaccaaacacttctttctagttctgaaacctaatgatcatttggctagaaagatagagaaccccatctatagtcctctatcccttttcctgacttgggtttactagacctactgttgtggcttctttctttctccatctcctggaaatgccttttcccttcaggggcctgggatacggattttgactcacaatgaagtccactcccatttcctccagacctggcaacagtaggatcctcactgctgaggaggaacttcggtgaaggaaaggggaaacttgactcaggagtctcagcgcttactttttttttttttttttttttttccttcctgctccaaaagagagccttaaagcactgatgagagggtcctgaatcggtgtatggagtcaatttccccgccccctcgagaaagtcaatcacacccagttagtgacctgggcacacaaaatctccacataggaaaaagacagggtttgaaataggaaataaacaaaaatcagaattctattctttcacttcttaaaagtatctttttcctcccgcaattgctttctcaaaataccaaacttggactttgaaatcaagttctttttctattgctctccgcagttcttactgaaagcaaggatttgttttggtcccacatgttgaaaacttcacgtccctataattaagagtttatatgccacgccttccaccgcgtttccctgttaaaactcccttctctaaaaaagatccctgaaaacacaactaccagctcgcccctcaagcagccacaggaaacagatctgaagattctcagcagccatcctaacctctccagatataaagctggcagctgaagggatttctcggttaaaatgagtgaatactagttgcagttttagaagtgtgcccccaagagacgagttttcccgcaagctcataattaataaacaccccaagtgaatttctcacatcctgactggattacacaaaaggatattttacattgatatataagactaacattgatattcttttaatatataataggccacaaggagacaaaaaaatacaaaactttttttttcttttcaacgagcataatttttgagtcgatgatccataattttttgtggcatttttaaatgcctcaatacacacagacagagagacacacacgcccctctggttggggttctcaggtattaccgggagcctagggtgtgggggtctaaggatacagacaagacctaaacgtccaatcctggagtattcttcacgtacaagctcggtccaagccccaggagttaagccctacccctccacccccaccacccccaaaaagtgcccgttcccattgggaaacaggagtgagttgcacaaggaaatcgacccggggaagaggaggagcagctgcaacagccagctgcagccacacaacggtgccacttccctcccgtctgggagtggagcaaaacgcccttacctggggggtggagagccgccggcactagttccaaaagttctggtccacctcctctcggagttcaaagccccagcactccggcccggccgccagctcgcagcacacgagtccttccccgtcctttccccaccctgcctgcactacaccatgtcaggaatccgggcaggcaccgagctgggagctgacatcactcccagttccaggtacctccccctcccactgccgcccttctctcctccctccctgcaggaatcagccaaagagagtcagcagtggggcggggccgggggcgcctgcgcgcccgctgattggagccggggaacgtcactcagaggagtccactaattttatgcattcctcgctgagccagactagggctggaagtgggtggatggaagaaaatgctgcccttcctgctatctctaaggaacggagataatccgatggggaagaacctggcgggtcgagttttaaacttttcttgttgtagttactgagattccagatcagaaacgaaactaacccacgcgaaccccctttttaaggagaaacaattgcctcggtgtcacaggcacacgggcatgtacaagcccggcggcgcgtggtgtagaaaatggctagctttaagccatgcaaataaaggaaaacgtcagctcacccttctgcccttttatcctgggactgctgggtgttcccttagacggggaatgtagaacttcaaaagcacttcagaaagatttggaagagactcctgaaaacggtgaccgagctttgaattgttaagtggtggtgttgtcagccatgtggctgctgttgcttttagcgatgaaaatcacaccacacaagcttctcgggcaagtaaaattgaatctctgaagcaagaaaaatgtatttccccgtttaaagaccttaaggctgctgtttcaatgcacacactgaaaagggtggaggaaggagggacctcacaattgagttccacaaaccacatgagaataattactgtagaatggaaccaattgtagtggctgagctctcaattaagaattaactaacgtttatccttgacagatatcatgcggtataatccccttggctgacagaagaaaaagattctcagaaaatggttctttcaaggcagatgctgcttacaggcagacctgaatggtgaaaagcagctttatttgtatgagatataggtagcatataacccaccatcttctaaaaatatagtgaattaataactttctcttttttttcttctttttttaaacaggtcactctgccacccaggctggagtgcagtggcatgatctggctcactgcaacctccttctcctgggttcaagtgattctactgcctcagcctccgagtagctgagactacaggcgcccaccaccacacccggctgatttttgtattttcagtagagacggggtttccgccatattggccagactggtctcgaaatcctgacctcaggtgatccaccctcttcggcctcccaaactgctgggattacaggcgtgagccaccacaccaggcctcattgttttttgattgatgacatgccatacatttaccgatctgccaaaaattgtagagggatgcacagaatccagcattgtgtcttgtttaatcttctcaatcatcctgtaaattgagtgttactagccctattttaacgtaaggaatcaaaggctcagcaaagttatgtaagtaaatttctccaaatcagctagaacttggattgaaaccgaggtctatttgactccaaagccattgattttctttctatatctcaagtattgagtgtccataatttatactttttcaaacaatagaatgctacaagaaatccacaggcttgggccactgctctcacagacctactttatataattaccatcttgttgcttgtcagacctgcagtattccaaactcctgacttgaatttctgactccagtttcccccagttctaattatttctctgtaccactcactaccgatgagttttctaaaatgtttggttttgtcatcaacatcttcccctctaaatcaggtccccctttccctgcaattcttatctagccatttaaaactctctcttatcctgcttcttacctttcccagcttatctcccacttcgctcccaggaaaccctctctgtagtcaaacaggtctactcacagatccctgcttcgttctcacctttcagcctaaccgaaatccccactcctctgtgggttaagtcc

SEQ ID NO: 916682 - DNA, 4001 bp, Homo sapiens
tcaaaacctattattctccacaaagcccattatataaaccctacaagacttaaaacagattccaaactagtgactgataggccatatgagacttgtgtttgacccacttttttttttttaataaaattctattccactgacaacatttaaaaactgggagaggatgctttttaaaaaatggtatttccaactttttttgaaaaaattagatgttctggcaaaactgggatcatattctcacatagccacaatcagctgtagctgagtggcaggtgaccccttctaagggtgaagtattcattaacgttaactgcctgatctctgcagcataccttcagcacctgcaatcattcaagaaataactgactgtcttatgtgccaagaactgtattagctactggagttacaaagataaacgagacaaacacagtccctcaccgacagtctcgcttagtagggatggcaaagaagcaattaagatacatgtgataaatgccgtgagggaagtgcaggacagctaagagtacatagcaaaaatacctaactctatggaagttagggtatacccctcaagtaaagtgacagctaaactcagatctttaatagaagttatccagaaaaagataggaggaaacagggagctcaaatgtcccagagagagaaaagagcctttgtgaagatactgagggaagaaagtattctgaggaattgaaatccgttcaacatggctacagccatgcccaacctttaaatgcagggtcagagaaagggctcaactgaaatggctggcaggaaaatctacgtgttatcaatagttaaggttaggagatgaaggagaatttcactaaagaagttgaatatgtaaaatagtttaagcaggaaatagaggtttcagaaagcacagatggggtgttgaggggttaaatggggaagaaacgaagaagcagtgatagcctaagtcgaaagaaagcacaaagcagcatggaaatgagactatagcacagaagaccacagaagcttacatcttgggcggtaaccaaggataacagagatgtaaagcatggtaagtttggctggccacaagtatgcctagagaattagtgccagcggtctcctgtcggccacggaggcattcaggcctctcaaaattcagctgcgccctggatggattgtacttccgtctctatagaagacatcggcttcactctggattgattgtgcaggctccaggagaggctgtgggttccaggctgctggaacgcaggctcccagggagtggttagaggcctggtctgtatgtgctggtaggcagaagtataaattaccttgcattacgttctgatttttctgtaggaatggtgggcatgttatggcctcttagagaaaaagcagtgcgtagccattatagatttacaggaagagaaaaggtgccaagaagatcaacacttgtccatacccatactaaagatgagtcattctgtgaatccaactctccccaagttgacctcgtctccccaactagactgagatcttcaccagaaaacaaaacaaaacaaaacataaaaggtctgtttattttgtagttcccaaagtgcctaatagctgggtaccgtgaacaccttcagtaaaattaccgacttcctgactcctctcgggtcactgaagttacctagctcagtcgtcttcttgcatattaaggcgctacagagaggcgaacccctatcttagactcaatacttccctttattccaaactccactgcgtctctccaccctcaaccgcatgggcagaattgtcacacaattcaaaggcaggagaatccaggacccgacacagaaaactcccgcccactcccccccgtttagcagcccgcacacgctctgcatccatctctgggaaaggtaaaaagcgctcaccgactctggccctccgggagaccccgtaaatgcagccgtccgctcgccgccgttatcccaggtaggtacttccggcgcgcgcaatgacgttagcgaagcgctcgcctctgggcccgccttcggggcccggatctcaaacagtcgggaagaagcaccgtggctgctattatctgctctccgcgcctgacccctcccaggactcgtgatgccaaggccgctgcgagcggctacgaagagtcggggttgagccccagctgagccgagggctcgcactcttctggtctcccaggcccaacccacctgaaggtaaacgcctcctcagctgcggccttctctcctgcggggccccctccccagactcggctgccaaaacgctctgcccctctctcccgccaccctttttattccaggaccttaacctctgcctgccttcgcggctctcagcagaacgtgtaacgcatagtttcaaatgagaaacttaaaaagcgacgtatctatgttgagttcctgaagttttctaaataattcccccataacaccaaacatgaggcagttttctcattccttcacgaattggcatgccatagagtcagtatttttccatttgtgatggttgatcttcccatctcaaatacacaccgcacgctctttttaaatcagaaatttgaatttggttgagcctgatattttcacggtaatttgctgactttgtaagataagatgtgaaaattactgattacatttgtaaactttatatacatatacacacatacctacaggtctgtctcttcgaggcaccaagcctatttatataatgtatcatttcataatttggcaataagcaaaattagcgtttcgaaagaagtttatattgtcgatacataaagcttaaatttactccttaacatcatactaaaaggggaaaagaaaattttcctcttaacacaccactccagagaaaaaaaatattaagacaagcaaaaaaggtacccagccatagtacaggcatgcacagcataacaactttttgattaacaacaaaccacatataccacagtggtctcctaagagtgtaatacattgtaccatatttttagtgtacgttttctgtgtttagctatgtaaatatttaccattgtgtttcaactgtctacattattcactacattaacatgctgtacaggttgtagcctaggagcaataggctagaccatctaggtttgtctcagtacaccctgtgatgtctgcactgtgaaatcacgtaacactcagaacatacctccttcattaagcatagcatgactgtgtattagcaaaaatcagtggctaaggttctgtctgagtccccatgctctttctgacctgggtgagcaaggtgcaggtaatgtacatatacagtacatattcaatagagcattttttttgctcatggtctgagtggaagttaggagtagcctcagggtttttccttcatctgttcaaaacccgtctccctacccatacaatctggcactgaaagtgttggtataaagaatacttgaaagaagaagaaccaaaaaagaattttttttaagtggtgactgggaaaaaggaattccttaattcagcctgctggagtcattgttcctaacttcctaaaatgtaaggaaggtgtacacatctggcataattaaatcggtgattgttaatactttattggtttttgttttttgtttttttccaaataatacccagactggtctgatgtattggttttatttggaattaataatacttggtttaggccaggtgtggtgattcatgcctgtaatcccagcactttgggaggctgaggcaggtggatcatttgaggtcaggagttcaagaccagcctgaccaacatggtgaaacactgtctctactaaaaatacaaaattagccaggcatggtagtggatgcctataatcccagctactcgggaggctgaggcaggataattgcttgaacctgggaagcagaggttgcagtgagccgagatcacgccattgcaccccagcctgggcaacaagagggaaactccgtctcaaacaacaaaaaaagaatcct

SEQ ID NO: 916683 - DNA, 4001 bp, Homo sapiens
cggcctcccaaagtgctgcgattacaggcgtgaaccaccgcgcccggcctaaatgggcttttaaataacgtttttatttcagtcaagaaatagtgtttggtatgtttggcaggctcttttttctcctttaggtctttccttacacaggtgtttatttttgctttggctttctcttggaagttacaatgctattttgtaccttcgccacccacaacgttctcttccgtgctcatcttttatgatgtgttaatttttactgtctgagctcccatcaaagcgcatttctgcctcctcactttcacactccaatcgtctagccccatttatacacgttttccatttcagcccatggagaaacgctttataggatgatgggagaaggaaaggagaattagagataataagcagagcagattccaagcagtctctcccaccggaacccttagggtcgggaaccaagcctgccccggggtatccgggccaccagaacagggtcagcatcaaggcgcccaggcattggaagagctgattggttcccggacgaaccaatcaaccagcgaggccgtgcacggataggggagggccaaaactaccgaggggatggggttaaaggaaaaggcgcaggtgtgccagccaccaggttttgcgtgcacttttgcactccctggttcattaataaccttgaattctattctaaatgtctcctagttttcccgtttcgtacagctgaggtagtagatagaagggaaaacgttacttatcttaccattcataagatggttattaatagtcagtggaaaagtggccatggagctgggggaagggcaataaaatcctccacctctcctttcccgattccactctgggtcgtcaacctaactcagtcggttcctgaaatagctgatcagtcaaacgcaagcttaatcaccaaagcggattaccaaaatgttatattagacagttggaataagtttccccctccccaagggctgagggaaatagtactggcatttaccgaaagcgcagcattttactacctgctaaaggagaagcggaggaactcgcgggctgaaagtgagagaaactgagaccttcggaaatgtacaaccacgcactcggacacggccacctcccggaatcggacacaagctcccaggcgcagtgacatctcctccaagcctccacccccataaactcttcatcacgcgggggcgtcaactatattttgggagggtgggggtacagatagcagattttccttatgtgtttcaaacttcagagcttttctgcccgttttttttccccaagtgacagagaccccggattcacagacctgtctcaccttagctttcccacgctccagcgctgccacccacccctccaccacccataccggggctggagacgccgcgtccttgggctgggggaagagggagtggggagaagagggaaatggccagtgtaagtaaagagctccccgccgaggcctggacgccggcagctagtgagagccctgaggccgagaagcagggagagaagagggctggaaccgtgcggggaagggccgcgaggagagcaggggcgccgccggtgtcgctgcactcactctgcgtagccagtggcccagggcagccgccgagtctccttgaggatgaggatggggcgggcgatgtggtcggcgctgcactccacctcgtcctgagacagccccaggaactctggccgcccgtaggggaaacgcaggggcaggtccgagcctccgcagctgccgccgccgtgctcggagcctgagctgccagccatgatgccgcccatgaaattggccacggcagatttcactcgagtgagcatattactccggcgcccggctgcagcggtgcgagcaggaggcggcgggggccgggcaaggcgcagcgcggggcatgcaggctgcggtgggcgccgggcgcacggcgagtcgggccactgggacgcgccgcgcgcggctcccagagcctagtgctgcagggggccgagccccggcctctcgtgcttagtgccgcggtggccgccgcctccccccgctacacttccgcaacggagctgcatggagcgggccgaccgggggagtcaccgcgcgctccaggagcgcccaggcggctgcagctgcagcaggtcccttccccgccccctgcgctcggctccggcgtgcgctgaactgagcccacccggcgagctcgcggagccgccgcggctgctgccacggctactgccgccgggtcatgtgataatcaggctgcaagggctcaggctgctgcggtggccgttgctcagcccctcccctgccggcccaagcgagactcgcaccgggatcgtgacctcctgggggagggggagaccggctgagtcggtacctggcggaggggatgggggcgctgtgagctggaggcggtacaggtgttagcggctgtcacgtggagccgggcagccgggaaaaggattgaagaatccactcctgaggaatgctgccttcaccctccagaaaggaaactttgggagcaggaggggaaaggggagacaggtgcaatcagggtgggaagcttctaagtcctgcggtggaaaccagcagtcactgggtgtaagagactttccagggcttaaaaataaacaagcctatacggattgcatgagaattattaaaagtttttccctaggtatttgtcgatttacttttctttttattaccactatatgcatcattatctatggagcaaaccttatttcgaacccagaataagcttaatacacaagaaaaaagatctcttaagaaatcagaggctggtctgagggcagtggtatttacaattaattgatcacaaccagttacagatttctttgttctttctccactcccgctgcttcacttgactagcctaaaagaaaaagaaacagggaccattagtatttaattgttaaataaatttatacaagcattatcctccaacgtagcaacaaaagtatcttttcaaagcttacctcgtttactatctagacaaataaatgcattttcctccaacttaggaacaaaagtatcttttcaaagcttaccttgtttactatctagacacttaaatgcagtcgtatttgaattttttttaattcagaacattgttgcaaaattatctaagggcacttataaaacgaaagaagcttaagtagaacatagcaactcaaatgctaaagtaaaaatgaataaatacttataatgataaaacatttttggtgatcatatgttagaaaacacatcttaaaaactgaatacttcatcaaggctaacatttcttaaatattggctttttagggggaggggaaactttgcaatagaacgtgtatcctgttcatgtttacctatttaatttgccagaattcggtgttacttacgcagttatgcaccaaacagcttgctctgaattcaacggagaatacaggccctcgttcttctcagtcagtgtttgggaaggagagtggcccaggtgttgaaggagaagccaattctttgaagaggaattgtgagtcaaggagttcttgctgttaggtgaggcctggataagcctcacagatgtcttttcttcagtatctataatattctttttaaaagacatttccccctttaactttttcatgtatagatattctaatttactaggtaccaaataattatgtaaaagatggcagtattttaaactttcagtgaaatgccactcctatcaatgaagtttttaaatcactttttacaaaatataaatgtaattttatcttagctccttttcttcttattttgtgcagtgttttaaatgatgcaagatatgtcttcttatcctttgcttggttaaaccgcaaactcctgaatgggaaatctctgattatatgggtggtggtgaaacatcgaacataccacattctctggtatccattgagtctaatataagcttagaatcgtctttttaagaaaacttttgttg

SEQ ID NO: 916684 - DNA, 4001 bp, Homo sapiens
ttcttacagcaaactattttaatcagtttctgaccaactgctgcctcgaataaattaaagaactatattaactagtatgaaaaagtatggttcttatataaatacctggcattaaaagaatgacaaggttttcacctacaatacaaggttttcacctgcaataacatttcaagagcatttcaggggtccttaatgacatttagtgttttttttgttgttttttttttaaagacagcataaaaggaaagaatgcacagattaagaaaaggacgagatattttcaggagcttcattttaataacttactttaaaagatctgtaaattctaacaccagagctgtccaactgttcatgccctcgactccaccactcacagcatttatagtccaacaatattttaggactgtataaaggcaaaaagcagttgaaactgccaagttcccattatgaagtgtccaagttaggggatatgactgaattcttacaaagtcttggataagatgttagcatccgttgacatgcccttgaatctgaaagcagctcatttcagcttccgtctttaaaagctgaacctcgcccctctcccacatcaacatgaatcaattgccaggcacctcacaagtcttagatgagccgaaatttaaagctttctattaacctttacttaaccactggccaccttccttcctacataaggtgacagtgttgtctgtagagggttctagctcccggctatgtggatttgaaatccaactgtcactaactgtgtgaccttggttaagtgacttcatctcagtttcttctgtaaaataacaaaaacaaaaaaaattgcaaatatcttgcaatgggtgggagaattaaatgaaatctgtcttaagtgctcaaagaatgcctgacacacagtaagcgctttagaagcgtcagttatgattacagtaataattcatggacgcaaagtgcttaagacagagcctggcacattggaaagataatgatagcgtcagcctcgttggcttcctcttcagatgcacgctcaggaaaagagcgcggagacctctccaagattagaacaacttaaaaggatttggagggcaggcgaagacaggttctcacacctcttgagacatgaacgcttgttaccaagtaacaagaaatgggccccccaagaccccagaaccacgaaaaataaaaataaaagcaagcaggaaaagagcccccaaacccggcggaactcatgccctcatcaaactgccttccgagaggacgagcaccgaaaagtccatctcgcacagcacggcacacgtcgtccaggaggctggactgggatccccaaccatcgctccaaagacccgtccagtgcgcgggggcaaacgggtaggggcgggaaacgtgggggtggggagcggagttttcaaattccacggccgggaggaagcctgcatcctcgtgcaatgaatgagcggagcctggagggtccgcagctggcgacaagttgggaatcccgggctggcctccctccggctgcagtccccggcccgtgggccaactcgaggagctcactccccacggtgctgcaagcccaaccggcctcccaactcccctccctcgagcccccggggccgcctgccgccctcaggcccgcctcccccttcagccgcccgccgccccccttaccttccagcagccgttggataatgctgtcgatgttgagtttatctaaatccgccatcgccttcccaccgccgaccctcccgcagcggcgccgccgccggctcgcgcccgggactcacacctcctttcccacgccacgagcagaggcggtggtggcggcggtggcagcagccgcggcgggtcccccccctgccaccccgctccctacttcctccttctctccccactggaaccacgagaagaacaaaatggccgccgactccttagacagcctcgggcggcgcacggatgcgcgcggggagtgcagcggcccggccgggacttctttatgggccatagggggcgcgggagggggcggggcccgggcgctggagggggcggggcccgggcgctgggcggggcgcagatggctgagcgcaaccgcgtccccgcatgggatccttccgccaaacgggccgagtaaataggcccgcccccaatgccgggcccgagcgagagttgcaaagttgcacgcgggagttggggctgggggaggaaatgcagctgtgcacaccgccggttgcggccatcgccggatcttgtgcattgagtctagatgtttgcagacctggacaggtgggagctcaccgagggatttcgggggtcctggaacttaccctttaagataaatctggggtgaggatggaaaagaataataaagaaaagaaggttgacttattttggattcagatatactggaacttgggacaagagaaaggtttatttggtaactaaaaagaaaaaaccctctttcagataagtcaaaatgtaacagttaactcattgtgagtggtgggtatatgggtatttgtatatatattttttgtgcacttctgtaactttaggggtaaaaaatccatactcaaagaaaattttatcatttctgtcccttggatttatcttccctgaactcggaaagttatgtaatcatcgggacggttatcccgattctagccagggcaaagttgaacgagcgcgtgcagcagttaaaaggggaatttgcagatttcacgcgtgcaggccgggggcgggaagagaagatgcaagctgcgcgggcggtcctgggttctgcagacacccgaagaaactttggcccattcctctctggcttcccagcctccccgagggcactcctatccaaggggcccccaaactgtgccacctccaggggctgcgcgtcgactttggctgggtttggaagtacagcccacactcagcaaacagatcggctctctttcctgacctttccatgtacgttgcttcctgcagcgctttacattttgcaaagccccctctctccgagaaattcattttgtttcccaaggcgtgcaggatgcacgaatccccatctcagtatgccacgaggtaattgcaccacccaggcatcctcttccaaagcaatgtcctcagggtgcgggctccatgtccccttacttgggccccctcgctactggtgcagggcccttgagtttcagaactcagcctatcgatccactttcctcaggcactaactcactttcccctgctacagctctgtccaccagaagtcacataagtgccatttgtcaggccaaggcaatgagcccagttggtgacattcggagttggtgcccagcgctgctgtgaacatctggctatggaggtcagggggggctcttgctggagtccacaggactttgggctactccagggcagggtgcatcatcggaatggcatttagggtagaaatatgaaagacagcaattcattcagcagacaaatatttatggagtacccactctgtgccaggcattgttctagacagggaagcaggggtgatcaagacagacaaggcttttttctatggagagtcatttagtcagtcagatggtaagcaaagatgcaaataaaaatatcagcttctgataagtgcagtggagaaaaataaacaagaaaaaaaatgctactgtgttcatttcttagtatgtgccaaaaaatgatctcattgaatccccaagataatcctaggaattatgtcctattcctatcatccccatttacagatgaagaaagtgaggcacagagaggctagggtggttgctgaaggtcacacagccaggaagttacagagtcagggctggaactcaggacagcctgaaaccacagccctcgttcatattcagtaaaacccggcagtgaacccccagcagtgttcacatccctggcacatactgggcacatatcaatttggaacccagtggaatgactgaattgtgtctctgcccacaatacgagtgccataattttcctca

SEQ ID NO: 916685 - DNA, 4001 bp, Homo sapiens
aagtttttactacaacattattcaaaataaggctatgcatcttccacacacaaccaaggcaactttgagatagcttacaagtcttttcattgttaaggggaagctatcgctgcaaagtcattttctattacagttattccaagttgcccgctaagaaaatagaaaaagcctatgttttgtcacctattaccgtcacttaaaaattgctttttatgcataactctacgtggttgtgttgcttttggcctgttaaaggcaaggcaacattatctctggattgccaatagtttctccttatttggctaacattgagagatcccaatcagactactataaaactttaatatgcacaaagcatccattttgagaaaagtttgtgaccagctttcttttttcccaaccccaaaagaaaaaccagagcttggtaaccggctttgaaaagagtgtcccctatttattcttctctttctaacaccagtgcacacccgaggacctggggctcaaggatctctgacactgcggcaaacttcgagtatcagactcaacacgttccggtccggaggtgggcaagccctttagagggcttccttactctacccacttccatccccttcctttcagccggtgcagatcagctaattacaccctgttttcccctccccagtgaccaagagtaataaatgagaaaacaggaaatcgttcgttcagggcactcggcttagggctctagattactattattatcatcatttgtaatcaagtcctaaaaagtgcaacaaatccaatgcccacctacaagtcaaagatgttcatctgcctaaccgtccgtaatgccccttgttagttttcttccttcagcatccacccctccgaatataccactgacaccggggcccaggcacaaccccactacacccctccttgtctcgaccccaaatcccagacttatccacgaatggccctggggccccaaacgaccacagttccttttcccctatgccccggaaatcacccggttcccaactccaccagcaactgttctgaaggggggcctcaagcccagcgccctcccttccaccagctctccctcccgccctctggggaaaccgccccctcaccccgcagcagggagtctcccgccgcccccagcctcaagaggtggagaactgagggcaggcccgagcaggaggccgacgagaaccctcacggtcaggagagccggcggcggggcgcacagacctggtgcagggcagtgagtccgtccacattggcgtaattgatgtcggcgccgcggtgcagcagcttgaggacctcgtccgtgtcgccgctggagcaagcagccaggaagacggcgccatcgtcgaacttcaccttggtcttctggcgcttcaccaccggaggctcgaggtccgtctcggagccgatccagcgtttcagctgctcgttccgcttctgcttcgcgtccgccatcttcatcccctctcctgccgccgggtcttcttatcgcgagggggggaagggggaggcggagagggaagagaggggaggcagggggtgtgtgaatgtttctatgagtgcgggccagaggagggctgggaacccggagccgacgctcgagacttccagtatcccacagagcactggggcggcgcacccggccgagcggacctcccttcctaccacagaagccctcccgcccccagcacggccacccgtcaccggcggccaatctaacgtaacttcgcgagatccggactgggaggcgcccttcgaccagtgcgcatgcgccctgggcctgtgcccgccccaggaagagcgctcccgcgaactgcggcggtggtggctgggccaccagagggaagcgggtgtggcccaggcagcgggggctgggacagacctggaaaggaggaagcggggaaggaaggttgtcctgtcgggctgggggctcccgggaatccggaggccagcagtggaaccgcaaggctctacagggcagatctgcctcccgtgctgtctcagctacgccgagtcgttggctcagggcggaggattttcctattggccgcgttatttgaatggaatggaggataggtcgtgaagtaggtgctgctggttgatctttctaaggaactcagatgaacttgggcatgtcagaattaataaccttttaaaagtggggtctgtgtggccgagggttttaatggtaagttcttgaggtgaccacctattgacaagggttgacctgctgtaattgctgtggcttcctgccaacccccactttagaaatgtttttcttcctctctttacttgttttgttttgctttctctcacgcttgggttctcttctttcttccttcagtgctttaagcctgtctcgtactacccatgagcttagctcagcctgattactggtccttaccttttaagggatttctggttacagctccatctctttctaaggaggggtaaagacctagctgcgtctagcatttaaacggaacgttaaggaaggcaattaattcaaccactatttattgaatacctactatgagccagtaactgtactaggcactgaagatacaatgaaaaatatgacatttatttgaaccacctcttgagttcagtcgcccaaacaagactaatttatcatcgtcataaaaaaaagactttaactttgccttgtatgaccacacgcgcacacacataggatttgtaatactgatgtcttatgagccatctatctacaatctccaccaattgattttactgaacactgcattgttaccatccactactatttttagagcatttagaaaagccaagataaaaaccacaaaaccttaccatggaagtttaggggtcatctagacagagtccctcaagaactaattaatttacttaattttacccagaagtaggattagaattcactcagcaaatactatgcacctgttctgggtcaggcattgttctaggtgctggagatagagcagtgaacaaataagcttttcttactctcagcatgatgccttttccagtggactacttcacagcctatcatattgagaaataaaataattgagtaaaacgtgattaggaaactgtctgcctgtgagacaattttctgaaccacagttattaggatagcgatagaatccaggtcagggtaaaaatatttcctctgaaaacgttgtaggaatagaaaatgaatgtaatattcataagatataccattgtatgttcattacatacattaaagataacatcagacctttgaatactcatggtgttaggtactgaaaaacattgttagcactaaaatacaaaatccctatccacagaatacagctctcagaataaaagaaaggaacttgaggattgccttgtcagctcctgtctctacctaggcaactgacagcatatcctgttttccaagaacgttatggcctatgtggtagctcttaaagtgcccttgcagtatagatgggaatctgaagatttcattcaggcaaaaggaatttagtgggaagtatgctattcctgattcaagcacttatttcaggatgcaaaattaataatagtttattaataaaacataattaagttcattcagttcccagaagctgtcagggaaaaaacaaccaaggagggctgctatcatgtgcaaatttcactgaatttagtttttcttctttcgtggctctaagggtcaagatgctctatgttaatattgaaagtactctgaaactgccacctactttgtctttagggaggattttttttaaattgttgttagtgaattaatggtactgaagaccttgggttaattctagaacaagcaaaattttttattgacacacacagtcccagcacagtggctcacacctgtaatcctatcactttgagaggctgaggcgaactctgcccaggagttcgaggctgcagtgagctctctgcactacaacctgagcgacagagctagaccctatctttaccaaaaa

SEQ ID NO: 916686 - DNA, 4001 bp, Homo sapiens
ttaatgcatttctagggttctagtgtgaaaatgagcttatcaaggtctcctggatcctcctagatctgacctcaacctatctctatactgtttgctataccattcttctcaccccctgtgctccagtcacactggccttctagttcctctgctgagcatgctttctccaaagggctttgctctgaccagaacctatttctccacctttcaccaagaatctatctctccaccctcgaccatcaactctttaccaagttacaactactggtctttcagttctcacttcaatcatgactttcacagactccatccaaactctcaaaaccttctgttcttgtataacactttatatttttccttcaaaatacttaatacaacttgcattgatacatttaatgagaagagggtcttgttttgctaatctctgtattccttagctcccagtattatgaccggcacacacaaggcaggcaaacattttttaaattaatgaaacactgccaggcatggtgactcacactggtaatccccacactttggaaggccaaggcgggaggatcgcttgagcccaggagttcaagaacagcctgggcaacatagcgagacccccaactacaaaaaaataaaaaacagttagctgggcatgatagcatgcacctgcagtcccaactactcaggtggctgaggtgggaggattgcttgagctcaggaggtcaaggctgcagtgagccgtgattgtgccattgcactctagcctgggtgacagaggaaagcctgatttaaaaaaaaaaaaaaaagaagaaataaaattaatgaatctctgataatataattatcacctaatcataataagagaatccctatcaactataaacatttttataaccaatcactttaacaaaaaccttcaacaatctcctgtggaattttagctttaaaatgtatgttaatccatagagtacgtttccattgctactgcataagtacaaccaagcaagagataaacaaattttaaatatatttgaatacattagaaatctcacatacttcttacactagcagtgtatgagaattctcgtttctccacatcccttctcagcatttgatatcatcagtcttttgtaattttagccattccagtggtatgtgctgatatctattgtgctcttaatttgcatttctctggtgaatgagattgaataactttttgtatgtttattaccaatagaatattttcttttgtgatgcatctgtgtattttgttgtttaaaacacacatgtgcacacgcatatgcacacacaatcttttcctttatgggtaataatctttttgtgtcctgtttaaaaatcttttccctacccgaaggttatgaagatattctcatagttaccttccagagtatctattacttttgtatttcacatttagatctacaatccaactggaatttatttttgtgtatggtataaggtacgggggagatgaagatgaactttttccccatatagacaggttgacaagactctcttttccccacttttctgaaatgccacctttatcataaatcaagtgtccatatctgtctggatctttttccacactctattctgattcattagtttgttgtctaattttgcactaacaccacattgtcttaattattgtggctttataagtcttaatgtccatcagagtcggtcagtcctctcactttcttgttcctaaagattgacttggctgtgcctggtctttttcatctttatatcaatttaccatttttcacacatgcatacacaaacagacaatgcacacatatctgggattttgtttggacttgtattaaatctgtgattggtttcggaagaacatctttacaatacttacagtctttcaagccatgaacatagtatatcccctcaattatttagctcagtgtttctcttagccccttacagaagtctacaaggttaatactctcattctcttacaagcatatgatggagttttccaggagcttgtatgtgacatcacaataggctagatgcagaagtggatatgagaattcagctgtcttaattaagacatttaaaaaaatttccaaaaatgtaaaacgatgccactctttttgtttcgtaaaatacatctatttttcataagcataatatttatgttggaatgtaatgggttattattttaaaataaatatttaaaagttttttcaactttattttctaatttggtaaatacagacagccaacataaacaaaaacctctttgggttcctcaatttttttttagcattaaaataataacagacaaaaaattcaaaatggtattttattgcagtcatgtgcattcacatgaagttgtaagaagtaataccaagatatccctttgtctagtttctaatggtaaaactttgcaaaactataatataatataatcagaatattaacattgatataatatactgatattcatatttacccagttttatttatttggctagtgtgtccttgatttttaatattataaagggggtcctaaaaccaaaaagtctgataactgctgatttaaaatttctttaacatttgtttgtacttttttatttgtacagactgtacatttatacaatcaatattggcatctttctgaactcgcttattatttccagctttatgtccccatcatctcctcaaaatacatgattacagttagagtaggcatgttttttcagaggggttcagccccatcagccaccattgatgaccttgtatgatacatgaataacctgagatggatcatttggtccctttcctggaaatctggaattagaactcaggaggagataaatctctctagataactagaccagaatgtaaactctggaagtgaccttattttctgcctttttaaactgggaaaacaaaaaatctggttttctattaaaaaaaaaaatctggatttgttagaaacaataatgagaaacttagagaacttcttgagttgcatatagtacctgattctaattcattccagaagccccagttctatgagatactataatcttataaattatttaggccggttccaatgggcttttcttacttacaaccaagactcctaactaatatatgcacaaaatccttctaccattttcctactagaggttggtctaacactgtaggtaagtatgcggctttgaaaattgattcctttttgtttttcaaggggctcataagaaaataattgagttgatggagttctgggaatcttagggcattttaagactccaattactatactgtgaagtacgtgtgcttgcttatgtgtgagaatgtatgcatgtttatgtataaatttgttaacaattctagaaaaagaaattggaacacaggtttgtttttctctgtagaactaactttgttatatgaagccattcccttggcaggtcattgctaagatctgctgaacagcaaacaaatctaaaaacctagacacattctacagatgtgatcttacaatgcagaatagattttttttttaaatctaggcttaacactatttttgctttacattaaattggtatatttaaaaattattatactgttgtcagacaccaggcttgctgttaaacttccaatgacttacttctcatatgtctgtcaaaaatgatctctaccaacctacactcatccatttttaatgtggaattttaaattaatacccattatcttttcatcttattatttaaaacccactattttatgctttttgaagttctctctcagctcctacaactttatctgcttaaacgttacacaggatagggtcaagattaagaacacaaggaccactatgttagtcttccctttgggttgacactgagtgatcaatcagcaggctgacatgtatacagtagttcacccagctattagtgagcctaatcctgataatattcacgccaaatttttgtcatgttaaccgtaaagacataaca

SEQ ID NO: 916687 - DNA, 4001 bp, Homo sapiens
aatcgtctttcaaaatctgtttcacactaaaacgtgtaaagtacacttgaaagaaatttgaagattcatcttatataattacattatcatttttaatgccaaaagtttccttcattctcaacaccatggttttaaaattttacgagttatgatatgccttaaataaacttcacccaaataaaaagtttgctatgcattagagaatctaaattaatgaaattgagaaagcgctagacaccctgctatatttttactgggtgccacatttttaattccatatttgtcctgcaatgtgtcaatcatttcaatatatccagtcaactttgtaaacaaaggctatactccaagtctgataagagaattccattacacaaaatttaaaatggtcatcactcccttaaacagtaagcaggacaaggaaaaatgtcactacacaccttttttttaaaaggcatcaagttaatattcatgaaatataaagccttgagtttcaacctcccaaacaagtttttactacaacattattcaaaataaggctatgcatcttccacacacaaccaaggcaactttgagatagcttacaagtcttttcattgttaaggggaagctatcgctgcaaagtcattttctattacagttattccaagttgcccgctaagaaaatagaaaaagcctatgttttgtcacctattaccgtcacttaaaaattgctttttatgcataactctacgtggttgtgttgcttttggcctgttaaaggcaaggcaacattatctctggattgccaatagtttctccttatttggctaacattgagagatcccaatcagactactataaaactttaatatgcacaaagcatccattttgagaaaagtttgtgaccagctttcttttttcccaaccccaaaagaaaaaccagagcttggtaaccggctttgaaaagagtgtcccctatttattcttctctttctaacaccagtgcacacccgaggacctggggctcaaggatctctgacactgcggcaaacttcgagtatcagactcaacacgttccggtccggaggtgggcaagccctttagagggcttccttactctacccacttccatccccttcctttcagccggtgcagatcagctaattacaccctgttttcccctccccagtgaccaagagtaataaatgagaaaacaggaaatcgttcgttcagggcactcggcttagggctctagattactattattatcatcatttgtaatcaagtcctaaaaagtgcaacaaatccaatgcccacctacaagtcaaagatgttcatctgcctaaccgtccgtaatgccccttgttagttttcttccttcagcatccacccctccgaatataccactgacaccggggcccaggcacaaccccactacacccctccttgtctcgaccccaaatcccagacttatccacgaatggccctggggccccaaacgaccacagttccttttcccctatgccccggaaatcacccggttcccaactccaccagcaactgttctgaaggggggcctcaagcccagcgccctcccttccaccagctctccctcccgccctctggggaaaccgccccctcaccccgcagcagggagtctcccgccgcccccagcctcaagaggtggagaactgagggcaggcccgagcaggaggccgacgagaaccctcacggtcaggagagccggcggcggggcgcacagacctggtgcagggcagtgagtccgtccacattggcgtaattgatgtcggcgccgcggtgcagcagcttgaggacctcgtccgtgtcgccgctggagcaagcagccaggaagacggcgccatcgtcgaacttcaccttggtcttctggcgcttcaccaccggaggctcgaggtccgtctcggagccgatccagcgtttcagctgctcgttccgcttctgcttcgcgtccgccatcttcatcccctctcctgccgccgggtcttcttatcgcgagggggggaagggggaggcggagagggaagagaggggaggcagggggtgtgtgaatgtttctatgagtgcgggccagaggagggctgggaacccggagccgacgctcgagacttccagtatcccacagagcactggggcggcgcacccggccgagcggacctcccttcctaccacagaagccctcccgcccccagcacggccacccgtcaccggcggccaatctaacgtaacttcgcgagatccggactgggaggcgcccttcgaccagtgcgcatgcgccctgggcctgtgcccgccccaggaagagcgctcccgcgaactgcggcggtggtggctgggccaccagagggaagcgggtgtggcccaggcagcgggggctgggacagacctggaaaggaggaagcggggaaggaaggttgtcctgtcgggctgggggctcccgggaatccggaggccagcagtggaaccgcaaggctctacagggcagatctgcctcccgtgctgtctcagctacgccgagtcgttggctcagggcggaggattttcctattggccgcgttatttgaatggaatggaggataggtcgtgaagtaggtgctgctggttgatctttctaaggaactcagatgaacttgggcatgtcagaattaataaccttttaaaagtggggtctgtgtggccgagggttttaatggtaagttcttgaggtgaccacctattgacaagggttgacctgctgtaattgctgtggcttcctgccaacccccactttagaaatgtttttcttcctctctttacttgttttgttttgctttctctcacgcttgggttctcttctttcttccttcagtgctttaagcctgtctcgtactacccatgagcttagctcagcctgattactggtccttaccttttaagggatttctggttacagctccatctctttctaaggaggggtaaagacctagctgcgtctagcatttaaacggaacgttaaggaaggcaattaattcaaccactatttattgaatacctactatgagccagtaactgtactaggcactgaagatacaatgaaaaatatgacatttatttgaaccacctcttgagttcagtcgcccaaacaagactaatttatcatcgtcataaaaaaaagactttaactttgccttgtatgaccacacgcgcacacacataggatttgtaatactgatgtcttatgagccatctatctacaatctccaccaattgattttactgaacactgcattgttaccatccactactatttttagagcatttagaaaagccaagataaaaaccacaaaaccttaccatggaagtttaggggtcatctagacagagtccctcaagaactaattaatttacttaattttacccagaagtaggattagaattcactcagcaaatactatgcacctgttctgggtcaggcattgttctaggtgctggagatagagcagtgaacaaataagcttttcttactctcagcatgatgccttttccagtggactacttcacagcctatcatattgagaaataaaataattgagtaaaacgtgattaggaaactgtctgcctgtgagacaattttctgaaccacagttattaggatagcgatagaatccaggtcagggtaaaaatatttcctctgaaaacgttgtaggaatagaaaatgaatgtaatattcataagatataccattgtatgttcattacatacattaaagataacatcagacctttgaatactcatggtgttaggtactgaaaaacattgttagcactaaaatacaaaatccctatccacagaatacagctctcagaataaaagaaaggaacttgaggattgccttgtcagctcctgtctctacctaggcaactgacagcatatcctgttttccaagaacgttatggcctatgtggtagctcttaaagtgcccttgcagtatagatgggaatctgaag

SEQ ID NO: 916688 - DNA, 4001 bp, Homo sapiens
tttttactgggtgccacatttttaattccatatttgtcctgcaatgtgtcaatcatttcaatatatccagtcaactttgtaaacaaaggctatactccaagtctgataagagaattccattacacaaaatttaaaatggtcatcactcccttaaacagtaagcaggacaaggaaaaatgtcactacacaccttttttttaaaaggcatcaagttaatattcatgaaatataaagccttgagtttcaacctcccaaacaagtttttactacaacattattcaaaataaggctatgcatcttccacacacaaccaaggcaactttgagatagcttacaagtcttttcattgttaaggggaagctatcgctgcaaagtcattttctattacagttattccaagttgcccgctaagaaaatagaaaaagcctatgttttgtcacctattaccgtcacttaaaaattgctttttatgcataactctacgtggttgtgttgcttttggcctgttaaaggcaaggcaacattatctctggattgccaatagtttctccttatttggctaacattgagagatcccaatcagactactataaaactttaatatgcacaaagcatccattttgagaaaagtttgtgaccagctttcttttttcccaaccccaaaagaaaaaccagagcttggtaaccggctttgaaaagagtgtcccctatttattcttctctttctaacaccagtgcacacccgaggacctggggctcaaggatctctgacactgcggcaaacttcgagtatcagactcaacacgttccggtccggaggtgggcaagccctttagagggcttccttactctacccacttccatccccttcctttcagccggtgcagatcagctaattacaccctgttttcccctccccagtgaccaagagtaataaatgagaaaacaggaaatcgttcgttcagggcactcggcttagggctctagattactattattatcatcatttgtaatcaagtcctaaaaagtgcaacaaatccaatgcccacctacaagtcaaagatgttcatctgcctaaccgtccgtaatgccccttgttagttttcttccttcagcatccacccctccgaatataccactgacaccggggcccaggcacaaccccactacacccctccttgtctcgaccccaaatcccagacttatccacgaatggccctggggccccaaacgaccacagttccttttcccctatgccccggaaatcacccggttcccaactccaccagcaactgttctgaaggggggcctcaagcccagcgccctcccttccaccagctctccctcccgccctctggggaaaccgccccctcaccccgcagcagggagtctcccgccgcccccagcctcaagaggtggagaactgagggcaggcccgagcaggaggccgacgagaaccctcacggtcaggagagccggcggcggggcgcacagacctggtgcagggcagtgagtccgtccacattggcgtaattgatgtcggcgccgcggtgcagcagcttgaggacctcgtccgtgtcgccgctggagcaagcagccaggaagacggcgccatcgtcgaacttcaccttggtcttctggcgcttcaccaccggaggctcgaggtccgtctcggagccgatccagcgtttcagctgctcgttccgcttctgcttcgcgtccgccatcttcatcccctctcctgccgccgggtcttcttatcgcgagggggggaagggggaggcggagagggaagagaggggaggcagggggtgtgtgaatgtttctatgagtgcgggccagaggagggctgggaacccggagccgacgctcgagacttccagtatcccacagagcactggggcggcgcacccggccgagcggacctcccttcctaccacagaagccctcccgcccccagcacggccacccgtcaccggcggccaatctaacgtaacttcgcgagatccggactgggaggcgcccttcgaccagtgcgcatgcgccctgggcctgtgcccgccccaggaagagcgctcccgcgaactgcggcggtggtggctgggccaccagagggaagcgggtgtggcccaggcagcgggggctgggacagacctggaaaggaggaagcggggaaggaaggttgtcctgtcgggctgggggctcccgggaatccggaggccagcagtggaaccgcaaggctctacagggcagatctgcctcccgtgctgtctcagctacgccgagtcgttggctcagggcggaggattttcctattggccgcgttatttgaatggaatggaggataggtcgtgaagtaggtgctgctggttgatctttctaaggaactcagatgaacttgggcatgtcagaattaataaccttttaaaagtggggtctgtgtggccgagggttttaatggtaagttcttgaggtgaccacctattgacaagggttgacctgctgtaattgctgtggcttcctgccaacccccactttagaaatgtttttcttcctctctttacttgttttgttttgctttctctcacgcttgggttctcttctttcttccttcagtgctttaagcctgtctcgtactacccatgagcttagctcagcctgattactggtccttaccttttaagggatttctggttacagctccatctctttctaaggaggggtaaagacctagctgcgtctagcatttaaacggaacgttaaggaaggcaattaattcaaccactatttattgaatacctactatgagccagtaactgtactaggcactgaagatacaatgaaaaatatgacatttatttgaaccacctcttgagttcagtcgcccaaacaagactaatttatcatcgtcataaaaaaaagactttaactttgccttgtatgaccacacgcgcacacacataggatttgtaatactgatgtcttatgagccatctatctacaatctccaccaattgattttactgaacactgcattgttaccatccactactatttttagagcatttagaaaagccaagataaaaaccacaaaaccttaccatggaagtttaggggtcatctagacagagtccctcaagaactaattaatttacttaattttacccagaagtaggattagaattcactcagcaaatactatgcacctgttctgggtcaggcattgttctaggtgctggagatagagcagtgaacaaataagcttttcttactctcagcatgatgccttttccagtggactacttcacagcctatcatattgagaaataaaataattgagtaaaacgtgattaggaaactgtctgcctgtgagacaattttctgaaccacagttattaggatagcgatagaatccaggtcagggtaaaaatatttcctctgaaaacgttgtaggaatagaaaatgaatgtaatattcataagatataccattgtatgttcattacatacattaaagataacatcagacctttgaatactcatggtgttaggtactgaaaaacattgttagcactaaaatacaaaatccctatccacagaatacagctctcagaataaaagaaaggaacttgaggattgccttgtcagctcctgtctctacctaggcaactgacagcatatcctgttttccaagaacgttatggcctatgtggtagctcttaaagtgcccttgcagtatagatgggaatctgaagatttcattcaggcaaaaggaatttagtgggaagtatgctattcctgattcaagcacttatttcaggatgcaaaattaataatagtttattaataaaacataattaagttcattcagttcccagaagctgtcagggaaaaaacaaccaaggagggctgctatcatgtgcaaatttcactgaatttagtttttcttctttcgtggctctaagggtcaagatgctctatgttaatattgaaagtactctg

SEQ ID NO: 916689 - DNA, 4001 bp, Homo sapiens
tgaagattagtgaaagtaggcccaagtcccggctctcttttttccctctgactcctcaggattgccttgtgcccctcccttgtctcctagatccctgaaccagctggccttcctcctcctcctccctacccacctactacacctgcctcctccaacacccaacagatacaggtgtcgggccctgtctgtgccagtgggaggcagttctccttggaactgcatccccaacctccacagtccagactcttgagccctttttcctgggtctgaggttatcctggctgatgccctgcctccaggcatagcagcctttcccctgactcccagggaacacaacccatgctgatggctctccatcctcctcatcctctacagatttgtgaggcttcaccaagagccttcccgtagtcacaccttagagctctgaggtggtggctcaccccaggccagagagaggacggagacgcaggtacctaaccctatctccacattgggaagctgaagtggtagggagagtgtgtacccctgcccgcttcccttcacatcagaccttattctaccaaacagctggagcaacaaaaatgacaaaaaacactctctccacctcatcccaagaggtcacaaagtttttttcaggttgggggtggccagccagagcctggcagcttgttgagagaaacagagaactgaccttgtgggaaattgatattctttaggaatgggaatgtctaggcaaatggacagagattacaaagagatggagcaataggcaaataagcaaatatttggcaaacaaggagtagtaaggaccacgggtggccaccctctccacacatacgctcactctcaccgaggcatacacttgctcacacactctcatacactgccccctctgccaggctgctctgagctaaaaatagaccaggctaggaggctgggccagggccctggactcccaccccttgagccaaggctgtcacagtgcttctcccttgcatattgttcagcttggaccccagcccctggaaagactccacctctggcctcccagtgctgctggctcagtcccacctggactccccactccaaagggcaggagttgggaataagggccatgtgcggagacttgaagaagggagcctcagcctacaactcgaccacccctctcccctctccctggagccccagccctctcagtggtcctcagtcccttcctgttatcactttcggagcccagcaaggtggcccccagttaggaggggacagggagagctgtttctcctcttccaactcccacccttccaggctccctctccattaccgacccctccccaggcccctcccgcactgctgctgattcccttcagcgccaccaccaagctcagaaactctagtgggggttgactgggtgggggatgcagggttgtttaaggagggaggggtcgtgtcctcaagcaggccccctcccccaggactggggaggaagagagcgactctcgcggggccaggcatcgagtggaggcgctcttccttcggtcagtctcaaagaagcacagattcgagatgtggctccgacggtgggggaggggacagaagacccccccccgccccccgcaaactgagcgttcgtcctcaaaagggcgcactgctaagggaggactaggcagggatcctgggtcccaccagtccaggggtccctcgtccttggctgggcgagtgccctgccgccccgccctgctccgcacctgctccgccgcctcggggtcaaggtgcggctccagcagcgggaccgtgaactggatctttcgggggctgttgtcttgctccatggctggggcggcggccggtgggcccgcgctgcggcgggagggaaggcggcgggactcggggctggggcgggcgcgctccctctccgctccgctccggccccggccccagcccggcgcgctcggctcccggctcccggcacagcgctcccagctcgcggctccggggactctgccgccgccgattggctccgcacccgcccctcccggccccctccccctcccccagcccggaaccttaaccccgtcgtggctgcaccggcggctgcgggggtcaccgccccgcgggccgccgagtccgggcgtggcccgggagccgtcgtagtggacagctcaggcagatacctcagtgtcctcggagttttgggcagggcgttggggtggggagtggctaggaagaacttctcctagccggagcaggttgttggggctaggaaagtagaggggcgctgcaggagaggagactaaacgcgagaggaagattgcatttatgattttaaagggggttgtattatagagaaaagatggaaaggggatttaggcatgcagcaggagggattaaggttagacttcgagagggactttcctttgcaaggaaaacactaggcggaggtaaaaacttggagggaaatacgaagtctgcacacccgtcctgtgttccctcagtgccagggagaggaaactgaagacttcagagggtctccggagggcgcgtttctctcgaagtgcctgtgggagtgggtggagggcttggggagagaggaccatctgggactcgacaaaaggaataacgatggtggggagccaatcctgcttgtgaaatcgagttctctttctgcttgctaaattaggggatggtaaagtaggtgaaaggcctgcaaggggaaaatgcctggggagggagagagaaactcctttggtggggtggcttgtttacagatagggttggtttctaatttcactattggcaggatactgaaaacgagctgctgtaactgaaggaatggaggttagactatgggaagaactgactagtttggtggaagactaagatgccagtcaatacgagccagtgagggagacaggatattcacaggagctggtgtgctcggtctaaggactggggatcactagatgggggaggggatgtgctgggcactggggaggggtagggctggatgcatcttttcgggaggagaaggtggagagaagaactggggatggggaggagggcacagggagtcctggaagaggggaaggggtctgtctctttagccttaaaccaagcaactggcaagtgccatacagattcatgcctggttcttggagaaccatatggtcatcttctcctctaaggtgtcagcctcaactctcagttgcctcctctcctgggcagccctttccagaccttgatttcacaaggccccttcccctctaacctcacaaaataacttgtcctgccttccccccagccatatctttttacacatgtcgggctcagttttctcagggtaaggctggggttatggggacccagtgggccagctggacctctgtctgcaggttaactggcccctgttttgctgtcacctggactccaggattgactcctgacacccagcctgcacttgcagggcccctttgctctctggtgtggcagggccaggtggaaaacagctggttgggcttccccgtctccattcccaacctttgcgcagatccccccacaagaagtgacagtggagaaagagatcgtgaaggccctgaagcagagaggataacggttgggggctagggagatacctggctcattagggcccagttgcttgctctggcctccttcctactcaccccacctcctaaccacacatccacagagcaggatcccaaatatcctctaaataggtgacttgtctattccccatcccattctaccaggaccatgggatgtgaagccaggattcccacatccctatgtctggggactcaggcttctctcatgagcctccatctcatttgtaaaacagacagaggatcccacctcctagggttgagtatcatcttgggtagagtacctggtgcatagaaggtcacggttaattgtagctgctggttttattgttatttcctggcaggacggcagagttgaggggtggtcacctctcagagtggtta

SEQ ID NO: 916690 - DNA, 4001 bp, Homo sapiens
aaaaattagctggacatggtgatgggcgcctataatcccagctactcgggaggctgaagcaggagaatcgcttgaaccggggaggcggaggctgcagtgagccaagattgcgccactgcactccagcctgagtgacagaggtagactccgtctgaaaaaaaaaaacgcagcacaggtcacaagctcattgagtgaggcacttctaaatgtatcagggaagacagccactgacagctgacttcggggtggatttgtacaatttcaatctgcaagctgcaggacctttctaagtctccctctcatgttaatatcaatagcgttgcctaaacattaaatgctttttcttcaacccaggtaatggggtcattcataaattaaactgagaacaacctttccagtcccatgttcacaaacactacatgtagtagaaccaaagatactaggcaattattctgagatcagattaaaaaataattactgtcataaaaaagttacagaatcatttgttccaatgccaaactctgcctcagcatatgaaatttaaagtaaccaaaaacttagtctcacctgggaagggaaatcaaagtgacatttgaacccaagttcaatgacaacacgtccttcaatttcaaagcgagcgcattgctttattcattcaaagagttttaacggcacaatatcccatagcatacacaaaatctcctaaggcgtacattatggtaaagtttctgactgcttgtgaactatatttagccctttctgccagctctctccgtagtctcccacccccaaaaggtataactggaataggcctcagggagcacctgtggcctgaaaaggctgtgaccaatcctcagagctttaccggctgcaatctacaagtaggctcgaccattctattttggatcaaggagactctgccaacccccaagtgaccgcaagtggacaagatcaatttgggagaaaacgctgtgagggttttttcgccaagccagcagcccccaccgccacactccgaaaagggtgaagatttggttaccatccaggcggcgaaagaatacggccgggctgtctgggggctcacgactgcctgtcggccggcgatcccgcagcctgggccgggctgtggtgtcgggagcacgcgaagaggcagggatccccggggcatgcggagagggaaccagaacgaggttaggagcctgcaggtgtcgcccagggaggggacgaggtcgcccagggctggcacggccgagtgagaccgagagtgtggctctggactcggacagaccggtcacactctcgggttgtgaccttgagcacacgacttgaccgctgtgcgccttagtttcctcctctctaaaatgggggtcgttcaagcggaaaacgcgcctcggagcgcttggcacggcgcctggcgcatagtaagcgctccctccatgtgagcgctctggctcctttcgccgccgggaggaactggggaagccccgcgcggggagtccccgggaggcggatccgaggctggggcaagggaaccgggtcggggactcaccgagcacgtccgcggaacggtgccgggccacgaagcacgcgtcgtccccgtagcacgcgcccttcttgaggaggcccttacggaagtccttcccgaagccgcagccggccgtcaccagtccgtagtcgccgccgccgccgccgccggccctggggtcggtctgcgagaggccgccgagcacggcgcgggccaccagccgcccgtacgagaggaccgagaacatcgccgccgccgcccccccgaggaggcggggggccgggggagcaggaggacgcggaggcccggagccggctctctcctcagccgcagtcgcgccgccgctggggcgctcctcagggcggcgcgcagtggccgccgccgcccctgcccgacgcgcggggcctcgcacgcgctcagccgcgcgcaccggagccagagcgaggtcagaagcggcggctcctccgcctcagcccaactgaagtcccggctgcagcggccgccgccgccgccgccatcttccgctccactagcgtgttccgggcggtgccggcagcaccgccccctccctggccctgcccctagccccgccccgattcaccgctcaggcccaagcccagccccttgggctcgctgccttatgcagtcaccaaggttgaacatgcgcagagggtgcggacgcagtgtctcttgggaattatagtcccggagtcgtagtcacttttgacttggctgccaaagatttaggacctagggggattcctcagacgcgggacctatgttaagttagtaggaattgcaggtgggccacgtgagggttttctaccctgttttaaccgtatcttttaaagcctgttttaaataaataacgccaccattcctttaaacaaaaacctgcaagaaaccagaatggagtcacataatgagaaacagaggtacacagatctagtgacacctccccaagtaatatactggaaggatttagggcggcaaactgtttggaaagaagagactttttgtagtcttttaggaaaaattgagaaaatgttatgtgtccctatcagagtgggaggggacacagatggtgtcatgtcccttttgctaactggcctctagccatgctcacagctgtctcaagacctttgcccttgctttcgcttctaccctttggaatgtaattcgtttacctgagggtcctgtgttttctgttgctgtatccccagaacacgtgagcacccagtaaatatgtgaatgaatgaaagaatgaatgaatatttcactagattctaagtttcccaaggacaaggatcatttgctgctcaattattagaatctaaagcaatgcctggcacacagtaggagagtgtgtaaatgtctgtggaataaaagaaggaataatgggctgggcgtggtggctcacacctgtaatcccagcactttggaaggccgaggtgggcagatcacttgaggtcaggagttcaacaccagcctggccaacatggtctctactgaaaatacaaaaaaaaattagctgggcttggtgacaaacgattgtaatgccagctactcaggaggctgagacaggagaatcgcttgaacctgggaggcagaggttgcagtgagccgagacagcgccactgcattccagcctgggagacagagctggactccatctcaaaaaaaaaaaaaggaaggagtaatggaataagaacacaaatgataaaagaaagtcatgtttgttgaatacaggaatgattgagtgaatggggttcacaaacaacagaaaatgagctttggggcaagtaattcaatttagagtaatttttagtttgattgaaacatatatttctcagaaacagcagtctttttctagttcacttttaacaagaccattgttactttggggattcccacctcgtttttaaatggtccttttttatgctttcttaatatatttaaaatgctgccaactatcaactcaacacatattattccgttatcctaattactgtcatcattaaacacttttgcagttcacagtgtgccaagtactgtctatatatatgtttctgtctttaagagctttcatcaaaattggacggaagaaatgacttcacgtagtggcattttgtcaaatatacagaacccagaaaatgttcatttactggataaatggtatagtaatgacaataatgcattcacaccttccttttttttaatggcacaagaattggagagtgcccagaagagggggtagtgcctctcggaatcctctacttggcatttatattgctgccagctgtgctaaaggtagctctttcaagtacacataccactaccagatcccagtcagtctggcaggtaattctaccccaaggacaaactttttaaaatagcatgtcaaccctatttcttgcctcgtcaaactccttcagactgctcctacttttccttttcagggcatatattacctaat

SEQ ID NO: 916691 - DNA, 4001 bp, Homo sapiens
ccttggggttggttacctccttgtgggggtggtccttgtggctttcctggaggagatcagggacttcgggacttgtctccttgtgggggtggtccttgtggctttcctggaggtgggggaccttgaggtctgttgcctccttgtgggggtggtccttgtggctttcctggaggaggtgggggaccttggggctggttacctccttgtgggggtggtccttgtggttttcctggaggagatcggggacttcgggacttgtccccttgtgggggtggtccttgtggctttcctggaggtgggggaccttgaggtttgttgcctccttgtgggggtggtccttgtggctttcctggaggaggtggggggccctggggcttgttgcctccttgtggggatggtccttgtggatttcctggaggacaaagagagaagagaaagacagagtaaaagcccacacaagattcactgaatagttgcagtaaatttttatcagcttgggtaacaagctgagtggggaaatacacaaaaatggaacaaagacattaatttatttgcattttcagtgaagacatagaactctggagtggaaagctggggaagaacaaagcagttgagggcctctcagtataaagaggagacagaatgaggatgctgcccatttctgtcatctcccagcaggcattcctggccggggggatgaggcaacacactcctgttgtcatctaagccaagcatctctgccattcaatttggtggcctgctcatgatgcccagaatcaaggttgcacgaagagtgcctatattgttaggggcactaacattaatcaactcctgaaaggaaagttttgataagaagacactggagaactgatccactcataagcagaaaaagacagtcaaaacagattgagaacgaatcaggctttacctgctattagggagggagattcttcctggctgacatctagaagagaagcacaggatgatgggaaaagttacatcttgaacctttcaagactcacaagtgttctacagggaaaagggtcttctcatgacaccccatgcatcccctaagttaactagtcagccaccatctgtgaagctgctggaaggggaggaaggtgtaaggggagacagggttgttatgacagagcaacagccatgaactcaacatagaagagccccttttttccctccctagcatccctcaagacttaatgctaatttagttcacacatgccaggtacttcaatgtgatactttggtgttcttatgccctccatttcctataaatacattgcttatgtacacatgctttctcaattggggtaaccagaagtaatcacttcaatacaatcttacccataccactcccagcacattgaaatactgcgtgtaagggagagaaaaatgacaatgattggctctgatatttctgtatctctagttaaacagagacaagtgttccatccaattctctgtctctgcagtatctctgatactgtgtgtgtttatcgccatcatcgatgctgatgcactgtacagcaaggccaccatcatccctgtgtacttactgagatcagtttaggatcttcacagctggacttccatgaatctgccttgcattctctactgcatccttcacagcacagttctatctataaatgcaaatcttaccttctcattcccctggaacaaattctttattggatttcattgtacattaaataaattagaaacccttagtgtggaatgagggtacaacaggtctcctgatcctaggcatgaaaactctgcagccccatctgtgttttcattctcctctcctccccgtaattaccattatcacctcctaagccccaagcagagtcaccacatcttttccctcttctgttttaccttcatttaagttctgagctgagctcagggccagcaaggccactgacagcagaatcaacagcatcttgcaggaggctctggagtcactcccaactctgtgctgggaggaacgtggcaactccctttataaagaggagaagaacaatggcacctttgagctccacactgggtgggcctcaccacctcagagactggcttctgctttgctcactgcaggtcaggtgtatcccttatttttctttgagactctagcccagagagatgagttggataggatatgttgttagtgtcttatttccaaaaggtacaactatgacttgaacaatggttttgaaggaactgtgtccaagccatcagcactgtgtcatcactgaactttagatatcattagagtttcaatcttttaggtaagactatcatccactttccactgtgctatttatttctgtttatgtgtgtgtgagcagcgatgctacagccagcagtgaaaatggtcaatatctctgcatctttttatgccctatttccatctcttgtgatgtgtgtgtacagatattttcatatttagctcaatttttgatgtgatagagatggtttctgctatctatgagatgtgtgaggacagcacacttctgtgcacacatagatgacagaaagctgccccgcagcctgctcaggatagggctattgttcaagtttctgtggatctcactcagctgaggcaaggcttggtcctgtacaacacaggaagtctaaaattttgtattctaaagtatttttaggggttattaatgcaaagtagacacagaaaccaccaggaaatttctagacctgagaaaactgaatacatagttctttgagggagccatgcaatgtcaggtcgctaaaatttccttcatgctcttccctttctctagaatattctataaaattcacccactgcttcatttcttttaggaattgtatcaaattcttaccactgttaattaagtggccacaattctacattcaaatgagataatcagataccgccatcaaaccctcagttgcattgtattggttttctttgtttagtcagtatttgtgttacctgttttctcagattcttcttccacaaggagtattttttctacaatattctgatatgcattcctccccacgttctttctagtacttctttgttcatattttattttctgagtcaagctcattatgtgtattttttattatgtagctggcttttccccatgaatttagtgagatttactttatttaatcttctacagaataagatatagtactcctaacctctttttttcattcctgtctgtgtaatttcacaataaatgttgtgtttccaaaaagccctctcagagtcctgcactgttagcacttcttttagctgctggttcttctcttatatctggtaaatccctgctcatcagttcgtggaatatacaggttagtcagtatcaacagctgccatttaccacttagaccttccatgtgtcttgtgtaattcttcacattttgtgcatggctggtggtaatctgaggacagcttggtgggaggtatgatgggggtagagagggtatgtgacagtaaattctaaagacaggcctcttggccattggggatgagtggatcctgtgctgtgcacatgagggtctggtctggcccttctgaagagttgcggatattagtacagggagacttcctaatacaaaaggctttgctatggataattttgcccttgcaagggaaccagacagattggtattttccctggcataaatacagatgtacttcaaaggggaatacattactaattggcaattctttctggctctatggaaagtggattggttctagctgagcttcatgagttttatcttaggcagagagtagttgtttggtcccagcagatcccactgtattgttgagatttgtgtctcttgtctcacagaccctgttttccataggaactggaaatgagcaatcctgcctaggtggcttaagttagaccatcaggtaacaaaggaatgtcagagaaaaggagcaacaaagaggcaaggatgacattgcctgtttatgtcaccaa

SEQ ID NO: 916692 - DNA, 4001 bp, Homo sapiens
tcgggacttgttgtctccttgtgggggtggtccttgtggctttcctggaggtgggggaccttgaggtttgttgcctccttgtgggggtggtccttgtggctttcctggaggaggtggaggaccttgaggctggttgcctccttgtgggggtggtccttgtggctttcctggaggagatcggggacttcgggacttgtctccttgtgggggtggtccttgtggctttcctggaggtgggggaccttgaggtttgttgcctccttgtgggggtggtccttgtggctttcctggaggaggtgggggaccttgaggctggttgcctccttgtgggggtggtccttgtggctttcctggaggagatgggggaccttgaggtttgttgcctccttgtgggggtgctccttgtggatttcctggagaacaaagagagaagagaaagacagagtaaaagcccatacaagattccctgaatagttgcagtaaatttttatcagtttgggtaacaagctgagtggggaaacacacaaaaatgagaccaagacattaatttctttgcatttcagtgaagacatagaactctggagtggagcgccagggaagaacaaagcagttgagggcctctcattataaagaggagacagaatgaggatgctgcccatttgtctgtcatctcccagcaggcactcctggccagggggatgaggtaacccactcctgctgtcatctaagccaagcatctctgccgttcaatttggtggcctgctcatgatgcccagaatcaaggttgcatgaagagtgcctatattattaggagcactaacattaatcaattcccgaaaggaaagttttgataagaagacactggagaactgatccattcataagcagaaaaagacagtcagaacagattgagaatgaatcgggatttacctgctattagggagggagattcttcctggctgacatctagaagagaagcacaggatgatgggaacagttacatcttgaaccttacaagactcacaagtgttctacagggaaaacagacttctcaccacaccccatgcatcccctaagttaactcatcagccaccatctgtgaagctgctggaaggggaggaaggtgtaaggggaggcagggttgttatgacagagcaacagccatgaactcaacatagaagagccccttttttccctccctagcatccctcaagacttaatgctaatttagttcacaaatgccaggtacttcaatgtgatattttggtgttcttatgccctccatctcctataaatacattgcttatgtacacatgctttctcaattggggtaaccagaagtaatcatttcaatacaatcttacccataccactcccagcacattgaaatactgcgtgtaagggagagaaaaatgacaatgattggctctgatatttctgtatctctagttaaacagagacaagtgttccatccaattctctgtctctgcagtatctctgatactgtgtgtgtctatcgccgtcatcgatgctgatgcactgtacagcaaggccaccatcatccctgtgtacttactgagatcagtttaggatcttcacagctggacttccatgaatctgccttgcattctctactgcatccttcacagcacagttctatctataaatgcaaatcttaccttctcattcccctggaacaaattctttattggatttcattgtacattaaataaattagaaactcttattgtggaatgagggcacaacaagtctcctgatcctaggcatgaaaactctgcagccccatctgtgttttcattctcctctcttccccgtaattaccattatcacctcctaagccccaagcagagtcaccacatcttctcccccttctgttttaccttcatttaagttctgagctgagctcagggccagcaaggccactgacagcagaatcaacagcatcttgcaggaggctctggagtcactcccaactctgtgctgggaggaacgtggcaactccctttataaagaggagaagaacaatggcacctttgagctccacactgggtgggcctcaccacctcagagactggcttctgctttgctcactgcaggtcaggtgtttcctttatttttctttgagactctagcccagagagatgagttggataggatatgttgttagtgtcttatttccaaaaggtacaactatgacttgaacaatggttttgaaggaactgtgtccaagccatcagcactgtgtcatcactgaactttagatatcattagagtttcaatcttttaggtaagactatcatccactttccactgtgctatttatttctgtttatgtgtgtgtgagcagcgatgctacaaccagcagtgaagatggtcaatatctctggatattattatgccctatttccatctcttgtgatgtgtgtgtacagatattttcatatttagctcaatttttgatgtgatagagatggtttctgctatctatgagatgtgtgaggacagcacacttctgtgcacacatagatgacagaaagctgccccgcagcctgctcaggatagggctattgttcaagtttctgtggatctcactcagctgaggcaaggcttggtcctgtacaacacaggaagtctaaaattttgtattctaaagtaattttagaggttattaacgcaaaatggacacagaaaccaccaggaaatttctagacctgagaaaactgaatacatagttctgtgagggagccatgcgatgtcatgttgctaaaatttccttcatgctcttccctttctctagaatattctataaaattcacccactgcttcatttcttttaggaattatatcgaattcttaccactgataattaagtggccacaattctacattcaaataagataatcagataccaccatcaaaccctcaattgcattctattggttttattggtttagtcagtatttgtgttacctgttttctcagattcttcttccacgagtatttttctacaatattctgatatgcattcctccccacgttctttctagtacttcttttacatattttattttctgagtcaagctcattatgtgtatcttttattatgtagctggcttttccccatgaatttggtgagatttcctttatttaatcttttaagtaataggatatatactcctcaccatcttttttcattcctgtctgtgtaatttcacaataaatgttgtgtttccaaaaagccctctcagagtcctgcattgttagcacttcttttagctgctggttcttctcttatatctggtaaatccctgctcatcagttcatggaatatacaggttagtcagtatcaacagctgccatttaccacttagaccttctgtgtgtcttgtgtaattgttcacattttgtgcatggctggtgttaatttgagaacagattggtgggaggtatgatgggggtagagagggtatgtgacagtaaatcctaaagacaggcctcttgaccgttgtggatgagtggatcctgtgctgtgcacatgagggtctggtctggcccttctgaagagttgcggatattagtacagggagacttcctaatacaaaaggctttgctatgcataactttgcccttgcaggggaaccaggcagattggtattttccctggcataaatatagacatacttcaaaggggaatacattactaattggcagttctttctggctctatggaaagtggattggttctagctgagcttcatgagttttatcttaggcagggagtagttgcttggtcccagcagatcccagtgctttgttgagatttgtgtctctggtctcacagacactgttttccataggaaatggaaatgaacaatcctgcctagctggcttaagctagaccatcaggtagcaaaggaatgtcagagacaaggagcaacaaagaggcacggatgacattgcctgattatgtcaccaactga

SEQ ID NO: 916693 - DNA, 4001 bp, Homo sapiens
ccggatgaggcgggggaccttgggactggtttcctccttgtgggggtggtccttctggctttcccggacgaggcgggggaccttgggactggtttcctccttgtgggggtggtccttctggctttcccggacgaggcgggggaccttgggactggtttcctccttgtgggggtggtccttctggctttcccggacgaggtgggggaccttgggactggtttcctccttgtgggggttgtccttctggctttcccggacgaggtgggggaccttgggactggtttcctccttgtgggggtggtccttctggctttcctggacgaggtgggggaccttgggactggttgcctccttgtgggggtcgtccttctggctttcctggaggaggtggggtacgttggggctggtttcctccttgtgggcgtcgtccttctggctttcctggaggaggtggacacacggcattcactgaatagttgccgcaaatttttacagtaacgcagctaaatggggaaatgcacaaaaataagacccagacactaatttctttgcattttcagtgaagctctagaactctggagtggaatgctggagaagaaggaagcagttgaggggctctcagtctaaggaggagtcagaataaggacactggccatttgtctgtcatctcccagcaggcactcctggcaggagggaagtcaacccactcccgttttcatctaagccaagcatctctgccattcaatttggtggccctgctcatggtccccaaaatcaaggttgcatgaagattgcctgcattattagggggactaatattaatcaatttctaaaggaaaatgttggtgagaagacactggagaactgatccattcataagcagaagaagatagttaaaacagattgagagtgaattgggatttacctgatattacggagggagattcttcctggctgacatctagaagagaagcacaggatgatgggaaaggttacatctcgaattttgcaagattcacaggtgttctacagggaaaggggacttctcaccacaccccatgcatcccctaggttagctcatcagctaccatctgtgaagctgctggaaggggaggaaggtgtaaggggaggcagggttgttaccacacagagcaacagccatgaactcaatatagaagagcccctttttttcttccctagcatccttcaagacttaatgctaatttagtttacacatgccaggtacttcaatgtgatattttggtattcttatgccctccatctcctataaatacattgcttatattcacaagctttctcaatttcggtaaccagaagtaattgtttcaatacaatcttacctataccactcccagcacattgaaatactgtgtgtaggggaaagaaaaatcacaatgattgaatctgatatttctatatctgtagttagacacaggcaagtgttttatccagttctgtctctgcagtatctctaatgtgtgtttatctccatcatcaatgctgatccactaggtagagcaaggccacaatcatccctgtgtacttactgagatcagtttaggatcttcacagctggactttcctgaatctgccttgcattcaccactgcatccttcacagcacagttctatctctctataaatgcaaatcttaccttctcattcccctggtacaaattctttattggattttcattgtacattaaataaattagaagcccttggtgtggaatgagggcacaacaggtctcctgatcctaggcatgaaacctctgcagccccatctgtgttttcattctcctctcttccccataattacaactatcacctcctaagccccaagcagagtcaccacatcttctcctccttctgtcttaccttcatttaagctctgagctgagctcagggccagcagggccaccgacagcagaatcagtagcatcttgctggaggctctggagtcactcccaactctgtgctgggagaaccatggcagctccctttataaagaggagcagaacagtggcacctttgagctccacactgggtgggcctcaccaccccagagactgggttctgctttccttactgcaggtcaggtgtatcccttatttctgtctgggactctagcccagaggaacaggttgggttggatgttgtttgtaccttatttctaaaaggtacaactatgacttgaacaaaggttttaaaggaactgtgtccaagcaatcagcacggtgtcataattgaacttcagacgtcattagagtttcaatctttttggtaagactattgtccactttcaactttgctatttatttctgtgtatgtgtgtgtgggcagtgaagctacagccagcggtgatgatgatcaatatctctggctgtttttatagcctatttccatctctcgtgatgtgtgtgtacagagagtatcacatttagcttaacttttgatgcgatagagatagtttctgctatctgggagatgtttgaggacagcacactcctgggcacacagatgacagaaggctgcctcacagcctactcaggctacagctattgttcatgcttctgtggatctcactcaagtcaggaaaggcttcttgttgtgaaacacaggaaggccaaaattgtgtattttaaagtatctttaggggttatgaatgcaaaatggacacacaaaccacgaggaaatttctagacctgagaaaactgaatatatagttccttgcaggaaccatgcaatatcatgttgccaaaacttccttcatgctcttccctttctctagaatattctacaaaattcaccctctgcttcatttcttttaagaattgtattgaattcctacctctgataattaagtggctacaattctacattcaaataaggtaatcagataccctcattaaagcctcaattgcattgtattggttttcttggtttagtcagtatttgtgttacctgttttctcagattgttcttccacaaagagtattttttctacaatattctgatatgcattcctccctgacgttctttctggtacttctttgttcatattttattttctgagtcaagctcattttgtgtaattttctttatatatctggcttttttccccaggaatttggtaagatttcctttatttaatcttctaagtaataagctataattctcaccacctttgtttcattcttgtctgtgtaatttcacaataaatgttgtgtttccaaaaagccctctcagagtcctgcattgttagcacttcttttagctgctgattcttctgttatacctagtaaatccctgctcatcagttcatggaatatacaggttagtcagtgagtcagctgccatttaccacttagaccttctgtgtgtcttgtgtaattgttcacattttgtgcatggctggtattaatttgaggacagcttggctggaggtatgatggaggtagagagggtatgtgacagtaaatcctaaagacagacctcttgaccattgtggatgagtggatcctggactgtgcagatgagggtctggtctggcccttctgaagagttgggggtaatagtacaggaagacttcctaatacagaaggctttgctacagataactttgcccttgcaagggaaccaggaagattgatattttccctggcaaaaatatagacatacttgaaaggggaatatattattaattggaaattatttctggctctatggaaagtggactggttctagctagtcttcatgagttttatcttaggcagagagtacttgcttgtgccagcaggtcccattatattattgagatttctatctctggtctcctccataggaactggagatgaccaatcctgcctaggtgtcttaagttagaccatcaggtaacaaaggaatgtcagaaacaaggagcagcagagaggccaggccaacattgcctgatgttgtcgccaacttaggttgctgcaggcc

SEQ ID NO: 916694 - DNA, 4001 bp, Homo sapiens
gctttcctggaggagatcgggcacttcgggacttgtttccttcctgtgggggtggtccttctggctttcctggatgaggtgggggaccttgggactggttacctccttgtgggggtggtctttctggctttcctggaggaggtgggggacggtgggactggttgcctccttgtgggggtggtctttctggctttcctggaggaggtggggtaccttgggactggtttcctccttgtgggggtggtctttctggctttcctggatgaggtgggggaccttgggactggttgcctccttgtgggggtcgtccttctggctttcctggaggaggtgggggaccttgggactggtttcctccttgtgggggtggtccttgtggctttcctggaggaggtgggggacgttggggctggtttcctccttgtgggcgtcgtccttctggctttcctggaggaggtgggggacatacggcattcactgaatagttgccacaaatttttacagtaatggagctaaatggggaaatgcacaaaaatgagacccagatactaatttctttgcattttcagtgaagccctagaactctggagtggaacgctgggggaaaagggagaagttgaggggctctcagtctaaggaggagtcagaataaggacactggccatttgtctgtcatctcccaggaggcactcctggccagggggatgtcaacccactcctgttgtcatctaagccaagcatctctgacattccatttggtggcctgctcatggtccccagaatcaagtttgcatgaagattgcctatatcattaggggcaataacattaatcaattcctgaaaggaaagtgttgataagaagacactggagaaatgatccatttgtaagcagaaaaagggagtcaaaacagattgagaatgaattgggatttacctgatattaggaagagagattcttcctggctgacatctagaagagaagcacaggatgatgggaaatgttacatctcaaatcttcaagactcacaagtgttctacagggaaaattgtcttctcaccacaccccatgcatcccctaggttaactcatcagccaccatctgtgaaggtgctggaaggggtggaaggtgtaagaggaggcagggttgttaccacacagagcaacagcaatgagttcaacatagaacagcccctttttttcctccctagcatccctcaagacttaatgcttatttagtttatgcatgccaggtacttcaatgtgatattttggtgttcttatgccctccatctcctgttaatatattgcatacatacacatgttttctcaataggggtaaccagaagtaatcatttcaatacaatctaacccattccactcccagcacattgaaatactgcatgtaggggagagaaaaattgtaatgattggctctgatatttctacatctttagttagacagagacaagtgttctatccagttctgtctctgcagtatctctgatgtgtatgtatctctatcatcaatgccgactgtctgtacagcaaggccaccatcatccctgtgtacttactgggatcagtataggatcttcacagctggacttccctgaatctgccttgcactctccactgcagccttcacagcacagttctatctctataaattcaaatcttaccttctcattcccctggaacaaattcgttattggatttcattgtacattaaataaattagaagtccttattgtggaatgagggcacaacaggtctcctgatcctaggcatgaaaactctgcagccccatctgtgttttcattctcctctcttccccataattaccactgtcacctcctaagtcccaagcagtcaccgcatcttttcccccttctgttttaccttcacttgaactctcagctgagctcagggccagcagggccactgacagcagaatcagcagcatctcgctggaggctctggagtcactcccaactctgtgctgggaggaacgtggcaactccctttataaagaggagcaaaacaatggcacctttgagccctgggtgggcctcaccacctcagagactgggttctgctttccttactgcaggtcaggtgtatcccttatttctctttgggactctagcccagagggatggggtgggttggatgttgtttgtgccttatttctaaaaggtacgactatgacttgaataaaggttctaaaggaactgtgtccaagctatcagcactgtgtcataattgaacttcagacatcattagagtttcaatccttttggtaagactatgtctgctttccactctactatttatttctgtgtaatatttgtgggggcagtgaagctacagccagcagtgaagatggtcaatttctctggctctttatagagcctatttccatctcttgtgatgtgtgtgtacagatagtatcacaattggctaaagttttgatgcgatagagatggtttctgttacctgtgtgatggtgtgaagacaacacactcctgggcacacatagatgacagaaagctgccccacagcctgctcgggctacaactattgttcaagcttctgtggatctgactcagctcaggcaaggcttgttgttgtgccacacaggaaggccaaaattgtgtattttaaagtacctttaggggttattaatgcaaaatgtacacagaaaccataaggaaatttctagatctgagaaaactgaatacataattccttgcgggagccatgcgatatcatgttgccaaaacttccttcatgctcttccctttgtccagaatattctataatattcaccctctgcttcatttcttttaataattgtattgaattcctaccacttataattaagtggctacaattctacattcaaataggataatcagataccctcgttaaagcctaaattgcattatattggtattcttggtttagtcagtatttgtgttacctgttttctcagattgttcttccacaaagagtatttttctataatattctgatatgcattcctccccaccttctttctggttcttctttgttcatattttattttctgagtcaagcccattatgtgtatttttctttatgtatctggcttttttccccatgaatttggtgagatttcctttatttaatcttctaagtattaggatatagtacttaccatctttgtttcattcttgtctgtgtaatttcataatacgtgttgtgtttccaaaaagccctatcagagacctgcattgttagcacttctttcagctactgattcttcgttatatctgataaatacctgcttatcagttcatggaatatacaggttactcagtatcaacagctgccatttaccacttagaccttccatgtgtcttgtgtaattgttcacattttgtgcatggctggtattaatttgagaacaccttggttggaggtatgatggaggtagagagggtatgtgacagtaaatcctaaagacaggcctcttgaacattgtggatgagtagatcctgggctttgcagatgagaatctgggtggcccttctgaagagttgcaggtaatagtacaagcagacttcctaataaaaaaggctttgctacagataactttgcccttgcaagggaaccacgaagattggtattttccctgacaaaaatatacacgtacttgaaatgggaatacaactggagatgagcaatcctgcttaggtggcttaagttagaccatcaggtaacaaaggaatgtcagagaaaaggagcagcagaggccaggctgacattgcctgatattgtcaccaactgaggttgctgcagcctgatgcaagaccgacttccccttggcaggaaggtacaggaagagaatgaaaacccccctaaagatcactcatttcaggccctttcctgaccttctccaatgtcagcaatgagtaaagtttatcaggaaagcataaatatcagctatgcactcacca

SEQ ID NO: 916695 - DNA, 4001 bp, Homo sapiens
tggttcgtgcttgtggttccaactacaggggaggctgaagtggggaggtcggggctacagtgagctctgcctgtacctctacacgccagctggggtgacagagtgagactgtgtcttaaaaacaaaaaaagcaaaaaatccctgtagcctaaagaaaacatatctaccttaattttgaaagttgctgggcttgagttggtttaaaacagacttttccctaactctttatagctacaaccataattaaaacactacaatcactacagctgtaacagcctacttaacaaattggttacaatatttttttaaaagtacaactacaagtctgcaccttcaactctcattctgaaaattcctgaatatttatttaatttcaagataaaaatcagcatggtgtttctaggttgactcctaggccttctcaaaccagttcaaaccagagtttaatgcgagaggctcagcagatttctgctttgttgtgagtcactaaaacgtgatgacctcagcagccataaaccaaaggtaatgagtatcccacagagagaaggcagatgaagggaatgtacaatatgatcctcataagactttctcattctaaaatgcagttctattctcattttctttctcctatgagattctaagaagcaatcccggaagaaggcaagaatcaagatactaagctctatcttccctactcatttagggtaaaataatttcctacacagttctacagtttatgtgtgtgtttctaactgacctatgcaaccatctgccagttgctgattttacacctttttcttcgcataaaatataataaactaactgaaatgcagccactttgaaaaatgcagtggggcttcaataatttcaatgaatttgtgccttatcttccttattctaaacatacggcctttgaaagggccttgaaaaaacagccaaatgcaacaatttctgtggcctgcttctgtacttaaacatcagcatgaagcttgcagaattaagaacttaattccctcactatcgtccctgccataccagcaaaactcaaggtgaagcataataagataacaatacacgttggaatccggaaaaatatattaaacgctcaaataactgaaagacacaggaaaaggtgtcaacaagccaacaataaacgtgtggctactgggaacaactttccacatgtggagtaaattaggatgcatgagattacattccacccaacactagtttctggatttgtttcctttgcaaatcacacctgtaaccttctcaatggcaccaaaaacaacggcactgaccctggacactcactcgccagagtttccaacgatgtcaccagtgctgaagcccacctccctactcacctgtgatgcatcggcttggggccaaatatcagagaaaggagcgctcgggtggtggggaacaggcatcagggtttgcgttccagggtcacgtgctaccacatcttgctcacaaccgctgcaccgacgcggccactcgtccccggggtcgcccggggccgcccaacttctcccgagggccggtggccgtgcaccccgccacgggttggggcatctcggggaacacctggggccttccgtccagaagcttcgggaagggggctgcccaacctgggggagtggggacaagagcggtcaccaaaaccacaacaaggtcgcagcccccatcccagctacccgaaagccccaggcgctgccgacaccgccacccaagggctgtggattagcccgcccgcggcccgcaggccgggccgccgcgccccgccccgctccggccgggcccgcgcgcagcccacctgccagctgcgctgggggcgcacgcgcctgccccactgctttgttcctcatccgggcagagttcgcctcggggccctgcccgtccgctcggccccctcaccccgggggccgctgccctaacgtttcccgtcccgcccggcccttcccggcccgcggcctcctctgggccgcaccctctgcggcgcgtttccggatcctcagccactctcagcgcccgccgctccgcccctcgtgcgtgcgccctccccgccgcggcccgcaagcggcgcccgcgcaccgcgtcgcccttctcccagcccaggcccctccgcgcgtgcgcacggcagaggcactggccgcgagaggctcggccgggagttccgcgtctccatccggccgggtagaatcgagcgccgagcgatcggcccatggttgctaggcgaccagggctgctgttcctgcagggattgagttttgaatcccctaaatcccgcagactcaggatttcgtcttcatgacattcccctactagagaagcatgggtccacacaaagcccccaaaattcgaagtatgggatttggccccgagggttgcctctgctgcccaggaggaattgggattctatcctgaatattttcggccgtctgctacacctgaaggctgcccagtttccctgcttcccgtcgtaaatgctggggtttgggattttaaacaaaatttccttccccttttctctgccctcagttctctactgcgcgccaggcactgtgcctaacgctaggagtaccgagatggctttaaaggaaggtggtcccaagctcctgagcagtagacgttgaaattacaccacactgcctggtggctcccttacaccagcagaacagcagacccaggaattcttcctgtcattcacaaagcgtctgttgaattacatctcaaacctagggatacagagcaaggcacaagccctgaccttcacctgcctgcagtctagtgggaactgatgaattttgaaaattcagtctaatgtgaaagggtagaggcacatgcaaccttttggacgagagctgggaggggtgtcaacccccataatgtttcccttcgtttacttctcatggggggaaagcacattccagatgaggaaacttcactgaacattggcaggcaggtcacattggttttgctctctgttgacaacaaatagaaatctaaatcaagaaggtcatcatctcaactgagagacagtattccctgaaatgccacttcaaatctggagcctagagaatgatgatgtatcttattaccggccgaatgctttcactaggtttgggtttggatgtctgttcttttggaacaattttattaagttgagaggtgaacataaaaatcaggtcacataaatgtaagagctaaaaccataatacttacagaggaaaataaaggcaaaaatctttgtgaccttgataggacaaaaaaatcacaaactattaaaaaattggagcaagtgcagtggctctctcctcagcactttgggaagctgaggtaggaggatcgcttgagcccaggagtttgagaccatcctgggcaacaaagtgagaccctgtctctacaaaaaataaaaaaaattagctgggcatggtggtatgcacgtgtagccccagctacttgggaggctgagacaggaggatagcttgtgcccaggagtatgaggttgcaatgagctaagattgtgccactgcactccagctcaggtgacagagagagaccctatctcaaaaaaaaaaatgacaaatcgaacttcatcaaaattaaaatggttgatcttgaaaagatactgtcaacaaaatgagtcaagtgagagactgggagaaaatattttcaaaacaaatatctgacaaaggatttgtatcttgactatataaagaaccctttaaacacaataataagaagacaattaaatttaaaaacttaggcaaaaatttcaacagccatttcaccaaagaagctatatggatggcgattaagcacacaaaaagatgtgcagcatcattaggtatcaaagaaatgcaaatcaaagcacaatgaagtgatattacacacttactagaatggcttcaattaaaaagaccaactataacaagtgttggcacagatatggagcaactggcaccctcacattttgttggtgggaatgcaaaaaa

SEQ ID NO: 916696 - DNA, 4001 bp, Homo sapiens
aatccaggacgtaatgactcctgtgactctgaatggctctgtgtattagtctttcagttttcaaagggagtaaattatatgtgtgaactgaaactatatatcttctcccagttctcagaattgatcatttattttacatcgctcttcagtctctataccagtattttagaagttgtcataagtaattcctctaagtgctacctcgctggagtggtactggagcagcaaagtagcaaaagaatactagctgggaacacaaaattaatttttacaaatttatcagtggcacgttatttctaccagtcatataatcagtagactatatagaaacagaggtactctagggtaccgtacttgtgctctgaatagctgctagacatgcagtgcacggtgcgatgtgtggtatctcaacaatgcttttcagaacaagactgtaaccttaaggtcatgatcagaaatcacacatttgaataatccatgaatgaagacggtgtgtgcgattaaaaaatacagtgctttctagttaaaatgggagataagtgaaggtaatgaaatgtgcaccatttaaataacaaaagtattgtggctattagagattcactgtgctgttactctaatggtattaagagtttggaagtacaggccgggcgctgtggctcacgcctgtaatcccagcactttgggaggctgaggcgggcagatcacgaggtcaggagatcgagaccatcctggctaacacggtgaaaccccatctctaccaaaaaatacaaaaaattagccgggcatggtggcgggcgcctgtagtcccagctactcaggaggctgaggcaggagaatggcgtgaacccgggaggcggagcttgcagtgagccgagatcgcgccactgcactccagcctgggcgacagagcgagactcccgtctcaaaaacaacaacaaaaaaagagtttggaagtacagagtagtattccagctcttggagcctagccacaggtttcacagatgcatctccatgcagaaatggctgaagcttccacagctaatctgaactttttaagggtttacatggctgggaatataattttgtatgtatgtccttatgtatatacgcgtgtgtgtccactagttttttgcttgaatgtttatcattcctgtcacttgcaatttaaatattcctaataaatagaaaaatccaaagactaagattgtgatcctttttatgtctatggtatattatgaatacagagaccttgtgcttttattggcgtaggaatcatcttgccctaatattaatattatgaaatcaaaagggtaagattcctaacatcccacataacacagcagacaaactaaagttttaatctagctttggcccttacaaattttgtgccctacggcaagttacatctcgcttagattttttcattttaaagtggaactatctgcatggatgttcgtacatgctatataacacatcctattccagagccacctaccatcagttgagctctaaatggtaaatgccacagtgagaagcagacaggaaggggcggagcgccagcggcgcccggggctacgcgccgcactgcaccgagcggcggcagcggcaagcttgggtgtgagcccgggagccgctttgcttaccgtcctgccggtcccagccgtcgctaggaggtccgcgggccctgcggcaaccctcgctacagacgctgggcgggcggcgacacctggctcatggcccccgcggcggctccgtcctccttggccgtcagggcctcaagccccgccgcgacacccacctcgtacggcgtcttctgcaaggggctctcccgcaccctgctcgccttcttcgagctggcctggcagctgcgcatgaacttcccgtacttctacgtcgcgggctcggtgatcctcaacatccgattgcaggtacatatttagagccatgactaagctaacggcctccggggccagcatgatggccgactcccagggtccgttgcggcgcggcggagcagccaatggcgagccccacagtctcgcgagagtgctcaggcgctcttcgtggctgccctcttagctgctagcggagctcctcagggggcggccgggagcctacaatccctagaaagagaatacgctgttccggaaacagaactgcagttaagaccctcgaaaacatctaagaaagtgtgcatcctaaaacacctgacgaatttcagaatgtgacaaagcgcagaggatgcattatttcaaaacaaaacagaaggctaaaatttgcaggaaaaagaaaatcagtaaaccgggaatcctcggactggattgtaagcaagatttcaatgaataagaagctgaaggtattaaggctgtgatatagaaggtacatatttcatcccacaagagaaaacaataataatcagaaattttcggtgaaaaaaacgcaaaactgtacaggaaaatcatcctccaagtaccagacataaaatgctgcaagcttttgaactaatggcgagagtgtaagaaaatgggctctacttcagtgatcctgtggcaggacgtggatcaagacttggaaccgcagaaaacgaaatcccatagtagcacaaagcttggctgttcagtgaataacatttaaataatcgtaaaatacaaatgttgtttatggtttttattgtttaagggcatacttaattatggttacaaagtggagtgcaaatgttatttaccatgttttaaaaatacagccggaaaatacaagtgggaatgttgaaggagggcgggggaagtaaatggaatgggggttatgtccttataaagtggaaacttgaaaggtactgtctgttgttgagtggggaaagacatttttattacttacagggtagccataaagtttctaaaacggtaatatattaaagagggagagtggtaggggagaacagtatgaagtcaacaggaaatggctaaagatggagagctcaggtagaatagtttaaaaaatgaaaattgatagagtacctggtgtatttgaatacagcctagagagctttcattttccaaagagtgtggggataaattagtgaatgcatatttttcaaaattaagaaaacagaacatataattttgaacgctgagaaaaataaaaatttaaaaactacactgtatacacggtatacctcaactgtgaataatagtagtcatgtaaagtcagtcataattatgtaaatactgaatactgattttacaacaaatgattctataacgctgggaggatgggagaaaagagatgtgtgtgtgtgtaatggtggtgagccaatcaagatctgatatagaaaaatgcagaaaaaggagtatacacatgttttcttcggattaaaaaaactaataataaatcaccaagagtggtaaagttttaaatcaagatctgatatagaaaagtgcagaaaaagtagtatacgcattttttttttcaggaaaaaattaactaataaaccactaagaggggtaaagtgttaaaatagttgcattgttctatattccactcattgtgtccagcaaacagtgttctatggctttaagtagtaagcatcttgccccgtccaacaccatgtctggcctagggtaattgttctttctagtctttattctttgtctccagccaaactccatttgggcacattctcctatagccttttctacctgaagatactctgtgttttaaagctaagcttaggtggcgctttttccattaaatttttcctggattccactgaccatataggagctcacttcttttaatccataaggccattttcataggttgccttatttttccctaatcgtgcatcaactgtctgttttatatacccaagacaggtttcctagactgcgataagccaaaacattttagtctaaaatatcagaagtgtagtttaatcaatgaaatagtaataccaagggatttagaatcgtggacatcactgtttcccagagcactgatgtccc

SEQ ID NO: 916697 - DNA, 4001 bp, Homo sapiens
cttgctaccttatcccagaatatttgaacaaaactcatgagaaatgtgttccaggacacggaaatattaacagcttttcaatagattcactggcacaatgaagttggagaactgtagcagttggagcctttgatggataataaactggaatcatacctatcattgaatcctagattactgaggagactgcccctgtggaggtccttgtgggcggcccccttggggaggtggtccctggggctttccaggaggaggtgggggaggaccttgctgatggcctccctgttggggtggtccttgtggccttcctcgaggaggacggggatggcctccctgttggggtggtccttgtggccttccttgaggaggagggggatggcctccctgttggggtggtccttgtggctttccctgaggaggtggtggaccttgttgctgctggcctccttgttggggtggtccctgctgagggccatcattctggttcccatcaccagcagagggttgagattgctgtcctcccaaaggtggtccctgacgctcctcatctatgaactgctcagagtctcctccatctgtgtgagttgaaacaagaagagctgagctcatgctggaaaaccctcctgtcttcatatctctctgtcttcaccacacggccggcccctctctccctgacctgcctctcaactcccaacctccccccttcccaaggcttcctaattagaactcctcttaatccacattagggtggtgaaaaatcaaatttctttactcatggtccccagaatcaaggttgggagaaaactgtttatatctctggggcactgatattagccaattcctgacaaggatgataagaagacactggagaactgatcaatttttcagggaaaaatggagacagagtttactgagaatttattgggatttacctgatattaccaagggaacgtcttcttggctgacatctagaaaagaagtacaggatgatgggaaaagttactgcatgaatcattcagagctcatagtgttctacgaggataaaggacctctgatcacaccctgtgcatcccctttgagatctcatcagccactctctgatgctaccggaagtggaagaagatgtaagggaaagcaggattgttactacactgagcgtcaaccaggaactcaacatagaagggcccctgtttgtcctctcatgattccttaagccttagtgcttatttagttaaagggctcttgagtatttcaatgaaatatttggggatccttctgccctctttcatctgtaaatatgttgtttatgtttgcaagctttctcaacaggagccaccagacatagccacttagatacaatcttacaaatgcccgtcccagcacattaaaatactacatgcaggagagaaaaaaatgacaatatttcactctggtgattctctaactctatgtagacagaggcaagtgtttacccaattctctgcctcagcaatagctctgacatgtgtttatctccttcatggatactcatccactgtccagcaaggccaccatcatccctgtctactgggatcagtataggatcttcacagctgcacttccctgaatctgtcttgcattctccatatccttcccagcagtcccatgtctctataaatgcaaatctcactctctcactcccccggtacaaattctttattgggttctatttgtgcaatcaataaattatgaggtcttgatgaggaatgaaggcacaacaggtcttctgatccttggcatgagaactcttcagtcctatctgttttctcatcctcctctcttccctccactttccccctctatagcattcgcccgtaaaccccaatcagagtcacaatatcttcccccaattcggcttaccttcatctaagtcctgagctgagctgaaggccagcagggccactgacagcagaatcagaagcatcttgcagaaggctctggtgtcactcccaactttatgctgggagaaacgtgtcagctccctttataaagacaagcaggacaatggcgcatttgagctccctaccaggtgggcctcctcgcctcagagactgggttctgctttgcttacttcaggtcaagtgtatccctcatttcttctgggactctagcctagcaggaagggttggggaggatgttgtttgtggctaatttctaaaaggtacaactatgacttggacaaatgttttgacggaactgtgtccaagcaatcagcacagtgtcaggattgaactttagacatcatttgtttttcaatctgtttggaaagactgctattctgctttccactgtgcttttcatttgtgtgtatgtgagtttgtgtgggtgtgtcagggggttgggcagcaatcctacagctaacagtgaagacggtcaatatgtctgactcttttgatagcctatttccatctctcatgatgtgtgtgcatggatatttgtatatttagctaaatttttcatgtaatagagatgctttctgcttatccgtgagttgtgtgaggacagcacactgctgggtacacatagatgacagaaggctgccccgcagcctcctcatgctacaggaaatttccaaactctgtgaatctcactacactcaggcaagcgttggtgctgtacaatacaggaaagctaaaaaatttgtattttaaaaaatatctttagggattattaaagcaaaactgaacacagaaaccaccaaggaatttctagacctaaacaaactgaaacatggttcccaaagtgagccacacgatgtcatgtagctaagacctccactttctccagaatattctatagaattcatcatctactttatttcttctaacaaataccgtagtcttcaccactaataactaagtggccatacttatatattcaacttgatgatttgtaatgcctgttcaagcctcaaatgccttgattggtcttctgttttttactcagtatttatgtcaccagtttcatcagagttttctttcacaaagatgattttttctatgatattctaatactaattctttctcattctctttcttacattcatttgttgatattttatatgctgagactaccttgtcgtttgtaattttcttcctatatagtttttttctccccacatgacttgtgggagatgacatttatttaatcttctaagcaatggtgtatggtactcctcactatctttattttcatttttgtctctacaattggacaataaactattaagtttctgaaaaatccttccagggtcctggattggtactcctcttctcagctgctgattgctctgtgatacctagaaattccctgttcctcaattcataaaatatactactcggtatcaccagctgcactttccatttcagaccttgtgtaggccttgtgtaatttttcactttttgtgcacggctagtgtttatttgaggatagcttggttggaggcatggctgagaggccatgtgacagaaaatcataaagacaaggccctagacagatgtgcatgggtggatcctgtactgtgcatacgagggtctggtctggcccttctgaagagttgcagataacaaaacaagaaggcttcctaatagattagatttttctacagacaacaatgttctcataagggacccaggcagactgatattttccctgaaataaatatagacatatttgaagtgggaatgcattcttaattggcaattcttctctggccctgtggaaactggatcagttttagctgggcttgatgggttgtatcttaggcacagggtaggtgcttaagccaagcagctcccagtgggttactgggattattttctttggtttcaccagatactgttttccattagacctggagatgagcagtcctgccttggtgatttcaggtcaaccatcatgtcaaaaaggaaggccagagaaagggaacaaagaggggtgccagacagatattgcctgatgat

SEQ ID NO: 916698 - DNA, 4001 bp, Homo sapiens
ttgctaccttatcccagaatatttgaacaaaactcatgagaaatgtgttccaggacacggaaatattaacagcttttcaatagattcactggcacaatgaagttggagaactgtagcagttggagcctttgatggataataaactggaatcatacctatcattgaatcctagattactgaggagactgcccctgtggaggtccttgtgggcggcccccttggggaggtggtccctggggctttccaggaggaggtgggggaggaccttgctgatggcctccctgttggggtggtccttgtggccttcctcgaggaggacggggatggcctccctgttggggtggtccttgtggccttccttgaggaggagggggatggcctccctgttggggtggtccttgtggctttccctgaggaggtggtggaccttgttgctgctggcctccttgttggggtggtccctgctgagggccatcattctggttcccatcaccagcagagggttgagattgctgtcctcccaaaggtggtccctgacgctcctcatctatgaactgctcagagtctcctccatctgtgtgagttgaaacaagaagagctgagctcatgctggaaaaccctcctgtcttcatatctctctgtcttcaccacacggccggcccctctctccctgacctgcctctcaactcccaacctccccccttcccaaggcttcctaattagaactcctcttaatccacattagggtggtgaaaaatcaaatttctttactcatggtccccagaatcaaggttgggagaaaactgtttatatctctggggcactgatattagccaattcctgacaaggatgataagaagacactggagaactgatcaatttttcagggaaaaatggagacagagtttactgagaatttattgggatttacctgatattaccaagggaacgtcttcttggctgacatctagaaaagaagtacaggatgatgggaaaagttactgcatgaatcattcagagctcatagtgttctacgaggataaaggacctctgatcacaccctgtgcatcccctttgagatctcatcagccactctctgatgctaccggaagtggaagaagatgtaagggaaagcaggattgttactacactgagcgtcaaccaggaactcaacatagaagggcccctgtttgtcctctcatgattccttaagccttagtgcttatttagttaaagggctcttgagtatttcaatgaaatatttggggatccttctgccctctttcatctgtaaatatgttgtttatgtttgcaagctttctcaacaggagccaccagacatagccacttagatacaatcttacaaatgcccgtcccagcacattaaaatactacatgcaggagagaaaaaaatgacaatatttcactctggtgattctctaactctatgtagacagaggcaagtgtttacccaattctctgcctcagcaatagctctgacatgtgtttatctccttcatggatactcatccactgtccagcaaggccaccatcatccctgtctactgggatcagtataggatcttcacagctgcacttccctgaatctgtcttgcattctccatatccttcccagcagtcccatgtctctataaatgcaaatctcactctctcactcccccggtacaaattctttattgggttctatttgtgcaatcaataaattatgaggtcttgatgaggaatgaaggcacaacaggtcttctgatccttggcatgagaactcttcagtcctatctgttttctcatcctcctctcttccctccactttccccctctatagcattcgcccgtaaaccccaatcagagtcacaatatcttcccccaattcggcttaccttcatctaagtcctgagctgagctgaaggccagcagggccactgacagcagaatcagaagcatcttgcagaaggctctggtgtcactcccaactttatgctgggagaaacgtgtcagctccctttataaagacaagcaggacaatggcgcatttgagctccctaccaggtgggcctcctcgcctcagagactgggttctgctttgcttacttcaggtcaagtgtatccctcatttcttctgggactctagcctagcaggaagggttggggaggatgttgtttgtggctaatttctaaaaggtacaactatgacttggacaaatgttttgacggaactgtgtccaagcaatcagcacagtgtcaggattgaactttagacatcatttgtttttcaatctgtttggaaagactgctattctgctttccactgtgcttttcatttgtgtgtatgtgagtttgtgtgggtgtgtcagggggttgggcagcaatcctacagctaacagtgaagacggtcaatatgtctgactcttttgatagcctatttccatctctcatgatgtgtgtgcatggatatttgtatatttagctaaatttttcatgtaatagagatgctttctgcttatccgtgagttgtgtgaggacagcacactgctgggtacacatagatgacagaaggctgccccgcagcctcctcatgctacaggaaatttccaaactctgtgaatctcactacactcaggcaagcgttggtgctgtacaatacaggaaagctaaaaaatttgtattttaaaaaatatctttagggattattaaagcaaaactgaacacagaaaccaccaaggaatttctagacctaaacaaactgaaacatggttcccaaagtgagccacacgatgtcatgtagctaagacctccactttctccagaatattctatagaattcatcatctactttatttcttctaacaaataccgtagtcttcaccactaataactaagtggccatacttatatattcaacttgatgatttgtaatgcctgttcaagcctcaaatgccttgattggtcttctgttttttactcagtatttatgtcaccagtttcatcagagttttctttcacaaagatgattttttctatgatattctaatactaattctttctcattctctttcttacattcatttgttgatattttatatgctgagactaccttgtcgtttgtaattttcttcctatatagtttttttctccccacatgacttgtgggagatgacatttatttaatcttctaagcaatggtgtatggtactcctcactatctttattttcatttttgtctctacaattggacaataaactattaagtttctgaaaaatccttccagggtcctggattggtactcctcttctcagctgctgattgctctgtgatacctagaaattccctgttcctcaattcataaaatatactactcggtatcaccagctgcactttccatttcagaccttgtgtaggccttgtgtaatttttcactttttgtgcacggctagtgtttatttgaggatagcttggttggaggcatggctgagaggccatgtgacagaaaatcataaagacaaggccctagacagatgtgcatgggtggatcctgtactgtgcatacgagggtctggtctggcccttctgaagagttgcagataacaaaacaagaaggcttcctaatagattagatttttctacagacaacaatgttctcataagggacccaggcagactgatattttccctgaaataaatatagacatatttgaagtgggaatgcattcttaattggcaattcttctctggccctgtggaaactggatcagttttagctgggcttgatgggttgtatcttaggcacagggtaggtgcttaagccaagcagctcccagtgggttactgggattattttctttggtttcaccagatactgttttccattagacctggagatgagcagtcctgccttggtgatttcaggtcaaccatcatgtcaaaaaggaaggccagagaaagggaacaaagaggggtgccagacagatattgcctgatgatg

SEQ ID NO: 916699 - DNA, 4001 bp, Homo sapiens
agatcacaggttctccattcaaaagctactccaattctcccagactacatatgcaggtgaattaaatttaactacagactaatttagcagtacagaaacatgtcacacatccattcttttcacaatacaaaatataccacccttatggatatacacatttccttgtttaggatgtccttaacttcaatcgagatgtgaattttccagtaaaagagacactaaactgtcatttctttaaaggtttcacacactcaaggggcattcagtgcttactgtctactaaagacaaagtcactgccaacaaagcccaattcaatttcacttatttgaaaaataaaaacataatgaagttatcaggagatattgtttatgaaacattcctttactaagttttccatacgagcaattagtggcattaggccatatgccctttagtattttctgtattttccaggtaaacctccgtccagcattttcgaggtaaacctccatccagcttgtacatttcccaacagctgagtgggctatcacacatcacccaatggtcaagaaactatccatttttccaagaggaaatgtggaactctttcaaagcattctaatttcatgcacaagtacattccatgacagtaagaaacaaaaggaggaaacatgacgacaaagcctggtcctccgccagcgcggcgcttctagggtcagattatccgcacacgagtatgtaaagacaaaatccaaaatgcatgccatggaatgaggggcaccacacaaggcggtgctctaatgagcccattattttccataatgggggatgcagatattttctcaaaatcgtgttctcctcagtcttctattgattttttggatttctattttcaacagtggcccgaggaaacggcagccagacttgactccaatgtacacacagactcaggtttcgccccgtcacctgttggctcctgaacaacactcctctttgtgaaacttacagcacccatttgaaacaagtttccagagaaaacacttcaagaaagtgtttgagaagtcacaagactcgagttgtaaaaacaaattccacacatagcctggcttataaggacacagactaacgggaaaggccgagcttttaaaaatggggctggaggaagcgagaaggaaaggatgtcaccgtactttgggaaaactcagccggccaattcttgatggggctgccagtgatggctgcagggggtcccctgggtcgtccccatccccgccgccgcagcagcagagacgcctcagagcgggcgtcggcgccccctgggccccgcaaactctgcgctccaggcggcggccgctgcttaggccgcgagggggcgccctgggccgtgggtcgaccggctccagcccctctctgcgtccccggccccaggagccagaggccgagctcaggacgcagaggcagcgagcgaacccctcctcggcgccgacgcgaagccccgagagaacagtgccccttgtcctccagcatagaacagtcgccttcgaattccccgttaccctcctccagcagaaagcctcgcgccgctcttggcgccgtgtcacctccacggagcagcactcgccctgcggctggacggtggggccgagcagccacgggtccccacgtctgtccctcagcttccaacgagaagcccctcgccggcgcgcaccctgcagccctcccgcgttcagtccccgccgccggctgccatccagccctgggacccagacagcggctcccacctgcggcccggacagcggccgagcgcggcctgcagcccctcgcggcgccggcccctgagccctcggcgcgcactagccgcccgcccgctctgcgtctgaaggaggctggcggcccggagcgggagcggaggactcccgaaggaacagagggctgggtgccctacgagtcacccgcacccactcatttccggaggagaccccagcagggtggggcagcaagcaccgggtccccactacattgcagcggaccgcgcccccgggtcgcgtcccggtgctggccccgcctggcgggcgaggggtcgcccccgccccgccgtgacgcactttcccccccggccggtccccgccgagctccctggcggcgcagcgcggcgatcctcacccgctgcagcccctcagcagccgtgaggcatcccacaaaaggtcctccagctccgcagagaccctcggtccctgccggcgtgacggactctgctcccccgggttggagtcacctcgtccaggccactgcatcccccaagccccagctccgcgtccttccaggatcctcctctgcggggagaaaaactcgtctccgctcagcgccgggagcccgcctggggccggcgatcttcaaaagtaatcagagcccgcagtaaaaaaaaaaaaaaaaaaaaaaaaaaaaaaaaaaaaagtaaccatttcgtttcctgccgatcccgcccttcgatcccagccggacccagctccccgctcccgcccgcgggcggcgcctgcccagcctgctcccgccgccgcccgctttccaggaactgtcactgctgaccgtgcccctggccgatctccacgaggtcccgcgcgcacaattcctcgaaaagttacccacccccttggccagcctagcggctcgagcacctaccgccgcccgcccgctccattctcccgagcccagtgagtgaagccgctaagatgcaaataccctaggacgcttatgtaaacttccccctcccgcaggtgcacgcgcgggccacgaaacgctgggagaatatgaaaggccacctcttaaagaaatcatctccactctgcccataacaatgatgtcagcaaatggcacatttaagcaagttctcacttagaagggctcattagcatatgaattctcttaggactttccctgcatttcggagtgattcctactgcttagcgcaggagatttatttttatcagtaaataacagcaaagaaaaggagccaggtcacgcgatgtactaactcaagtacactactgagagtttttacaaataggttaagtgaatatcattattcaaacacaaggaagtgtcccatactgaagctaatcttgtttctgagctatttgtaggtacactgagagaaagtggagtttggcttcagttgtctacagaaagggtcaagagaagcaaaacatatcctcaaagcaagcccagaaaaaaaatgatagattagtactcatcagtagaggtctaatctcttctgaactacaaattttagtttccactatagcctccttatcacaaggtgatagaaataccaagagaatgaaggggaaaatgcaatatttaagagcttcatcaatttgtaaaatatcagtaaataaaagcaatttaaagtggtcaccagttcctttggtatctttttttttttaagctaaaaaataatcctgtaccatcaggattccttgggattgatttgcaacctatgtggttctacagtatacacgtgaacaatagctcattgtaactgtgatttaaaaatacataaacaagttgccataaatagatcagtcaagtaaatcactctgtggccaaattctgttatctcagctacaaagtaaggcagctgagaagttttttttttttttttttttttttttttttgttactctcttaaagtggcagaaacagaaaagttgtggctctgctggtagactagtttggaaacactgattcggacaacacaatttgtaattcaaatagactctttattggccaaatggattccggttttgaagacgattcccaaaacgttctgatatagaactcttctggccttaggcctagtttagggatttgtgggaagacttcaaaggttaccattttcctctgtggatctgtaaaattaaccatgaatacctaggtcagatttcctttttcctacttcactctgtttgggcttcctcagggaagatttcagctacctacctataggagaaatgcgcaatca

SEQ ID NO: 916700 - DNA, 4001 bp, Homo sapiens
tttactaagttttccatacgagcaattagtggcattaggccatatgccctttagtattttctgtattttccaggtaaacctccgtccagcattttcgaggtaaacctccatccagcttgtacatttcccaacagctgagtgggctatcacacatcacccaatggtcaagaaactatccatttttccaagaggaaatgtggaactctttcaaagcattctaatttcatgcacaagtacattccatgacagtaagaaacaaaaggaggaaacatgacgacaaagcctggtcctccgccagcgcggcgcttctagggtcagattatccgcacacgagtatgtaaagacaaaatccaaaatgcatgccatggaatgaggggcaccacacaaggcggtgctctaatgagcccattattttccataatgggggatgcagatattttctcaaaatcgtgttctcctcagtcttctattgattttttggatttctattttcaacagtggcccgaggaaacggcagccagacttgactccaatgtacacacagactcaggtttcgccccgtcacctgttggctcctgaacaacactcctctttgtgaaacttacagcacccatttgaaacaagtttccagagaaaacacttcaagaaagtgtttgagaagtcacaagactcgagttgtaaaaacaaattccacacatagcctggcttataaggacacagactaacgggaaaggccgagcttttaaaaatggggctggaggaagcgagaaggaaaggatgtcaccgtactttgggaaaactcagccggccaattcttgatggggctgccagtgatggctgcagggggtcccctgggtcgtccccatccccgccgccgcagcagcagagacgcctcagagcgggcgtcggcgccccctgggccccgcaaactctgcgctccaggcggcggccgctgcttaggccgcgagggggcgccctgggccgtgggtcgaccggctccagcccctctctgcgtccccggccccaggagccagaggccgagctcaggacgcagaggcagcgagcgaacccctcctcggcgccgacgcgaagccccgagagaacagtgccccttgtcctccagcatagaacagtcgccttcgaattccccgttaccctcctccagcagaaagcctcgcgccgctcttggcgccgtgtcacctccacggagcagcactcgccctgcggctggacggtggggccgagcagccacgggtccccacgtctgtccctcagcttccaacgagaagcccctcgccggcgcgcaccctgcagccctcccgcgttcagtccccgccgccggctgccatccagccctgggacccagacagcggctcccacctgcggcccggacagcggccgagcgcggcctgcagcccctcgcggcgccggcccctgagccctcggcgcgcactagccgcccgcccgctctgcgtctgaaggaggctggcggcccggagcgggagcggaggactcccgaaggaacagagggctgggtgccctacgagtcacccgcacccactcatttccggaggagaccccagcagggtggggcagcaagcaccgggtccccactacattgcagcggaccgcgcccccgggtcgcgtcccggtgctggccccgcctggcgggcgaggggtcgcccccgccccgccgtgacgcactttcccccccggccggtccccgccgagctccctggcggcgcagcgcggcgatcctcacccgctgcagcccctcagcagccgtgaggcatcccacaaaaggtcctccagctccgcagagaccctcggtccctgccggcgtgacggactctgctcccccgggttggagtcacctcgtccaggccactgcatcccccaagccccagctccgcgtccttccaggatcctcctctgcggggagaaaaactcgtctccgctcagcgccgggagcccgcctggggccggcgatcttcaaaagtaatcagagcccgcagtaaaaaaaaaaaaaaaaaaaaaaaaaaaaaaaaaaaaagtaaccatttcgtttcctgccgatcccgcccttcgatcccagccggacccagctccccgctcccgcccgcgggcggcgcctgcccagcctgctcccgccgccgcccgctttccaggaactgtcactgctgaccgtgcccctggccgatctccacgaggtcccgcgcgcacaattcctcgaaaagttacccacccccttggccagcctagcggctcgagcacctaccgccgcccgcccgctccattctcccgagcccagtgagtgaagccgctaagatgcaaataccctaggacgcttatgtaaacttccccctcccgcaggtgcacgcgcgggccacgaaacgctgggagaatatgaaaggccacctcttaaagaaatcatctccactctgcccataacaatgatgtcagcaaatggcacatttaagcaagttctcacttagaagggctcattagcatatgaattctcttaggactttccctgcatttcggagtgattcctactgcttagcgcaggagatttatttttatcagtaaataacagcaaagaaaaggagccaggtcacgcgatgtactaactcaagtacactactgagagtttttacaaataggttaagtgaatatcattattcaaacacaaggaagtgtcccatactgaagctaatcttgtttctgagctatttgtaggtacactgagagaaagtggagtttggcttcagttgtctacagaaagggtcaagagaagcaaaacatatcctcaaagcaagcccagaaaaaaaatgatagattagtactcatcagtagaggtctaatctcttctgaactacaaattttagtttccactatagcctccttatcacaaggtgatagaaataccaagagaatgaaggggaaaatgcaatatttaagagcttcatcaatttgtaaaatatcagtaaataaaagcaatttaaagtggtcaccagttcctttggtatctttttttttttaagctaaaaaataatcctgtaccatcaggattccttgggattgatttgcaacctatgtggttctacagtatacacgtgaacaatagctcattgtaactgtgatttaaaaatacataaacaagttgccataaatagatcagtcaagtaaatcactctgtggccaaattctgttatctcagctacaaagtaaggcagctgagaagttttttttttttttttttttttttttttttgttactctcttaaagtggcagaaacagaaaagttgtggctctgctggtagactagtttggaaacactgattcggacaacacaatttgtaattcaaatagactctttattggccaaatggattccggttttgaagacgattcccaaaacgttctgatatagaactcttctggccttaggcctagtttagggatttgtgggaagacttcaaaggttaccattttcctctgtggatctgtaaaattaaccatgaatacctaggtcagatttcctttttcctacttcactctgtttgggcttcctcagggaagatttcagctacctacctataggagaaatgcgcaatcaattattgatttaaatcaaactctgaaatatcatatgattatgataaagggagtatcagcaggtgaatacattaagccaggcagaccctttttggaatagcttttaaaggacagctacattaggcaacaaaatacttccaactacaaactatagcagcacttatcactattaaatgtcagccattgtaaatgtgcttcctctaacgcagttacttgtaaatacgttttgttatattttcaacaggtactgtcatggtttattacccattgtaagcgtttttagtgatgaagcagtgtggagacagttgcaagcttcctacaaaggttcaatctcaatgaaacagactttagtctggtctgaaaggggttgttattgtcaagg

SEQ ID NO: 916701 - DNA, 4001 bp, Homo sapiens
gaatggctgctgtttaagtttaaaatcccctggtgggagtaaatattgttccagagaaaagccttgacaaatactgcgtcatccttacagaactgtcttgattaaagcagaatctttggattaagttgatgctcaattcaaaatgtatctatcttgctgtcatgggatttttttttgttttttttttcctttctagagtctgaaaacagacataatgttggggacggtcaaacaaggctgccggctcccaaggggctagagtccactcctgataatagaaggcggctgaacactgacacttcactgaggataatggagacagcaaaggcttagtgggaaagggccagttgtcacctaagtgacaggcaacagctgagctcacacatctggagccggactacggcaaacattagcaaccctcaccagtctacaccttgggcctgtctgaaaagacagatggaagttccctctactcctaaagtacattaaaaaatgtctgatggtgaaccacatcaattatataacatcaactgcaggcacagccttccaaagtactgattaagacgaggcagtagacaacactgtatgcatgaacagatacaagataccatttcagtgatttgtcattcataaaacttatcctaaaagacacatatacatgcatccatttgatagcacaaatgcatgttaactctgcaggagaggcagatttttacatgtttttttggttgtagttgttggtgctttttttttttcctttaggctggttcccgtggtgtgtttgccttgttcatggtctcagttctgccgctgatacccttttaaaaatcagcaaccaaacgcgttcggcttgtgatcctgaaccctccttaggcaagctggaactaagcgtgatgcagccgtcctccctctctcccaacccccaacctcgttcttcagcctcctgaagacaatctgtgaacaattttcccaaagtcccaagaataacacagcactgccaatagtcactggcgatgccgtttgtttttcttagagggtaatgaaaatttaacagctttctgctgcatcctgagtcccgctcctaataactattaacatgcctagtttcttcaactttttctacctcaagagaggaagacgctcccattttttccctatatctgtgctacattcagcaaacaccatcgcggggcagggggttggggagagtggtgggagttgattcgcctctgccaaaaagccaccagcccctttccccagcgctagaggagagaatcggtaccctccctccggacgccagtaggtgacaggcgatcctaagcggcgggaacacgccaacgcaccctcgcctcccggcgccccgcatcgcctcgaccctcgggctacagaacctgtttccacgccggagaaaaccaagggaagagttggttgtgatgcagcaaacaggagccatgcggagagcctctgcggagccctggcgatgctgcagccaatatctgctttccctgtctacacagcccaacaaaccgattatgaccttctccctgatcttctgcgacaccgacccagtctgggtgtcacagactccggcggtgccagcgaaggtgcccggccctacccctgcggcgctcgccccccaccaccgcgccgcagccccctctgcggaatccgccgggatccaggctgccactcacctcgcgcgagggagacgcaactcggctgcactgtcctcggcgccgctgcggggctgctgggctgcggggctgcggggctgaggagctgcggtccgcggcgtcaggggtgggcgagggtgagcagcgcacgaaccatccagagcccagaaagtctccgtgccgaccgcggcgcgtctcggggaagtcagcgcaggctgcgcgaggctggcatgttccgggcgcgctgtcgggcggcggcggccgcgggagacggcgctggcagctgggctgcaggcggagtgcgctcgggctccggagccgcgcgctgcggcgccgccgcgcaccccgccctcggccgcggggcccggcgcgagcgaaaacgcggagcgcggacgccgccgcgggatcgaggccgctgggcgcgcgcccacgcgtaccccggctcggccctgaaagcgaggtcgggcccggctcgggccgcgcccgggggcagggctgcgagcaggcctgggaccggctccacgcgcagccagtggggcagagcagcaggcggattatgcgcagggagaaaaaagttcaccaaccgcggtccagagtcgcaagtgcggctcgctcggagcctctgccccgcccccgattataagcctttttttttttttttttttaaccaacaatcccgatggactgaaacacaggaagagtgaagggacggggtggggggtgggggagagacaaacccaatttcctctgatcaaacgatttgggtaggggtgcctatttgagttccttctccttcggggggtgtgtgaagggggcagttaattaaacacttagattccttccggcgcgccttgccgagctggggacccgtttggactcgatcctgtctcgtgtaatcccacaggctggtctgagtctctgccccggaaccggaggagtgatctttcagagcaagaagccaaagttcagcctctagtccgttcccttccccgcctcgacggccctggtcgtctccatgaaaactcagtgtgggggatcgtgcccgcgaaaacctcagcccaccgcaatgtccagagcctgacccaagtgaacgtggcgcacttaaaagcgggttcaaagcattgatccgaacacggtgacaatttttcactggccaaactactctccacattttcagtctgctcaattcccagagctgggctctcaggcgcactcacccacgttgaactggggctcagcctgtttgaaagttctgccctgacatttgtgtcacactaaaccttagaaccccccaccctctccagttccggatcggtggagtctcaccgtgtgggtactatttccctggactgcagagggcagacacaggcggcagctgttaacccgaacttgacaggtgcctctgcaaagccagggcttccttgacctctccatcctctccacaacgctctaggatactgtatcatcttccaggaagatgaggatgtgtgtggggggagtgtggagggaggtgttgactgatgcaatttttatccttttaagaaaaatcaaaactgccagtctcagaatttctcagaacatcaagtcttttcgattttcgttgggaataaagcaaaggaatactcagcaaaaatggagccgatgaaaagagaatgcaaggaaataaaggcaaatggaggaggaaactgtctaaatccaggaaaatgtatggcttcagcactgtgctctataattctgactcagatctccccacgctgtagatactttctcctgtctagatgcccaggcagagttcctgagctcagatcactcaggaaacaaggctgttgcttttgaaataattccacttgctagcgttgtttttttttttttttttttttttttttttttttgagacggagtttcgctcttgtcacacaggctggagtgcagtggcgcgatctccgctcactgcaacctccgccccgcccccgtgttgaagcgattctccttcctcaacctcccgagtagctgggattacaggcacctgccaccgcgcccaggtaatttttgtatttttagtagagacagtttccccatgttggccaggctggtctcgaactcctgacctcaggtgacgagaatctgggaaagaacaaaccaggttttcttgcccctcagcattttattggaattggcctttgaagttgtgtctgtttatcttgctggggttacaaatgcttctattaagctatcaacttttaggttctatctaacctccagaactgccaaagaaaatttcactacctccataggtgaaataaatcttattgctgtacagtgacttca

SEQ ID NO: 916702 - DNA, 4001 bp, Homo sapiens
tttcctaatagaatgggtatgggaatgtgagaaagagaggaatcaagaataactccaggggtatgaaggaaaaagaatataaatgtttattatgactgaactgtacacttaaacgtggtaaagataataagttttatatgtatatttgacctcaataaaaataaacaattaaaagaaaaaaagaataacttccatggtggaagagaatgtaattctcttttatttccctctttttttttttttttgaggccaagtctcgctctgtcgcccagactggagtgcaatggcgcgatcttggctcactgcaacctccacctcccgggttcaagcgattctcctgcctcagcctcctcagtagctgggattacaggcgcgtaccaccacgcccggctaattatttccctttcctaaatcatgtcgacttcctcttcctagtagctagatactcaattttttttgtcctagtaaaaatgcaaccaattcactcccaaatgatttcatcagtaatgcagaacgtcaaagaacaaaaaaggattaatcacttgccaaacaattaaaaagtggcttttcatctagaataaactctaaaaatttaatctcaaaacgcaagaggaatcaacccattcttggtttacaaaataaaacaacaaaatatattaaaaaaagatttcttactctgtgagaatatactgcgcctatatcaatcttgtatggattcattttctgcatctccttttccagatcactctggttgttgaaggattggtagcgaatgtaaatatcatctttcaatgtgaatgaaaattcacggtgttgaaagtaattctttatcactgcaaaataaatgtacattttaaagttaatttgctactttatttggctcagggcattataattttagccaatgagaagttttttttttcggtgagggaatcttgcttgcttcctgctctgtcgcccagactggagtgcagtggctcgataaaggctcactgcaacctccgcctcccgggttcaagggatcctaccacctcagcctcccgaggctgtagctgggactacaggcatgcgacccaccatgcccagataatttttgtattttttgtagaaacggggtttcaccatgttggccaggctggtctcgaattcctgacctcaggtaatccgtcctcctcggctttccaaagtgctgggattataggcgtaagccacggcactcggcccgagaagatgtttttaatgagccccctatgctcaacaccgtggtagatgtaaaagaaaaacaaaacaaaatccacatgacctagtccctaatttgaaagcagttaccattccgtatttgctagggaacggtacaaaagatgaaacagatgcataaatattttaaatatgtaatgccacccctctctcctcgattcgcactaataaattcagctgcaaggaagaaagtatttctcttcctctgagagaggctcttccgctcctgatgcaaaccatgcctcagcagcttcacgctacgccccagtaaccccctgggcaccgctgcaggtaaacggggcacctaatgtgagcctgaccacgcagaggtaggagcggcggctctgttttttttttttttttttttttttttacagcgtggccgcaggctggcttattatatcctctctcggcccatttacacctatgaagtggtggggcgggctcgagagagcaaatgaaggcgcgcggcacaaagcctggtgcacagaaggcgcttcatattgtcattctaaggacaccccgcctccaacctcctcacactccgctcccgaacccattcctcgcctccatcacctccaccgtagttgagccagcgatagtactgagagtagggaaagagcctccggtaataaagtttaagcagctcgggcagctcggtggggtcaaacgtctccattgagcgcggaactcgccacggtaaggattaccacaggaattggcgggaacagcacggccggcggccccgcgactgcgcaggcgcttatggccgaggtcggctgtctgacccggcggcccgcagtccgccggggccgccgggaattgtagttcccacttggtgcgcgcgggggctgcgggagacgcagcagtttgcgatctgcccacgcgttcgggcactagggccaccgctcttgtgggcagaaggccgcgtccattccaggaagaggatcttctccggaaatgtgagacctatagcatattgatttaggttattaagatgaagtaaaaaggatgctccacgtgaactttttggatgttttagaaataacaccagtatctttttttttttttttttgagacagagtctcgctctgttgcccaggctggagtgcagtggcgcgatctcggctcactgcaagctccgcctcccgggttcacgccattctcctgcctcagcctccctagtagctgggactacaggcgccagccaccacgcccggctaatttttttttatttttttatttttttatttttagtagagacggggtttcatcgtgttagccaggatggtctcgatctcccgacctcgtgatccgcccgcctcagcctcccaaagtgctgggattacaggtgtgagccaccacgcctggccgacaccagtatcttttaaaaacgtttgtaggcaggtgcggtggctcatgcttgtaacgtcagcactttgggaggccaaggcaggaggatcgcttgaggccaggagttcgagaccggttggggcaacattgtgagatctctgtctacacacacgcacccacacacaactagccagatgtagttgcgtgcgcctgtagtcccagctaccctagaggctgaagggttgggggcggggagtggggggagggggcaatcaatctctcgagcttgggaggtccaggctgttgtgagccatgatagtgccactgcactccagtctgggcaacagagaaagaccgtgtctaaaaaaaaaaaagttttggaaattagttcttcatggaatttcatgaattactagatccaatatgtggaaataaataaccaaatgagaaaagcataggctatttattcagagcttactatagcaagggagtcagccatcatcacttgcatttgacaggactcaaaggcaggcagaggagtaggaaagctttataaaaaagggaagccgtcaaggtattctttgattggaggctgttggcatggagaagctgtacctgggctaactagtagtaggatgcggtatgtgattggtttaggggtgggtgtttggctttctttggttggacctatgttggaagctgttaaggaagctgtaggatactagttaaggcatttgggcccattgctacaggggttgttgtttggcctccaggatcatcattagagatagcagtttgactttatacaagtctgacttgtagcaagcttgcttcctgtgctgtttattatagataagggggttggtttccccagcaggttgctgtagattgtgggtcagagttctgtttttatatatggtctggctgctgttcatatatttagtctctcaaatagaacacccaggtataagaaaatatgaattataggaagcttgcagaatcatggagagctttacaagtatgaagggaacccatctgctattgatgtggagatctgccaatcactcttactgtgtaatgataccttatggcaattgtgggctagagtgggcagtcacatgaataacatgtcacatgaaaaacatagttttattttattttacttatttttttgagacagagtctcgctgtgtcgcccaggttggaatgcagtggcacaatcatggctcactgcaaccttggtcacccaggctcaagcaattctcatgcctcagcctcccaaatagctaggattacaggtgtgcactgccacacccagctaacttttgtatttttagtagagacagggtttcactatgttggccaggctggtctcaaactcctggcctcaa

SEQ ID NO: 916703 - DNA, 4001 bp, Homo sapiens
ccttcagacagaccctcaccgcccactgacctctagaagctgaaagacttttctatgtacgctttaaaaaaaagcagggtgaggccgggagtggtggctcatgcctgtaatcgcagcactttgggcggcccaggcgggcggatcacttgaggtcaggagttcaagaccaacctgggcaacatggcgaaaccccacctctaccaaaaatacacaaaattagccaggcatggtggcacacgcctgtagtcccagctactcgggaggctgaggcaggatggtttgagtccgggagacgaaggttgcagtgccccgagattgtgctactgccctccagcctgggcaacagagtgagactccatctcaaagaaggaaaaaaaaaaaataagtagggtgggttcagtggctcacgcctgtaatcccagcactttgggaggccgaggcaggcggatctcctgaggtcaggagatggagaccatcctggctaacacggtgaaaccccgtctctactaaaaatataaaaaattagccgggcgtggtggcgggtgcctgtcgtcccagctactcgggaggctgaggcaggagaatggcgtgaacctaggaggcggagcttgcagtgagccgagatcgcgccactgcactccagcctgggcgacagagcgagactcggtctcaaaaaaaaaaaaaagtaggctgaaccggccagcaccgtagctcacgcctgcgatcccagcactttgggaggccaaggcataaagattgcttgaacccgggagttcgagaccagcctggagaacattgtgagaccaccgtcttttttatttttatttatattttttttttgagacgaagtctagctctgtcgcccaggctggagtgcagtggcgcgacctcggctcactgcaagctgcgcctcccgggttcacgccattctcctgcctcagcctcccgagtagctgggaccacaggcgcccgccaccacgcccggctaattagtgagaccaccgtcttttaaaaaataagtagggtgaatcaaaagtgttgggcagaactaaacacctctggcaactgccgtcagctgttccgctctactttcagcttgtatatgtacctggtttgcctccaaaatggataaattcccaaactaacttttacaaaagctccagtttgtgtaaaggtgagggaatttgtctcaaagcagtgcaattaattacacctaagagaaaagcagaagctggggctcaattactgttagctcgactctgaattaattaagaatttgaaactctgtcccagagctgctttctccttaatgatgttaaaccaagtgagcacctcctccctcagggtgactttctcatattggtaattagacacaggttcttggaccgctaagagaactcttacaggaccatctggcttttaagtgcaccgggtaatgtaccacctccctctccgttctggtgtttttcgaaaggatgtgacgggaatctagtggagggttcctctcctcaacattagtcaaggggaatcgggttcctccacaccgctcgcaccttgatttcctcggagtggaagaggtcggcgtcttcggggctgtccatcaggatcttgggcctgtccccgtccttggtgccccccgagctgtccctccggggcgtcttatggccaccatgccgctccagcgcggcgcgctcactgctggtattgcccatgatgggggtctgcggggacacagggaaggcggacggcgcctcactgcaggaaagggaccctgagcaagggactcccggaaccgcgggtcccaaggagcctgcggaaggagtcggagcaccaggacaccacgcccctcgggccgggagccggttccggctgagtcggcagggttgccgagctctcgcaatcgcgctttacctgcccaggcaagccgcggcaagaacgcaaggggcgcgaagataaaccgacactttcccaaccgcttcaccacccctcagcgacttccgcttccggcgactccgtaagtcggcccggcctagggcgtggaggtggcggcggccagctaaacgcgcgaggctatctcgattccatttccgcttccggtcttgagcggtgcggtaacaggtgccccgggccgtctctgcaggcctcggagcgcgcagtcgcagtcagcagccggccgcccagggccaggcccaggacgaggcgctgccgagggccggcagggggcaccccagcgcgcgggcaatctgagccgttcatgcgctgggctgaataatgccatttagctatctttgctcacttatagttgattctacactctgcagccagagggatctttctaaaatgcaaatctgattcagaaactccacttcttaaagcccttttaatgcacgtgttctcacgctttacagtgcattaggttaacctggagcgcttgttaaatgcatcccccactgcagacctgcagaatcatgatttctacagattagggtcgggggtgcaggcagtcttgcaggtatttgaaaaaatggcagaccataagatctctggaaatttcttatgtctagtaggttgggggttgtaaaatgctggagttattcgtgtatttttattgagtgtgcaatcttttgataggtaattttgcaagatatcttgtaatcacttcggaaacatccttctgcataagatgcattagcgtttgtcatttactctggtcagtgcttcaacaagaagtgcatacaaatacggtagtaaaatattctcatcttctcattgtcagtcattgtcatattttgtgggttttttggtgtgtgaatatctcaaaatactttgcatttgccgggtcaggtcatgcatttcacccactgaacatttatttagtacctaaaaaagtaccagacattgtgctaaggaaatgaggaacacaagatgactaagataaggtttcctggggggaattcagcagtatgcatcaaaatttaaaaatgcaccttcattttgacacacaattttactcctaggaaacttgtgcagaaatacacacatgaaaattatttacaagcattatctacaaaatatttacatgcaaaaatatattctaagatgcacttgtcaccccccatgcccccatatattttaatttctgaaactggatgctttttacaataatggaatcttacacttggtgaaataaggaaatgaaaaactacaaaatcctaaaagttgttcagtaggagaatggcaaaatgaatggaatacattcattttgtagaataccaagcaacttttaaaaagggagaaaccatttttaggtcactatggggaagtgtctatgatattgcaaggtccggaagcaagtgagagaacaagttcaagggcaggagctctgaattcagcctggccatgttcagattctggctttaccatttagtaactgtcaccttagtctcttcttttgtgaaatgggaacaaaaataacacctacttcataggcttgttttgtgaattaattgggaacgtgcataaaaatgctgagcatagcacttgactcttagtaaacactcaataactgttaacacttttattagcactattaggctagcaaatggaaagttctggaagggtatacaacacattgttaatagtggtcttctgtggggagaggagggagattgcaaataggagcagacagaaaagggactttcacttttcatttatatagttctgtatttgaaaagttttctattgtgaggatgtactactttttaatttaaaaaaataagatatggttccagccccaaaggaattaatacagtacaggctggcaccgacccacagaaaagcaataatatagctaggtaagggatcctgtgggagcccagaagggacttaagccaggccaggaaaagggatgggagccaggaaaagggatgggagccaggagggtcttcctgaagctgatgactgagaatttgaatgtattcagtataatcagaaatgttgaa

SEQ ID NO: 916704 - DNA, 4001 bp, Homo sapiens
aaaacaaagttcaaatttagcatggtgtgtaataccttcaacctgatcttagcctgcttttccagtcttttctcccactgtgaccaaaatccaaagccagcaacatcatgccgctggctcacccccagttctctacataccccaatttcagtgcccttgctcacactgttctctcaatttgcagtgccctctcctaggtccaaagtaatttttctctcagctattctgtcacagtcctctgttttcatattgatgacagcatttattatagtctacctttaaataacagctgttgctggcttgccctcaccatcactccagttaggctgaacattttcaaagcaggagttttctttcttttctttttttttggagacaggatctcactgtgtcactcagactggagtgcagtggcatgatctcagctcactccagcctccacctctttggatcaagcgatcctcccacctgagcctcccgagtagctgggactacaggcacacaccaccaccaccacgcctgggtaatttttgtatttttgtttctgtcgagacaggctttcatcatgttgcccaggctgatgctgaactcctgagctcaagcaatccacttgccttggcctcccaaagtactggcattacaggcgtgagccaccacacctggctgagttttctttttcctctttttaacttctaccccagagcctaatccagtacataaagtgtaaaggctaaattagaaaatctatataaaaatgctttgtaaaccataatacatttacaagtaagtagaatatgacatgtcattttaaatttaatggaattagactccttatttttgtttaagattatcctgattagtcagaattggctcccttgcctgggagaccaactgcgaatcattttagtactttggtcggttttctttttgaaaacctgaaagaaacaacctctctgtgagcagagaaacggtgtggcaaagaattactctgggcatgtaatccaaagcaaagtgaacctgcagtcctttcgtaactacagtagcagatgataaaaaccaagatggaaagagttactctgcctgaaagaagacacatggttaaaaactgtggagagggaagtgtatgggaggggttacagagcgctagaaaaagactcctgagagtgagggtgggtgcaaacatgtagcaggcaacccgcagcatctgtgggagggtgacagggccctgccacaattggtcaatgcctgctcgccaagaatgagctatgccaaaacccctgcttagagtcgcagagcgggccatgacctaaaattgtccagggacacatcggcctctaacactgcaagatttcctctttcaagcaaacctcaattctcggtcttattaagggaatgtgacttcactggacgcagtataaagatcttcagatgtcctcctgccggggattgcagggatcacagaaagaccatcgaggtccaggagctacctgcaagcggagatccctctggacgccccgtgcctcacccagcaaagccggctcacaaccctgcgctctcaaacctctaaaagggcttgaggtgccaataggaaaggaggcccgagattgccacggcatacgtgggccccaaggagggagccaggagtcactgcctgcttgggctaagggtaccgcgtacggaaaggcggcggggacgcggcccagttccaggagatgcgcccaacgaagaagcggaggaacagggtcacgggatagggcagacacccggctgctttttgtttgctagacaccagcgccagcccctgcccggccctcccggtctcctaagggttgggggggtgtcttaggctccacagcgcccccgaccgccctcctgcactcctcaccgtctccattgcaagaggcgcccggcttggtttcctcgctttaggaaactctcttggggcaggccccgccccacatccggtgcggcgacgccacttccgcccacgtcatggcagtcgccagactggggcggaaggcaaggaacccacccttccggcggtggcgggcctcggtaaccgccctcccccgggtcctcgcggaccgcacggatccggctgacggcgagggtcatgggacggagccgcttgtatttaaaatgttctttttttatttgtcgtttaaaaacaaacttggaagaagcaaaatccaaaacttgccctttgcctctcgcaacataaatatgtacagttcagaatgatcgctgatacaaaacatgccaaggacaggggcgctgagggtggagggagagagggcgctttaaaaaagggaaccatttcatccgttgttacgaaggaccaaccttgctgtacaggatacacacaacacaaaataaagtcttcacgggattcacacttgtcagcgatttattttttaaaaagggggagggtcctggaggtgaggggagaagactgtaaaggggaaaactgaaaactgagtatgtgcgagtgtaaaccaacccaaaatacaaacacgggggcggggggtggggtgggggattctgatgcaattatacaggcagggtacttaaaaaaaaaaccaaccaaaattccaaccttgtagcttgggtctgagttatagtttatataaaaattaaaaactgtataaggtttcttcactaaattctacaggactatcggatacctagcatatgcttacaaagtctgccccatccccttttcccaatcccagggcccaagccccaaacacagcctgactcacgggagccaatctccccctccctgtagcctagaccttctgctctcggaaaaggaacatccaagggctgtggctttgagggcagcagcccagtcttcctactgtctgatttaattacagcggttcctgtgggagtgggggctgttattctcttaaacatttgcagcttgaaacagttgaggaagcagctttaaaaaaaaaaaatctccctacccccaacaatccacaaccccccaaattcaaaacaaaacaaaaacaaacctaaaatcacaacagcgaccaagctccccctccagcaggcccgcccgtccaccaccaccaagcccacccctacactccagacatctgattcttgaaaatattaattacaaaatgccctttgcccacagcccctagaagagaactgcatataagcttcatcttcatccccacggttccctaccagagaggggtttggggcctcacccaccccttacctactcccacccccaggaagaggttcaactgcagcacaagcttgggcagaaaggggaaggaaagggaggcaaggaacccatcaccctctggctccccctggggtcagctctcttttgtgcgttataacatagtccaactatacaacagggggtgggaattgcccagcctctatacccccatcttacagcagtcacagccagggggtggggagtggggtggggggtgaggaaaagggcggtaggtcgggtaatggagggggcccccccacaaggggagctccatgtgtccgccccacacccccctaccatttataaactggttttgtaaaaagaaaatagatatatttatatagaatatataaagcacaaaaattagtagttttacatttgctctccccggggggtggggggagaggggagggttctcacctccagccggctcccccatgccccacaagactatgtacaatcccatgtataaatagataaataccccccaccctccccgcgctgacactaagctcccccacccccacatcaccaccccttcccaccagaccagcagcagtttggtgactgagggaaagtgggagctccgggccacaccctgcctcactaggtatgggcatgccactcagggatagccctcaccctaccccccacccaacccgtccaggggctggagggcaaacaggctcatgatgaggttgggaaaacaggagggagatatcctggtcctaggtttagctccctcctgcccccatgt

SEQ ID NO: 916705 - DNA, 4001 bp, Homo sapiens
tttcgaagtagctcagtccatgtacagaaagctgctatgaacattcctaaaggacattcactgacttgctcataaatcttccatgggtcccctattacaaaacaaagttcaaatttagcatggtgtgtaataccttcaacctgatcttagcctgcttttccagtcttttctcccactgtgaccaaaatccaaagccagcaacatcatgccgctggctcacccccagttctctacataccccaatttcagtgcccttgctcacactgttctctcaatttgcagtgccctctcctaggtccaaagtaatttttctctcagctattctgtcacagtcctctgttttcatattgatgacagcatttattatagtctacctttaaataacagctgttgctggcttgccctcaccatcactccagttaggctgaacattttcaaagcaggagttttctttcttttctttttttttggagacaggatctcactgtgtcactcagactggagtgcagtggcatgatctcagctcactccagcctccacctctttggatcaagcgatcctcccacctgagcctcccgagtagctgggactacaggcacacaccaccaccaccacgcctgggtaatttttgtatttttgtttctgtcgagacaggctttcatcatgttgcccaggctgatgctgaactcctgagctcaagcaatccacttgccttggcctcccaaagtactggcattacaggcgtgagccaccacacctggctgagttttctttttcctctttttaacttctaccccagagcctaatccagtacataaagtgtaaaggctaaattagaaaatctatataaaaatgctttgtaaaccataatacatttacaagtaagtagaatatgacatgtcattttaaatttaatggaattagactccttatttttgtttaagattatcctgattagtcagaattggctcccttgcctgggagaccaactgcgaatcattttagtactttggtcggttttctttttgaaaacctgaaagaaacaacctctctgtgagcagagaaacggtgtggcaaagaattactctgggcatgtaatccaaagcaaagtgaacctgcagtcctttcgtaactacagtagcagatgataaaaaccaagatggaaagagttactctgcctgaaagaagacacatggttaaaaactgtggagagggaagtgtatgggaggggttacagagcgctagaaaaagactcctgagagtgagggtgggtgcaaacatgtagcaggcaacccgcagcatctgtgggagggtgacagggccctgccacaattggtcaatgcctgctcgccaagaatgagctatgccaaaacccctgcttagagtcgcagagcgggccatgacctaaaattgtccagggacacatcggcctctaacactgcaagatttcctctttcaagcaaacctcaattctcggtcttattaagggaatgtgacttcactggacgcagtataaagatcttcagatgtcctcctgccggggattgcagggatcacagaaagaccatcgaggtccaggagctacctgcaagcggagatccctctggacgccccgtgcctcacccagcaaagccggctcacaaccctgcgctctcaaacctctaaaagggcttgaggtgccaataggaaaggaggcccgagattgccacggcatacgtgggccccaaggagggagccaggagtcactgcctgcttgggctaagggtaccgcgtacggaaaggcggcggggacgcggcccagttccaggagatgcgcccaacgaagaagcggaggaacagggtcacgggatagggcagacacccggctgctttttgtttgctagacaccagcgccagcccctgcccggccctcccggtctcctaagggttgggggggtgtcttaggctccacagcgcccccgaccgccctcctgcactcctcaccgtctccattgcaagaggcgcccggcttggtttcctcgctttaggaaactctcttggggcaggccccgccccacatccggtgcggcgacgccacttccgcccacgtcatggcagtcgccagactggggcggaaggcaaggaacccacccttccggcggtggcgggcctcggtaaccgccctcccccgggtcctcgcggaccgcacggatccggctgacggcgagggtcatgggacggagccgcttgtatttaaaatgttctttttttatttgtcgtttaaaaacaaacttggaagaagcaaaatccaaaacttgccctttgcctctcgcaacataaatatgtacagttcagaatgatcgctgatacaaaacatgccaaggacaggggcgctgagggtggagggagagagggcgctttaaaaaagggaaccatttcatccgttgttacgaaggaccaaccttgctgtacaggatacacacaacacaaaataaagtcttcacgggattcacacttgtcagcgatttattttttaaaaagggggagggtcctggaggtgaggggagaagactgtaaaggggaaaactgaaaactgagtatgtgcgagtgtaaaccaacccaaaatacaaacacgggggcggggggtggggtgggggattctgatgcaattatacaggcagggtacttaaaaaaaaaaccaaccaaaattccaaccttgtagcttgggtctgagttatagtttatataaaaattaaaaactgtataaggtttcttcactaaattctacaggactatcggatacctagcatatgcttacaaagtctgccccatccccttttcccaatcccagggcccaagccccaaacacagcctgactcacgggagccaatctccccctccctgtagcctagaccttctgctctcggaaaaggaacatccaagggctgtggctttgagggcagcagcccagtcttcctactgtctgatttaattacagcggttcctgtgggagtgggggctgttattctcttaaacatttgcagcttgaaacagttgaggaagcagctttaaaaaaaaaaaatctccctacccccaacaatccacaaccccccaaattcaaaacaaaacaaaaacaaacctaaaatcacaacagcgaccaagctccccctccagcaggcccgcccgtccaccaccaccaagcccacccctacactccagacatctgattcttgaaaatattaattacaaaatgccctttgcccacagcccctagaagagaactgcatataagcttcatcttcatccccacggttccctaccagagaggggtttggggcctcacccaccccttacctactcccacccccaggaagaggttcaactgcagcacaagcttgggcagaaaggggaaggaaagggaggcaaggaacccatcaccctctggctccccctggggtcagctctcttttgtgcgttataacatagtccaactatacaacagggggtgggaattgcccagcctctatacccccatcttacagcagtcacagccagggggtggggagtggggtggggggtgaggaaaagggcggtaggtcgggtaatggagggggcccccccacaaggggagctccatgtgtccgccccacacccccctaccatttataaactggttttgtaaaaagaaaatagatatatttatatagaatatataaagcacaaaaattagtagttttacatttgctctccccggggggtggggggagaggggagggttctcacctccagccggctcccccatgccccacaagactatgtacaatcccatgtataaatagataaataccccccaccctccccgcgctgacactaagctcccccacccccacatcaccaccccttcccaccagaccagcagcagtttggtgactgagggaaagtgggagctccgggccacaccctgcctcactaggtatgggcatgccactcagggatagccctcaccctaccccccacccaac

SEQ ID NO: 916706 - DNA, 4001 bp, Homo sapiens
tcatggtttagaagcctcaacagaggaaagatgataattatccctcaaatgtatatatggatttaacacaagtcctatcaaaatcccagcaagatttttatagatatagacaagcttattttaaaatgtatatggaaaggcaaaggaactagaatagctaaaacaattttgaaatagaagaataaagtgggaggaattagtctactcaattttaagacttattatatcaaaatatacagctacacttaccaagactagatggtactggtggaaggatagacacatagctcactggaacagaatagagagcccagaaatagacttgcacaaatacgcataagtgattttttggaaaagctacaaaagtaattcaatggaggaatgagaaccttttcatcaaatggtactggagcaattggattcctacaagagaaaaaagctcccttcccctaagtcctacatggtatataaaaattaactcaaaatgtatcatggagttatatacaactataacacttttagaaaaggcacaggagaaaattttcatgatctagggttaggccaagagatcttagatttgacaccaaaagcatgtttcataaaaggaaaaattgataaactggacttcattaaaatttaagacttttgttctgtgagaaatcctgttaaaaggatgaaaaaaataacccacaaacaaggagaaaatatttgtaaaccacatatctgacgaagaactagtatttataatacataagaactcttaaaactcaacattaaaaaaattagaaaacgggcaaaagatatgaaccaacgtttcaccaaagaggacgtacagatggcaaataagaaggtgaaaagacattcaacatcactagcgattaggaaaatgcaaatttaagctgttaagctatcttacacacttaacagaatggctaaaataaaaggtagggccagcaaatgcaggtgaggacgcagagaaaccgggcctctcataaattgctggtgaaaatgtaaaatggtacggccactctggaaaacagtttggtggttcctcaaaaaaccacacatgcaacaaccatatgaccccacaattacactcctgggcatttattccagagaaatgaaaactcatgttcacccaaatacctgtacacgactgttcatagcacctttattcctaaaagtcaaaaactggagacagtccttatgctcttcagtgagtgaatggttaaacaaactatagtacatctgcaagatggaataccactcaacagttaaacaaaaggaactattgataacaggcaaaacttggatgaatctccagagaattatgctgagtgaaaccaaaaaagtcaatcccagaaggttacatactatatgattccatttatgtagctatcttgaaatgacaaaattacagaaatagagaatgaattagtggttgccaaagataaaagaaggagtctcctcttttagggaggtgggagggaagtgggcgtggctatgaagggcaacagagggatcctctgatggaatgttctgtatcttgattacttcaaggtcaatttccaggttacaatattgtgctatagtcttgcaaggtgagggaaaactgggtaaagggtaagcagaatctctctgaattatttcttacacctgcaaatgaaaccacagttatctcaaaattaaaagtttaattgaaacaaaagcaccagtgtacagtcaacaagactgtggagccgcaaagcccagagcagcatgttatgaacttagaaacagagacgtgagcaggctctgcagatgacaaagaggaaaaaagccaacagcccacacggggtcaagataaattgcactatttcacttgcaggaagaagaaaggaaagaaattaccatacaagctgacttacagaagaaacctctttcagcttgaatccatctgaagccagagactccattcaacctggcacacattcaaacagcaagcctccctggtgcagaaatcaggctctccaattcagactgagtaagttgatccatttactccaagtcagcagtttggacacatgtttgcaatctgaaggcttcctgtgaggtacacagacccttaaaaatatttcttacagaaacttcctggttttccatgccaggccaggctggagttgggctgaagttgtggctgtacataaacaagagttttaaaggtcgtttctccagccagcagcctggactgggttggaacttgagtgtcagggcgtgtgggaaactgctctcaatgggttttctcaggaaaagatcatttgcgtgtgcttcccttgtatcagagaagaaaatccccagaggacttttccactttgctcctgcatctgatgggggaagaggagatggcacaaagcccccaccacaccctccacccccaattcccttagtccaggtcctaggagaaacgccagcacgcatggtcctacattaagccaagcctccgcctctccgcctggcgccttaaagagctgctctaccctgcacaccctggcttctgcaccgggcccattttacatgagtcactcccaaaggagcagttcccttcctaatgtgctgcttaggcatttcaaggaattctttaaaccacacactaaaaacccataatgttctaatgtattcgtttgacccatatctcatgtaatattcccctgctgttctcaacgtcctcttttagagagcctggaagtctaaacactcaacttcccagcactctggaggtggccacgtaacatggttctacccagtaatatgtaagtgacagtttttagagaaggcacctcttccgaactaaaaaggcaaagtttcaagaagagaaaagtctttgtctccttcctacttacctcctcatcctgcctgtaatgtggttgtgatgctggagggtgcagcaactatgttgcaatcatgaggcaaggcttgctgctgagcaagcccctgtattgtgtctaacatagtatttaaaatactcggcaccatctctggctcatggcagagctcaacaaagagtagtctctacctccacacgcaagcaaaagtgcaagtgatttgttttggggaggaggtaagccggcccacagaccacttcgtctcttggaaaactaccacgaaaactctaggaatgcaaatgaagtttacccaggaaagttgataaacacgcttccatcctttccaattctgcagagccatttccgtagggtcacgcaccgaagattctggcgcaaaataaataaacaaactgttttgctttcctcacaagtgacttgtttttggtttccctccaccaagctaagcccacctctcacctgtagcccctgatggcctccatgggaatcacctgcaggctgggatctgtgacctggacttagggcttttcctgagggcacgctggagcttgctcaggcattgggaggggagctgacatctttcagctgcaggtatgtccactcctgtactcctcactgcaaatatgtgagcaggggtgagcattcctatttgccaaaactacatctcagagaaataaggaaaatatttaaggtcatctggttggtaagtgaggggctgagtccccagcccaggttgttctggtgccagtccccttcccagtatgtctccttgcctccaaaagtattgctttctgtttaactttcagtttcagactaaaagagtcaggcatctcccccaacatcaggatcccatagaaaagtcattgtgacgatggaaagtggaggtgttgtcatcacggctacccaaaacctctggccctcaggaaaaagcaggccctcactgtgtagttgaagggcacaaagattcctggcccctgactcagagacccccaatctcaggagaccccgagagagagaggccactgcaagaaaaggcacgcagacttctgggccactgctctttccagcacagcaggctcctgttggttttctagatcccaatctataagcaagccagatcgg

SEQ ID NO: 916707 - DNA, 4001 bp, Homo sapiens
gcgggcacgcaggctttgccctaactcaaggagacagcattcgctactgaatgccccgctgcgttcaagtcccggagcgtgtttgttttgaaattgacaattgtcagatgcatgctgcttctagtctctcagagaagggggatttataaagctttgctgcctacgccgtggggtaggggttttagcgcagagttaagaactcgagggaagaagaccaggaagggtctctctacctttttgcattccggcaagacagagggacaatccccgcgccacacccccatccccgccccccgctgcatatgggtaaccatatgtgaaatgtgcggcagccccaccagacacccagctattaatagagcctgggagtttgctctctgtgtctttttcctgccactgagtaagggatgatcttcacacacatgccccactccgcccccatctcggcgcaccgtttctccaggaaggtaagggggctgcccacgctgatccccttcgtgactacaggtgcccagagcctacggaatagtccggttgttgtaatgacagcggggtcagagggaggcgagggatcacagcctcgagtctcgggacgcaaagcccagcagggctctctgcggctcagggccagctggagagtagagaaaaaggctgccgaaggcgggggccgagaacacaatttgcggagctagagcgacctcctcaaaagcccttgcgggacgggtggctgcagacccatttctcactgcagccggcggcgcgcagcccccacagtccgcgcaggctcggctgctgcaggggcggacgctgtccctggtgctgaaggtggccgcggcccgtgtgccctgccgggtttagctacccagaggcggctctgatatctgaggattgcagacttctctctggcccagatctgggccggagggtctgtaggaggtgcccgagtcctcctgccggctcggcccccgcggccgggggctctccgcgcggctgcggggacggagagctcgggaaccgactcgagcttgaagggtaaagctgaggcagcggcaggagacggtcaaggcactgcagggggcagacctggccccaggattacccaccccagctctgcacaaagccgggacccgggagccctcacggagcccagaggagagggcaggggagcgcggctgcccggggtttgggacttgggggcgggagaagggagcagcgggtggcaggagagggtgatggggtgagagtgactgttttgcattttcaagagggaggggacctgagacatgaacttcccccccaccccccaccaacacacacacacacacacacacacacacacacacacacacacacacacacacacacaggaggaggccggcagaagcgagcgggatgaaactggggaaagtttggcactcggcgctgagcggcggcggcggcgcggtggtccgggtgggcggcggggtctccgagagcccctgctcgctcgcctccttacctcggtgctctcggccgcgttctccgccattttcctcctcaggagcaggcagcgggaggagtgtttcatgcccataagagccggcaagggtttggtgataccgagatagtagaggaggagagagagctggtgtcgctttaaaagagagagcgagaggatgggagaaaaaaaaaaatccaacccagcccctcagctggagcgtcggccggcacagtcagccacagcggagtctgttctgcagtctccactttcttttattttcctcccttctcatctgctccggattccttcacacggtttcaagttcttctcgtgcccccgaccccctccccgcccctctccacccgcgctgcgggctaagctcgagggaagcagccccgaagcctccgcggcggcggcggcggcggtcgcggatcctctccaggctgctcgcaaagtccggccggccggaggcagccgccaactcctctcaacttctgccgatccgctgggcgaagcaacacgcttcctgcgcgtctctcctaggggctgagccgggtgagtgggggcggggtaggaggttcgctggagccggcggcggctgggcgcagaccgagggcccccagcgcccccgggcccgccccctcccctagtctccgagggtctcggccgcctccactccctggcgctgcacacaacttacgtggaggccaggcccgcgcggggggcccagagaaagccggcgccgggcgaggctcttgcaggttctcagacccggtgcgcgtgctcccacctagggcgaggtccgggcgagaccgggccacagttaactcgcaccctccccaccccggcccaccccagctctcccgctcctctgccagttcctggatccttcctcggcgaattacgatttggggaacgaaggggtgggtgtctggatgggggagggtccttaactccttcaactctaggggtaagtgtggtgtcattctttatccttttctctctctctctctctctctctctctctctctctctctctctctttgtacccaaagcccttgggactccaagcccctttcaggctgagagggaggggcaaaggtggcggccagagtggcttgggaaagagggtgggagaaagtcaaatgcgagactgcagtgcccccccccccactccagtcttccctggcagccccctgcccacgcatttctcttctccctcctcacccttcccccaccatcgccagattttgaagtcccttttatgggagagagggaggatgtcacgtacccgtcaggattctcttgatccttttttaagggagtttgggcggcagcagggggtgtgaatttttatacaatgcattcctgtcttcactttgagagcttctttttctctgttttactggccatctgtcgggcagtgggagatagaacaaaagcgggggaccccattctgcctctccctttgcaacaggacactcaggctgactccttaaaacagctgtacttttaagctttcaacctacgagtcaaggactgagacctataagatgctccctgagcacccggctgtcttcacttcatctctgtacttgtttggggaggtccctcccaaatgccctatttgctttttatcatcaccttcgataactgggaagtgtgagcctgactgtcctcaactaaccccagagtccattgaagaaaaggtctagaatcattctcagtaggaaacatgcctccatcatctggtcctcgggcaaagagaggatacattgcactaagtagaggtgagaagtgagggatagagacaggagaggatgaagaatgagaaggatgaaaatgtagcaagaggcttgagtgtgtgtgtgtgtgtgtgcgcgcgtgtgtgtgtgtgtgtgtgtgtgtgtgaaaacttgaataaaaagatgaccttaacctccttaaccttttcccttctcagaacacagacctgggttagagttgggggtgagtgagcagaatccttgacaacacccagtcgttcctcccgttctgtcaacatgcagaaagtggtaggaaaataaatgtgaatctggagaatgacttttatcctattgaattcccttttctctaggcatcttctcagagacaaaagattctgagagacatctaattccctaccaaaagtgtctcagtgtttgtgcaatcaaaggaaatcagaaaagaaatgatcctcaccgctctgtggtccaatcctctcattttacaaataaggaccccaagattggagagaggaggacatttgcccatggtccatcagcaagcagaggacccagctccccagcctcctgactttcagtccgacactctgcccccacccaacactgcttctgcttgtgcatgccttctgtgactaaccagggaggaggggagctgaaacaagctcccaccgaaataggctgctgcctgtgcgtgattatgttgctatgagaacctcagtgggtgtgtttcctcctttcgctgttgaaatcttttgctt

SEQ ID NO: 916708 - DNA, 4001 bp, Homo sapiens
gcaaccatctcagaggttattattcccattttacagataaagaaactgaggttcagagattaagtaacctgaccaaggttccaagacattaaatgggagaggcaggtttggaatccaagcagtctgactccaaagcctgtgctttcaaccagttcacaaagctgcctcccagcaaggatgatggcgccacagatgatactgcttacattcagatacatttccttttttcttttttaaccccaatccttacacaatccagaaatcctcagcgagccaggtgttcccaaggtctgcttggtctgactcattcccacttcctgaagatgaaggctgggaggcacatctctcagaaagtggtagccatcatcaaaaaaaaggctgagagaccagctggttaccctgtgatctacctgcggcccttcttcagctgccccaaacagcacctgcccttccgtttcaaagaccatcctagtttccaactttcctggaccagccctactcttcctcttgctccccaaagatctgccttactagaaagtatcttcctgttgctttttttttttttttttgagacagagcttcgctcttgttgcccagactggagtgcaatggcgcgatctcagctcaccacaacctctgcctcccgggttcaagtgattcttctgcctcagcctccagagtagctgggattacaggcatgggccaccacgcctaattttgtatttttagtaaagacagggtttctccatgttggtcaggctggtctccaactcctgacctcaggtgattcgcccgcctcggcctcccaaagtgctgggattacaggcatgagccaccgcgcccggcccctgttgcttctttctgatcctgccatctcatcactctccctctgaagaagcgaatgttacttttggtctccatcattgtggagttaggtttcaacctcctcctctccttagagttcttccatccctccaacaggataaggctagccagccccagcccggcaggctttctgtctaccatccccccgcacccgtggggatttctccagccccagcccaaggcctcgcctccatcttcatcctttcctttgcttccctaccaaacccattctcctaaacttcctcctcaaaaacctattcatttagaccctggaagagatctgggatttaattttcatgcatttcctttttaaaaaaattgatgggaaatctgaggcccaaagaaaggtagtgacttgcccaaggtcacacagagtcgttagtttgttgatggcctgggctgggagcccctttcttcagaggccccctctccacctcaggagacaagctcttgcaaatgcaggaaggtgaagcagggagtccccaagtggtctgaggagcacccaggcttccaaagggaacgggcgctggggctgggggaagggcatgtcgcacaccaaatatcccaggaggggaaactggtccccacctgtcccctggtcccctcagtcccctcatctccgccctctctcttctttcccgatctttctccgcgaacccacccccacctctcccaatcccactcttcacccagtcccgccactctcgcacctttcgcccccggccaggctccatcatggcctcccccgccccttcgcccccagtccccgcccccatcccccctcccgggctctcttccctcacccttggcctccctcgccctccccggggtcccagctatccccagcggcctccccgccccatcggccacggcccgggccgcagggggcgctgtgggaccgccccgagcccctccacccccgcgcggggatgttaccatgccagagcctccgagcagctgggccggctcagcccacccgccagtaagagccgctctgattggccaggccgcagccgggagggcggggccggcggggggtcgcaccccttcgtggccggggctccggtggctcccgccggcgagcggggccccaaccggcccggtgtgttcggtcccggccccgcccccccggcacggagaaccaggccccgcccccgcgccgccgcgtcccgggtccgccccccggggggcggggcacgcctgctcccgcctctgactgacggtcgggggccggcgcctctgcctctccccgctgcctgcgtcctggcttcgcagtcgccggcgctccaggagccgaagcgttcacgcagtgtgtagggtgcctttgcgctgcacagcgaatttaatttgctgtgtagctcttttacagtacttttaagttagttaactccagaactatttgttgagcacctgtgaggtggcagggtctgtctcagggactgagcacacagcagcttggaaaaaaaaaaaaaaaaagacaaatccccgaaatcacgcccttgtggggcgtacacgtgcttctcgcgtgaccctgaagttcacttttgggacctggctcccactgagcgctgaactcatgagagcagggcccactctttgacagaagttaaaaatgtgaggtacatgcttgctgtgcggctgaggaaactgtaacctggagctctgcggggaatgcgctgaaggccttggggctggagagtgacaggccccaggcacacgggtgcagaaaggcgctgaccgccagcctgcaaagccccgcaaaaggcgcttcctgttccctttattcccccctcacctgagccgggactcgcgtgatgccgtgctaggttcctgagagccaaagaactccggagaggtagaaaaactcctgacacgaagagttagaggtgacacctgggaggaaaaggaagtgggattcacccttgtgggctgctgtagagagaaaatgctttgtggtttaatcaaaatgatacccacatggtctcaaatgaaggcccagctctgcggttttcttttcttatttgaggcagcgtattgatctgtcacccaggctggagtgcagtggcacaatcagggttcactgcagcctcagcctcctggtctcaaccggtccttctccctcagcctccgagtagctgggactacaggcgtgtgccacaacgcccggctaattttgtaactttttggagacgacgtctccctgtactgcccacgctgggtcctgtggttttcaaacttttgggggaggtggggtgaggagactggcgcgcggcccgcagccgccgccgcggcaggagaggggaatggagggggcgggcggggggaggaggacggaccaccggcggcctctccaccgctcccaccttcccccgggggctgccgcgatgccagcgcagctggggcgattttcaaactattattgagatctctaagtatagcagaagtggtccagaggttccgtgaactttcatgaattgcatttttattttttaaatgcttttcttttctttaatgaaatatttcttagaacatgtacacacatatagaatcgaataattgtaccagatttgttaagacaaacagcagagccctgcccccatcgtcttcccctctctggaggcaacgttttcacctcttttagctgtttcttctggcatttaccttcacatctccggccttcccccagctgcagccctccccacagggcaaggggtccaaggggatttgcccatgcaaagcacacttgcccaggattagaccatattctgaatacctaggaccctggaattccctgcccagcttcctccttgggtctgtcctccccagggagaccttctgttttttcctgcacaaacttttatttttcctggaattaataatcttgttttttaaaatcatttattttctatgtatttctcacaaactctacctcaaattcttcccccagttgcttaaatttcctctcagaatatctagatatagcagagaattctctccatttcatcttcttgaagacatcactgctggagactgctgaccttctccaatctgactgttcatcccctcaccttgctgcacatctggcaacctggcatctcttttctcattctcctggg

SEQ ID NO: 916709 - DNA, 4001 bp, Homo sapiens
accaaagatgcaatcaatacttctgggacttcacatctaaggggcatctcagaacttagcactcagaagaataaaaggagaaaaggacaagaatggagaggcagtaggaaaaaaaacagaaagagggaatgataacagctaatagctaatatttactgagcacttattatgagccagatactgtgtcaaacactcatttaatcctggcaaccatctcagaggttattattcccattttacagataaagaaactgaggttcagagattaagtaacctgaccaaggttccaagacattaaatgggagaggcaggtttggaatccaagcagtctgactccaaagcctgtgctttcaaccagttcacaaagctgcctcccagcaaggatgatggcgccacagatgatactgcttacattcagatacatttccttttttcttttttaaccccaatccttacacaatccagaaatcctcagcgagccaggtgttcccaaggtctgcttggtctgactcattcccacttcctgaagatgaaggctgggaggcacatctctcagaaagtggtagccatcatcaaaaaaaaggctgagagaccagctggttaccctgtgatctacctgcggcccttcttcagctgccccaaacagcacctgcccttccgtttcaaagaccatcctagtttccaactttcctggaccagccctactcttcctcttgctccccaaagatctgccttactagaaagtatcttcctgttgctttttttttttttttttgagacagagcttcgctcttgttgcccagactggagtgcaatggcgcgatctcagctcaccacaacctctgcctcccgggttcaagtgattcttctgcctcagcctccagagtagctgggattacaggcatgggccaccacgcctaattttgtatttttagtaaagacagggtttctccatgttggtcaggctggtctccaactcctgacctcaggtgattcgcccgcctcggcctcccaaagtgctgggattacaggcatgagccaccgcgcccggcccctgttgcttctttctgatcctgccatctcatcactctccctctgaagaagcgaatgttacttttggtctccatcattgtggagttaggtttcaacctcctcctctccttagagttcttccatccctccaacaggataaggctagccagccccagcccggcaggctttctgtctaccatccccccgcacccgtggggatttctccagccccagcccaaggcctcgcctccatcttcatcctttcctttgcttccctaccaaacccattctcctaaacttcctcctcaaaaacctattcatttagaccctggaagagatctgggatttaattttcatgcatttcctttttaaaaaaattgatgggaaatctgaggcccaaagaaaggtagtgacttgcccaaggtcacacagagtcgttagtttgttgatggcctgggctgggagcccctttcttcagaggccccctctccacctcaggagacaagctcttgcaaatgcaggaaggtgaagcagggagtccccaagtggtctgaggagcacccaggcttccaaagggaacgggcgctggggctgggggaagggcatgtcgcacaccaaatatcccaggaggggaaactggtccccacctgtcccctggtcccctcagtcccctcatctccgccctctctcttctttcccgatctttctccgcgaacccacccccacctctcccaatcccactcttcacccagtcccgccactctcgcacctttcgcccccggccaggctccatcatggcctcccccgccccttcgcccccagtccccgcccccatcccccctcccgggctctcttccctcacccttggcctccctcgccctccccggggtcccagctatccccagcggcctccccgccccatcggccacggcccgggccgcagggggcgctgtgggaccgccccgagcccctccacccccgcgcggggatgttaccatgccagagcctccgagcagctgggccggctcagcccacccgccagtaagagccgctctgattggccaggccgcagccgggagggcggggccggcggggggtcgcaccccttcgtggccggggctccggtggctcccgccggcgagcggggccccaaccggcccggtgtgttcggtcccggccccgcccccccggcacggagaaccaggccccgcccccgcgccgccgcgtcccgggtccgccccccggggggcggggcacgcctgctcccgcctctgactgacggtcgggggccggcgcctctgcctctccccgctgcctgcgtcctggcttcgcagtcgccggcgctccaggagccgaagcgttcacgcagtgtgtagggtgcctttgcgctgcacagcgaatttaatttgctgtgtagctcttttacagtacttttaagttagttaactccagaactatttgttgagcacctgtgaggtggcagggtctgtctcagggactgagcacacagcagcttggaaaaaaaaaaaaaaaaagacaaatccccgaaatcacgcccttgtggggcgtacacgtgcttctcgcgtgaccctgaagttcacttttgggacctggctcccactgagcgctgaactcatgagagcagggcccactctttgacagaagttaaaaatgtgaggtacatgcttgctgtgcggctgaggaaactgtaacctggagctctgcggggaatgcgctgaaggccttggggctggagagtgacaggccccaggcacacgggtgcagaaaggcgctgaccgccagcctgcaaagccccgcaaaaggcgcttcctgttccctttattcccccctcacctgagccgggactcgcgtgatgccgtgctaggttcctgagagccaaagaactccggagaggtagaaaaactcctgacacgaagagttagaggtgacacctgggaggaaaaggaagtgggattcacccttgtgggctgctgtagagagaaaatgctttgtggtttaatcaaaatgatacccacatggtctcaaatgaaggcccagctctgcggttttcttttcttatttgaggcagcgtattgatctgtcacccaggctggagtgcagtggcacaatcagggttcactgcagcctcagcctcctggtctcaaccggtccttctccctcagcctccgagtagctgggactacaggcgtgtgccacaacgcccggctaattttgtaactttttggagacgacgtctccctgtactgcccacgctgggtcctgtggttttcaaacttttgggggaggtggggtgaggagactggcgcgcggcccgcagccgccgccgcggcaggagaggggaatggagggggcgggcggggggaggaggacggaccaccggcggcctctccaccgctcccaccttcccccgggggctgccgcgatgccagcgcagctggggcgattttcaaactattattgagatctctaagtatagcagaagtggtccagaggttccgtgaactttcatgaattgcatttttattttttaaatgcttttcttttctttaatgaaatatttcttagaacatgtacacacatatagaatcgaataattgtaccagatttgttaagacaaacagcagagccctgcccccatcgtcttcccctctctggaggcaacgttttcacctcttttagctgtttcttctggcatttaccttcacatctccggccttcccccagctgcagccctccccacagggcaaggggtccaaggggatttgcccatgcaaagcacacttgcccaggattagaccatattctgaatacctaggaccctggaattccctgcccagcttcctccttgggtctgtcctccccagggagaccttctgttttttcctgcacaaacttttatttttcctggaattaataatcttgttttttaaaatcatttattttctatg

SEQ ID NO: 916710 - DNA, 4001 bp, Homo sapiens
ggctttagtcggctgggacgcgcgacaccaccccagcgtcccgcctcgcaggccctcccggctcttgcaccttggacttgtaccactcctccgcctcctgcaggttcttcgcggcgatgctctcgtactgcgcgcggatgtccctcagcgctgccgtcagctcgggcttcaccgtggcttccacctccacctgctgcacctgctggctctccacactcacctgcaggtctcgcagctcctacggccgggagcaggcagaggatggacagcggcgcaaattccacgcgggccacgcagttcgtgcacagaaaagagaagaaacgcttgaacgaacagaagtgggcgccagggagggcagggcgtacagccctgcgcccccgcgggcgcgagaccagaggccaggtttcggaggtacagccccgctgcccgccgccaggtggcgcaagggtgggagtctaaccacctgtagactagggtggaggggctgcgtctacccagcatcgtcctgatccccagggcgatgcctccgctccacccgccagctccagcgagaccaccccacaacctcagaaaccgcccctgataccgggcccacttacctcctcgtgcagcttcttgaggaactcaatctcatccatcagagactcaatcttgcgctctagttccaggcgggacagagtggcatcgtccacgtccttcgaggggtggcagtggaggttcaagataagttaggggctgcgcagaccaaggaaggaccaggccttccctgtctgcctcaggaggcatctgggttacccccttctccccgcgcccaccgatgccacctctggatactgagatcgggggtagcggtggggaggctgaactcggagaggggctcggactcaccttgcggaagagcacgaggttgtgctccgcgtcctcccgcttgcgcgtctcctcctccaacctgacgggaagagcgtgcagaggctgaactgcggggtcgccgcccagctcgcaccccagaccgcacgccccccaggatccggttagaggctgttctgctgcccaggactctaaatggagggctgaggctgtctaatggaattgccccgcattgtctctaacggactgggagctgaaaagggggtttcctcattactcaggggaggcacagatacccacttctcccacctccccaaacactcagagcaaaggggtagcggggggcacttggagcccgtgggcagggatgctgcccgcacacacctgggttggtaaggggagccacacccttgggctgctgatggagaggggaagcgaggggaggcaagagcagccgcctcgacggccgcttcgacctcgcctcgacggcagcggcccagccctgccccctgacctctgcttgagcgccgccaggtcctccgccagcccgtcgcgctccacctgcacccggtcacgctcgcggcccaacagctccagctctcgccgcagctcgcgcagctcctgctggcacagctggtcggcgcgcgccggctcctggccccgggcttggctcagctccccgcgcagggccgcgttctgctgctccagaaagcgtaccttctcgatgaagttggcgaagcggtcgttgagctcctgcagctcctgcttctcgttgctgcgcgtggccaggaactcctggttgagggcctcggccatggagaagtcgaggcgctccgagggcaggcgcaggagggcgcccgctcccgctcgggggctacggaagctgcccaggcgcaccgaggagctcggggacgcggagcccagcaggcggctgctggagaagcgggagctggacgagtaggagaaggccccgggggatagtgagggcggtggaccgaaggtacggcggtatgaggtggagctgaagccggcccggaggcccgacgggtggtggctcattgcggccaaggatgggcagtcaccgttcgcagagctaggccgggggctgggaaggagccgcagaccgctgcgaggcggctttatagccctgcggtctcagggggggcacgggcagctcctcccactggcctgatggcccgctggaggggggttgtatggggagggggatgccccacccctgcggaacagcaggagcgccttcccctcccttccctggttgcaggcctctacccacttgattgccccctgttgccgctggggtgggggtcacttcctcccaacaagcacccaaagctagaacctagggtaggaaggcctgacttgaactagagtccctgaaaattgcgaggtagaaggacctgaagttaaagggcaggcttctggcacaggagtagggaggaggccagctggagggagagttgacctggcttaggccccatagctagtgccttgacttgccccctgaaggccaggctctattttcacctgctgtcagctacccctccttcaccacacccagagaggaataggagacaggggcgcagaggcagatcgggctggggaagagctactctccctaatccccagggccctgtgaagggctggtgcctggcgccagctctgctgctaatgggctgaccagcccccctccccctcccctgaagacggcccagcagaggttgtctgctgatgtttcagccttaaagacacagcccccaaacctagacctaccccgcaacaagccccaatgaggtgggtacatcatagggggctgagggtggctggacccagctctggatcccactcgggagggtctgccccatgccacgggctgggctaagtgggccttttgtattctgtcttggtttactggattctccctccccccaaccccacaccaattgctgctcagtcatgggctttacaggaaccagagtgattcctgaggtaggaaggggagggggctgaggggcaacagcggctgccaaggctgagagatggatggactggcaggagctggtttccagtattgatgagttgcaggtaccagggatgggtggggctggatggggaagagatggggaaagagaaagtgcccatccccagcagtctgaaagagagaaggccccagaacaggtccacaaacctgcgcacgcaaacagatgcatacacacagctttgtatatctatgcgcacacacactacatacacacacatacacacacaatcacacatcccaccacaccctcccctactccagagttagcgagaaggctgatatctggcctttgtatgtcaaacagcttccagaatgcaagcacaacctgcccaggagtggacagaggcagctcggatggtctgcaggagccgggttgctgaggtctgctgggtttgccaggaaccatagggctggggctgctgctgctgctggggactccagcgctgtcctgtgagacaggtctgcctcagatgggacctgaggacaagagagtgcatctggggaagcaggtttcaggttcctgcctggatatctggctgggggtaaggagggcggctccctggctggccagctcctcagtattgcagggcagcagccccctcccccctttgtgcgtcctgtgagatgggccagggccaacgccctgctcacgtccctaccgccttcgtctcctttccaggcccctccttccttccgggccattagtctctccctgcacagctgccagttccttctccttgatgggtctggtttggttgccaggggagtgggaagcgggaggaagggagagatgggacaggacgaataaatgacagcttggcctcccctaactcctgggaattgggaggggtagggtcccacccgggatagggccgggaggcttggtgggtgtgaggaggggctagggaagccttggtgcttcctgccgcagtcctgggcactgagccccagctgctgttggcctggagccccatctatcccggatttggccccaccctccaggagcagggagccagctctgcatcaggagaggcgggcaaggcctggggaggaccagctcaggccctgtctacag

SEQ ID NO: 916711 - DNA, 4001 bp, Homo sapiens
ggattcacaggagggattccaggggcaggcggtgggtatggaggagggtagggacccaacggttggcatcctggataccctggctgtggcacaggatgagggggcccacctggggggaaagctggattgccatggggagctcctgggggaggaggacaggggcctgggggaaagggtggattaataggtggtgggtgggcaggattggaacctccagggcacccaatattggggggatatggatttggccctggctgccctggtggaagaagcagagaataaacattagaattccccagagtctccaacaacaaacaacaaaaagaaagagattctttctcactcaatacttaaagggaaacggaaagatgacaaagaagaatggagggtaggggagacaaacttgagttggggagaaaagggggaatgtccctggaagggctagggagaggagggagacagtgaactctgaggaagacaaaagcactggtcagtccaggcgcggtggctcacgcctgtaatcccagcactttgggaggccgaggtggacagatctcatgaggccatgagtttgagaccagcctggccaaattgtgaaacccccatctctactaaaaatacaaaaagtagccgggcgtgatagcatgcgtctgtaatctcagctactccagaggctgaaacaggagaatcgcttgaacccaggaggcggaggttgcagtgagcctgggcaacagagactccatctcaaaaaataaataaattaaattaaattaaaaagcactggtcagctctagactaaggactttgcttttgcgggtacagcaggtcgggggtaggggagctgatacagaaacttcctgttatagagcccatcagaaaaagggttaggggtggaacagaacccccaaacacctaccggcattgggattccacatgtttaggtgtgtcctccagcctgaggagaaagaaatgaggcaaaaaagatgacggtctagaggtaggaagtggacttagcaccggagcccagccctaacgtcttccaccccacagtaggctctcctacctggagaactaccacaacttccacataagaaatgtctcttttctggctgggcgcggtggctcacgcctgtaatcccagcactttgggaggccgaggcgggtggatcacgaggtcaagagttcgagaccagcctggccaacatcgtgaaaccccgtctctactaaaaatctaaaaattagccgggcgcggtggcgggcacctgtaatcccagttattcgggaggctgagtcaggaaaattgcttgaacccgggaggcagaggttgcagtgagccgagaccgcgccactgcactctagcctgggcgacggagcaagacaccgtctcaaaaagaaaagaaaagaaaagaaatgtctctttccacttgtttcttcgccctcaatacctacttggttcctaacacaggaatctagttcccagggcccctccacccaggtggaagcgtctaactcttcggaagtaggcagtacccgcgagtctcggccccaccatcactcatctccctttccctggaactgagtacggaggcctttaaccacgcacagagtaagaaaggatctcaaacaactttctctctccctggggaggaccccacctcaggctaaaaaaaggatacgcctcgaggcgaagtaagaaggaagttgcccaagaacctcaaatacttaaatatgtggacacagcccccttcctccaaaaaagaaaaaaggcaaatgaagatcctagccccaagctgcgaagagactcttgacctagcaaggggaaaaggaaaaacctatggaatccagataccccatcacctttccaccgccgcctgggcttgctgcgttctccttcgcagtctcggctcttcctagtcacccagaccccgtgcttcggcacccgcctctgctactgcctaattggtaattatgtggccgctcgactgatgattagacaacaaactaatcaatcactctggtccgactgaggaggaaacggttgctctaggggcggagcggagccctttacggctaggccagtaccgagaagccggaaatctcctgggggcggggctaggcggagagcgctggagggggcggggccagctgctgggcaaagtcctagagacaccgagaagaaactcttcccttgctctcttacctcatggttcactgggtgcaataccttgtaaaatgaatacactatggtaagtgttgtaatacagatatagacagagttctcggcaagggcagaagagctgctgagtcccagccccaagcctcaatgttcccggctccgtcttacactcgcaagggaagcaaacaaacattcttgcggaagatacagagatttcataatctctcccaggattccctctctcaattgcatagctccgccatctgtcaagtagcctaaaccagaaaccaaggagggcgtccgtgatccctctgcctccttcacctcccttaccccaaattatcagttttgtctctcaaatatatctggaatctctccacttctctctgtcttccctgctccaaacctcccatcatctgtcgcctggattcatctctcccctgaattgctacaatggcctccctacaatggcctccctttttttttttttttttttttttgagacggagtctcgctctgtcacgaggctggagtgcagtggtgcgacctcggctcactgcaacctccgcttcccgggttcaagcgataatcctgcctcagcctccgaagtagctgggactacagacgcggctaatttttctattttttagtagagatgggatttcaccatgttggccaggatggtctcgctctcttgacttcgtgatctgcccgcctcggcctcccaaagtgctgggattataggcgtgagccaccgtacccagcctttaaaaaaaaaaaaaaaatacaagtggccgggcgcagtggctcacgcctgtaatcccagcactttgggaggccgaggcaggcggatcacaaggtcaggagttcgagaccagcctggccaatatggtaaaaccccgtttctactaaaaatacaaaaattagccgggcgtggtgacatgtgcctgtaatcccagccacttgagaggctgaggcaggagaatcgcttgaacccgggaggttgcagtgaaccgagatcacgccatagcactccagcctgggcaacagagcgagactccatctcaaaaaaaaaaagaaagaaagaaagaaagaaagtgagctaggcatggtggcacatacctgtaatcccagctagtgggaaggctgaggcatgagaatcgcttgaacctgggagggagagggtgcagtgagccaagatcatgccactgcactccagactaagcaacagagcaggactctgtttcaaaaaaaaaaaaaaaaaaaagtgggatacaaaaaaatttaagacaataaattttatgccaaatatgtcatattaaactaaagcatttgaaatattttaaactttttttcttttaatttttatttttagtgctggggtacatgtgcatgatgtgcaggtttgttacatagttaaatgtgtgccatgctggtttgctgcacaaattttgctgcaccaataaacccatcagctaggtattaagcccagcatgcattagctatttttcctaatattctcactcccctgaccctaccccccaacaggccccagtgtgtgttgttcccctccttgtgtccatgtgttcttactgtgtagctcccacttgagtgagaacatgttcctgcatgagtttgctgaggttaatggcttccagcttcatccatgtccctataaaggacatgatctcattcctttttatggctacatagtattccatggtatatatgtaccacagtttttcagtctattgttgatgggcatttggattaattccatgtctttgctattgtgaatagtgctacagtgaacatacacatgcat

SEQ ID NO: 916712 - DNA, 4001 bp, Homo sapiens
gcttgactgtcaacttcttttgtgcccactgttttttttttctttttatgcagctctcaacttaatccatgtaagagtgatatggaaagtctcatttatttgctcctgtgacaagtatgtttccttaaatgaaaagaggggttcttgcatatcttagagttgccagaggatgtctccaaggacagaaaaaaaaaaaaaagcaaaagcattatagctttcagttatgttactggttattttttatttttattttttggttgctgtaatgacttacaaactgtgactccatctctgggcacctaagccctatgtggaaactagagctgatttcccaggctcctggaaccaagtagagaaatactaagagacagaagagaaagacaatgtgaaagcctgcacatgatcactaaacagctgtggcaactatttatcatctgtagtgacacagctgagtgggtcaacacagagaaaagacattcatgcagtgatttttttgttttgttttgtgttactccctgaagccacataaccgtgcgggggaacactgggggaagaaagaagcagttaaggatggaggagtcagaatgagaacacttctcatttgttcatcatctctcagcagtcattccagcctgggaaaaaagcctgcccactcctattgtcctcaaagccaggcatctctgtattcaagttggtggcctggctcatggtccccagaatcaaagatgggtaagaattgcctatatatttaggggcactaatattaatcaatgcctgacccctcttaccacctcctcccaaaaaaatgatgagaagaagacactgaaggaaactaaaaagaaattctagtggaaaaagaaagaaaagaattggattgaggatcattgggatttacctggtatggtgaaagtaaagtcttcatagttcacatctaggaaaagaagcacaggatgaagtgaacattacctcataaatctttcagggctcatagtggtctatagggaaaggggtcttctggccacaccctgtgcatcccctaagttacctcatcaaccatgttctgtgaagctgctggaaggggaggaagatgttaggggaggcaggattgttactatcgctgagcatcaaccacgaattcaatagaagagtccctttttgtcatccttaggatccctcaaaccctaatgctaatttaggcacacttctctgggtattttcatgtcatattttagatctttaccttcttccttctttaaatattttgatcatattcacaagcttgcccaagaggagcaaccaggagtaaatatttggatataatcttacacatgctgcctgcaacatattgaaattttaaatgtgattggaagaaaaatgggaatttggggacctgatatttctataccactatgtagaaagacacaaatgtattatccagtcctctatgtctgacagtactctgatgtttgtttatctctttcattgattctgcatcccctgtacagcaaggacaccatcatcgctgtccactgagattactgtagcatcttcatagctggacttccctggatcagtcttgcattctccactgcatccttcacagcacagccaggtctttctaaaaatacaaatcttactttgtcattcctctaattgaaattctctattgggttccaagtgtatatcaaataaagtataaggccttggcatggaatgagggcacaacagatgtcatccttggaatgagagctccaaagccctacccttcttctcaacctccttcctcccctcctgctcttccgctgcagtggtgtagggtgaacccctgaggccctagaagagtcatggcccctcatcccactccccatctccttttttaaaaaaataatttttttaccattatctgtgctctgagctgagctcagagccagaaggaccactgagagcaggaccagcagcatcttgaaggaggctctggagttgctcccaactctgcgttgagagaaacatggcagctccctttataaacatgagcagaacaatggcacctttgagctccatactgggtggacctcaccacctgaaagattaggttttgctttcctctcataaagttgaatgcgtctcttattactttttgggattttagcccagcaggatgtggtggtaggatgtggttaggtacaaactgtgacttgagcatagtttctgaagaaacagtatccaagcaatcagcacaaatactacaattgaagtttggtcatcatttgattttcaattgggttagacagttagtctttccccttcattggttgtctgtgtgcacacgtgcttacgtttgtatatgtttgtcagcagtgatcttatagccagaagtgaaaatgattaatatctctagctattagtgtagcataaattccatttttatagcatatatacctatatggatgatatgtagcttaatttcataataatatagagatcatttctgtttaatgttgagttgtgtgaggacaacacacacttgggcacacgtggatgacagaagttttaccctcaggctactctggcccaaagagattaagattctcctaatctagcattaaccagagatactttattgttgtagaacacaggtattaaaacattctatctttattaataccctggaggttagtaaggcaaaattggccacagaaagcaccattagatttctgcatcagaacagtgtgaatacacagttccttgaacaagccatgctattttatgtccctaagacttcttccatgatctttctcttttctagaatgttctatatgattcagtttaggtcttacttcttgtaccaaatattttaatcacactggttattgagtggacacaataatacaatctaattagatagtatgatagcctgttgaaagcctcaagtattacattgattttctattttttaattagtttccattctatttgcttctcagattgcctttaccaaagattattttctctgcaatattcttatactcattcttcttcactcttgtgctgaaccttacttgttgatatgttatattgtgaatcaatcctccctatgtctatgttttatatcttactgctttcttcatgcgttctgggagaaatctttatttgattttctaaacaaggttctgtacttctctttgcttgctttcttcttttttgtttttaaaatttggcaccaaggttttgtgtttctgaaaagtttggtagggtcctgagttggtagcttaatcttcacctgctgatttttctgtcctatctagtagttttctgcttatattttcatggaacccctagatcaatcagtatcaccagctgccacttttcattacaggcattgtataggtctcgtattattgttacatttttgtacagggctggtgataatttgaggatagcttggttggaagtatgacagggtcgggggaatgtgactggaaatcttaaagacaggcctcttgaccattgtggataagtggatcctgtgctgtgcagatgaaggtctggtctggcaattctgaagggttggaggtaatattacaggaagattttctaatcaatggtgtttgttatggataactttactttggcaaagtgaccaaaaaataaatattttctctggcataattatggacatattttgaaggtgaaatatattatgagttagcaattcttctctatgtgggaagcagaagagttctagctgtgctttagggttttatgggtgagagagagtagttgtttgggcctacagacccagctgtgttactaggattgctgcctctgatttcaccagacactgtttaacatgggaagtggagataagtagttctgcctaggtggcttatggtagaccatcaggtaggaaaggaaggtcagcgagaaggagcagaggggcgtgccatgcagacatgattcactgtgtgggtggctgaggaaactgcagtcctggtggaagg

SEQ ID NO: 916713 - DNA, 4001 bp, Homo sapiens
gggaggcagaggcaggaggactgcttgagcccaggagtttcagaccagtctgagcaagcaacatagtgagaccccatagctacaaaaaatacaaaaattagctgggcgtggtggcacgtacctgcagtctcagctacttgggaggctgaggtgggaggattgcttgacaccaggagattgaggctgcagtgaaccaagatggtgccactgaactccagcctgggcaacagagcgagaccctgtctcaataataataataacaataataatacatttatataagattaaaagtagatctatttaaataaaaatatcaaaggaataacacaagtggtatatgcatatagtatactgcatgtggtagaaagtaaactaaagtttgagaaattgctggtaatttgcttgaaagcacaggttctgaatgtaacagacctgaagtctgaatcccactttgagcatatagtcagcacccagtaaaatggttctctggccctccgtatgaaacttcatcttatggccggacgcggtggctcacgcctgtaatcccagcacttggggaggccaaggtgggcggatcacctgaggtcaggaatccaacaccggcctgaccaacatggtgaaaccctgcttttacttaaaataaaaaattagcctggcgtactggcgctcgcctgtaatccctactactcgggaggctgaggcaggagaatcacttgaacccaggaggcagaggctgcagtgagccgagattgagccactgcactccagcctgggtgacaaagcaagactccgtctcagacaaaaaaaaaagaaacttcatcttacatcacctaaaatgcattccatcccaccctacttgggcataattaattgcatcttcctctgcaaactgatctgtgattttacactagatggcataagaaaacctgcatcagcttttgagccagacccaccactgccacttccgaactacatgaccttagataggcgtttgccccactctgggcctcagtttcctccttatgcaataaggatgatgagccttatttgtaactcaaagttcggtccttagaccactagcatcagcattgctgggagtttgctacaaatgcagaatctgctcccttgcctcaaacaaaatctgcattttaataagatccccaggtaattcatatacacactgaagtttaagaattcacgatacaatcagcaaatgccgggtgcagtagctcacgcctgtaatcccagcactttgaaaggccgaggtggaaggatcgcttgaggccatgagttcgataccaacctgggcaacacagtgagactctgtctttacaaaaagtacaaaattaagataaggcagtcagcgaggcacatgacagctgtttaatcaccaagtaacacctgtttccccctccctaaaatggaaagagtaacagcatccacctcaaagggttgttgcaaagattaaattaactcaacaatgcacagcacttaaaccagcgcctagcacacagcagggctccacaaactcttgctggatatcaatatggctaactcttcagttgctaaagttctttgcctgccttcttgtgccgacagaggccgcacttgcggcgccttgggcctcccagggagatccgttgcggagcgcccaaactgaggccgccctggcatcccagtaccccagggactccgggccgggttaggcgacttggggcgccccgaacccacactcacgctttccagcacgtcatagttggccttgatctgcgcttctatctcctccttgcgccgcatcagctcctggacgtcgctgacagtcacgacgccggcctgcgaggagcctccgctctgcctcgcttcctcgtcggacatcgtgaaccccgggccgcgactccagagacccggctcccgggctagggacgacgccccagtcgaccgtaactacggctccgcccatgcgccaaaacaccacagccgtccgcgaacgcgagaacagtcaaggggcggggcttgggatggggcttagggcggagctgggtcaccggaagccgcgccctgccggaacacgtgcgcctgtggtgacccggcaggagtagcgtcggaagcaatggatccccacgcaattgcacaccaacgctaggggatgatctcgccccagctgactcattttctcattcgtgcagcagacatttattgagcgcctactgtatggatggatactgtacgccagagaaccgctgcgtggcgctccaattcagttcttcacatccacacagccctggaggatttacaaaatacattaaggttccttatccctcactttacagatccgatatgcctgagtacacaccccgtatcttgccacttaacggcaatctgtgtgaccctaggtcactacttggcttctctgggcctcagtttcctcatctgtaaaatggggcagtaattgatagcaatctatctcatagagctgtccttctgctaacaaatattcatggaatgattcctatgagccatatactgttgaaggtgctggatgttcctgttaaggcctctaaaaatcgtagtgataataataacggtaacagtgtttatttattgatacttataatgtgccagacgctgttctaaatgccttacatatattaattcaacaacctcatgaagctagattattacatcccaatttgacagctgagaaaaccgtctcaataaccaatttacccaactagcaaaatgtgaggccaaaattccaacccagcttacctaaacaatcaactttgatatctgaccatgtgcctctaatattttgtcttgaaaagggctcagcggtcatctgtgtagtattcaaacatgtttgccctgaatctaatcattggaaaacagacatatccaaaagaagggacatacttcaaaacaactggcctgaaaacttcaaaaaaagtcaatgttgtgaaatacacatggggaataaggggtgggggacagagaaaggaggcggatatgcaattgcctagatttaagaacactaaagatgtgcatcaactaaatgcaatgggccaggtgtggtggctcatgcctataatcccagcactttgggaggctgtggcaagcagatcatttgaggtcaggagtttgagactagcctcgccaacatggtgaaaccctgtctctaccaaaaatataaaatattagccgggtgtggtggcacacacctgtaatcccaggtactcaggaggctgaggtctcgaacccctggcctcaagtgatccagcccagctcggcctttcaaagtgctgggattacaggagtgagctaccgcacccctcaaaaataaactaacatttctaacattatcgagagagagagagagagaaatacaggtgcagtggctcatacctgtagtcccattatgctgggagatcaaggcaggaggatcccttaggtccaggagtttgagactagcctgggcaacatagcaagacctccatctctacaaaaaaaaaaaaataataattaattagcagaggaccaggtgtggtgattcacacctgtaatcccagcactttgggaggctgaggtgggtggatcacttgaggtcaggagttcaagaccagcctggccaacatggtgaaacaccgtctctactaaaaatacaaaagttaccaaggcacagtgccacacacttgtaatcccagctacctgggaggctgacgcaggagaatcgcttgaaccggggaggcagaggttgcaatgagctgagatcatgtcactgcactccagcctgagtgaccgagtgagactctgtctcaaataaataaataaataataaagttaaaaagggaggaagagagaaataatgactaaatgcaatacatgatccttacttgaattatttaatgagaaacagcagctttacaagacttattgggccaactggtgaaatctaaatatgaactttatattaaattatagtatatcagtgttaaatttcctca

SEQ ID NO: 916714 - DNA, 4001 bp, Homo sapiens
tgttgcccaggctggagtgcaatggcatgatctcggctcaccgcaacctccacctcccagattcaagcgattctcctaacctcagcctcccgagtagctgggattacaggcatgtgccaccacgcccggctaattttttttgtatttttgcagcgacgcggtttctccatgttggtcagtctggtctcgaactcccgacctcaggtgatccgcccgcctcggcctctcagagtgctgggatcacagttgtgagccaccgcgcccagcctaattcaaattttttaaaaccccgattacgtatcactttcggggagggggctccttcaaaaattctaacatgctgtgctctagaagcttgttcccagtgataaactcgcttcagcctcacgcatccctttagatttctagccaatatactcagcctcagtatcatgacttgaatcaagcaaatccttattacttttccaaagacataaagtcactcccctcttctctcttctgaatggagtctaaaacaaaagaaaaaaaaggttccaccttaattgttctccataccttttaggacgtagttagtaccttgaaaaataacctcccgtcaaaaaaaaaaaaaaaaaaaaaaaaaccctgtaaaaccggcagttcccactgtacgcggcagtgccaagaattcttaccggttaaaatcgccaaggctttcctttatcatcgtaaaatgaagactgccatagaatctgtattcacctccacacaaatttaagatctttgggacgactgtaggttaattaaatgcctactacatacctatttcatcctacactgtaacaagatagtgaaacctcacctcaagtagaacatgaaacacagaaaatgtccgtatctttccaaagtcgacacgtgcggaactacctgctcaatggtaactcctcctcgctgccagggaagcggctgagttttggcaacctcccgtgttttcaagagactggagttaggaggcggactggaagtacccacactcaagaaacccagacactggagagggaagtatgttgcggcgtgggcatggcttccttctagttgcctagcagtacctgcagctcacggcgaggtccgcgtggggctctcccaggagctccgccaggcacctggcggcacccaccacaggtgcactcgactcagggcctggccccgggaccacaaagcaacagaaccggagcgcccaagcagccgagaggcgacccacgaaggttcacgcttcagggcgccgcatggcgagcagctaccgggagcttaaggcctagggtgaagttaccgaaagaggcgagtaacccagacagccaaaggggtaaaagtaggatttccggcatggggaagccaaggaacggttcaggggtgggggaagcagacatctggaggaaaaatgtcctccacccgccaacggtaaccggaacaaggatcctggacctcccgcccccaggcaggaacgactgccaccaccgatgcgagaaaggctagggggccgcttccagggagcccccaacgcggcctcggcctcactcggcgaccttccctcggcggggtgtcgcactcacattgtgaacggggcagggggacgggcgaactggtgggcgggcctctctggcggcggctgctgctagggagtcgacttctctccggtggcgactccgctttttctctccggtcgcggcctcttctcgcttccctcaggcgacggcggcagcggcgggctcgacctcgggccccagaatgcaccgcgcggaaagagcggctcctccggtcggggagaagaggaaagtgtaggaaaaggggcgcgaggacggagaatgaacgtgcgtgcgtgcaaacgaggggtggtgaggccgggcggcggctggtgacgcagcaaaatgcccgggccttgccgccgcgcgtgcgcagtccttgtttttgggctccggcgcggctttctagagatatctacggaaagggcggggcctcccagctccttcgcgatccttcctggcgccggccccgcccttcgtccgccaccccacccccactccgccccctgctagtccctacgcgttcccgcctctcctcccgctctgtcttctcgcgttagaaaaccgttagtggcccaactgccctgccatgcgccttcggcgatttctctgagaaacggttgcgttgacagtgggaggcaaggctgaggcggagggacacggagtcgggatcctggagaactgaaatggcgcgttggttactcttgagggagtaaatcagctcactgagtcatcattccaccacaaaaacctgtaaaaagcctgtgctgtggaaaagggctcacttcagaatcaagggcctgggtccacctcgccatttttctgaaggttggaggctctgtccagggacagcggaaattcgaggttcttggcggaggaggagcatttgccaattggggcgggcttttgcccctaccttgagaccttagtgctgtagatgagccaggaaaggtatttgaggggagagtctaggtttctgggaatggagagagtaggacattgtgtgtttccacgcacatcgtttgggggagaaggggttccccgtcgctttgtgcaacatattagtagggtgtagtaggggtagcaaccaagagacccaaaacagtcctgcttaagaagaagccgcttaacggtggattggggaaaaatactctagtgcgctgcattttgaacaggaaggaggtttaacgaaagtgctataaaacctttctgaagaacggggcttcataataagcactaaggtatttagtgtctgtgttgtgcaggacaggtagtgggagctacgaaacctggaccctagctcaaatgccattaaaaagggaaattgggcggggcgcccgtggctcacgcctataatcccagtactttgggaagttcggtgggcggatcacctgaggtcaggagttcaggaccagcccacccaacatggtgaaaccccatctctactaaaaatactaattagcagggcgtggtggcacttgcctgtaatgccaaatactagctagtatgaggcgggaggatagctcgaaccccgaacccgggaggcggaggttgcagtgagcactccaacttgggcgacagagtgagaccctgtgtcaaaaaaaaaaaaaaaaagggaaggggccgggcgcggtggctcacgcctgtaatcccagcacttcgggaggcagaggcgggcagatcacgaggtcaggagattgagcccatcctggctaacatggtgaaaccccgtctctactaaaaataaaaaaaaatcagccgggtgtggtggcacacgcctctagtcccagctactcgggagagcgagacaggagaatcgcttgaacccgggaggcggaggttgcagtgagccgagatcgcgccactgcacttcagcctgggcgacagagtgagtctgggtctcaaaaaaaaaaaaaaaaaaaaaaggaagttaacttggcgcactggttcacgcctgtaatcccaacactttgggaggccgaggccagtggattactggagatcaggagttcaagaccagcttggctaacatggtgaaacccccgtccctactaaaaatacaaaatatttggccaggagcagtagctgacgcctgtaatcccaatactttgggaggccgaggcgggcggatcacgaggtcaggagttcaagaccagactggccaacatggcaaaaccccatctctactaaaaatacaaaaattagctgggcgtggtgtgcctataatcccaggtactcaggagtcttaggtgggagaatctcttgaacccggaagacgcaggttgcagcgagtctagattgtaccactgtactccagcttggtgacagtgagactctgtgtaaaaaaaaaaaaaaaaaaaaaaaaaagaaaagaaaaaataggtcacaaccaaataatggtggcactgaatgtcaggctaaatttttttttttttttatgtt

SEQ ID NO: 916715 - DNA, 4001 bp, Homo sapiens
tgtagcgaaacccacatatatatacatagctgtctgtctacctcctctggtgggctggttgcttccggaaagttgattccacacaccctgagaacaagtttcaagtgcgtgtgtcgtcgatcaggagggccaggtggcggcgagggcgggtcgttagtggcagccggagcggcagggaggcggcagccccgcttcacgggcggggagacatgctggccgggcggcgcaggttggaggcgagttgaaaaccgagcggaggaatgttcacacgctccgaggcaaacctgccggagaagtgagctagtcgcaaagaggtggcgccctaggaacgcgcgcggggcgagcgagggcgcaggcgggctggcgggcgggcgcgcggggggcgggggcggcgacgggcggcccgaacgggccccgcgccgcccgagcgagtggaggggagccccgagccgggaatgagcggcgagcggcggagctcccccctcccgcgctgccgaccccggagctgtcaggagctctgccgagccccaccccggagcccgggccctgtcgcgccatccccgtgccgggggcgtgggcgcatccgcttgctccctccaggcccggccggctcctgccggcgcggcggatccgggagccgagatccccgagggcgtgcggactgccccgggcagccggcggtccccggcgcgccgagctggacgagcgggcgccaagaccaccaggggcggaccgacgaggaggaggccaaggagctgggccggggaccgcgggcaaccgggagcctgcgcggagaggacgcgggctgttggcctgtgaatttaaggagcccgaagctcgcctggcagctcggggcgatgcatgagaaccttcctccctggcccattcccgggatgaactgagtggggagcatcggctagagagagggagatcttttgcttagaagaacaaaaacagttccagatttcatatctaaattgcactttttgctgtttcagaactgctgggagacatctggagccggtcccaaaaaacccgcgcacaggagagatcccccttttgaattgcagagggggaccgacactcctggagcacgcacacggcccttttcactcatggtcgggagtctaacccatcctttctctgataccctacctgcttgtcccctccccctcaaaagtcccaggttacagattcttggaagactgtatccgagtcgctgcagccagcggacagatgcagtggaactatggttatgtgctgctctgcctgggagaagcgacgggaaagccgaggttctttccaaagctaatgggcggggaagaaagactgctcggaattactgggtagtatcatctaggaaaggattgcagcgggagtggataccctccccagggctcctctaactttttgaaaagagcgcgagtggactgggaaccattcaagggatatttgtcttctaggcaatcctgctggtagggttcattagtttctagaaggctagtgtgatttagattcttgagatgattcaaggaatgtggcctttatcaagcccgactttccgggtgatgctccacatattttacccagggtgggagaaatagcacgctgtcaccgagaccctcgctcatcggggctcccactggttcactgcagctagctagcagttaaagtttactgcttaggttgggtgggggggcatattttcttagaagctcctgccttcctcagttcattactgtaaaccccgtaccttaaaagactcggcttcttctcactaacaaagaaaaaaagcaaaacaaaaccaaaacacacacacgcacacacacacactctctctctgggaatttccacaacttcccttgaatgtgtaaggatttctaaatgttagacttgtttggatagtatgaaaggacaaagtatcagcactcagaaatgtcaacctttgaacctcgaacactttctgatttataaaaagaatccttccaaaaagatgcaggagccctaatgtaatcgttagatctgaagggggaaatctgtaaaaaaaaaaaaaaaaaaaaaaaaaaagtcaatcacaaatgagccatttaatacttgcaagttgtttaacattgaaatgataatatttgcttccacaataaaaagtccaaggtacctagccaagtttcaaactatccaggctttaaaaagtcaacccttctcccaatagaaggttaaaacaaaaatcagattgaaattatcaaatcacttatgttgtaaataaattcactttactttcagaacattataaattaaggactggcatcaatagactgctttgatttatgttgctttttctactaattaaacaaaattaaccccccactccttccctcctttctttttccccacacacttttctggtgttaatggcaaaacatctatcaaatatttttagaatttcctctcctccacaaaaagagaaaatatagacacaggaaaaataaatagtctttatatactcggaataccaaagttccctcctaatttattacttcaccttttccttgatttacaatcttctctctgctcttctggctgaaagagggaaatcttctcagcagtcttttccagaaatattttttgttgttcttcagaaaacataaaattaaatcttaaaatgaattaaaagcttcttgaaaggagacttctgttcccactaaaggcaattattagaaagcaggtacctcttccaagctgccctgtttattactttccgtagaaattctcctcaatatatacccaggaccctgactttttgcctgttttggaaaggatattttctgacatcataatctagttcctaacataactgagtaatctccatcataataatgcagaggatgcatgactgcaaatgagacacagcaagagcaccccctaccacctccctcccccccccgtccccccagcccacacacacaccttttttctaaggtttagaaatagaacaagtgccaatagaagctaaatgtttgcttaggccttgctgtcatgtaaatgcaccttagcaaatgggaaggcctgcctctaatctgaagtatttccatgtttagcattataagatctacacctacacaaatgcctagcccatgagcaccaggcttccatcttcccatccccagtggcagtttattacagtatatcaaattttaaaagaggttgaaaaaattttaaatgcattactcttaaattcagttgaatacccagttaatgtatatctcctgtcatagcttagaaaaaagtaaatagcatttatgcttagcctcttcatccttctttcttctttcctccttaacccaaacagcaaacagatatacattataaaccaaatatgaatctatagcactttaaacagtgcacctgggcttgggaattctcttattaccaataagcatccagatttcacatttaccaatctgtagctgcaagctatgtctctaaaatcccctggaaccaaacaactaaactcatcccatctcttctccaaacttttttcaatgtttacaaagagacgttgcataatcagctcaagtaatgctctcattggattccattagaatgtggctctcatcgctcgcctggactgagacttgagaggaggctgttgccagctgacctcaaggtagcaaaaaagaaaaaaagatgtaatgccttcaaaccccaagtaacaataggaaagggtgtgtttctttattaaatctttttgtagttaggtgaggataagacttctccaggaacagggcgggctgctaacctctggaggaactgcctcagggaggagtgtatagatatgcatcaagctgatgggatcctcccatgggaaaagtgggcctcacacccttcctcacccttccctacttcctgggcaatgttctgcttcccccaaactgaagcaggaggcccagagaggaggcggtttcctgggaggaacccaaaccaatgtgagatgagaaggtctt

SEQ ID NO: 916716 - DNA, 4001 bp, Homo sapiens
aattggctctgttccaaggtagtatttcttagccaaataaatatagtatttaagtgtgcttttaaaaattcagtcttcatttctatttatgtatgaatttcaaattattgaatttaagacaagtttcaaaatgagcaaaaagtctgaagacaattttcagaaacacatcggtaaaatgttgatctgaagaatacaatgcagccttatcttcggtataatgttctacacaatttgccttaggagattcataatagattttcattttgatgccaaggttccgacatgtctaaagtaatttcatttaaggattttctcctctaataataatagaccacaagcacgtataaaacagttgcctttttgtacaccctcgggaatttacaaggaagcaccataaacctgactgtaaatattagatactgctatttttattgttagtgtaaaaatttgccttaattccttctccagagtcaaacgcatctcagttctcgaactttatagttttcccattctgaacactgagtctgcagtttaaagatcacccaactatggtgttatacacattagtgaactgctaggtccaacagattattaagatcatgttactctatcactcttccaagttttcagtcacacgacatagtgatatttctctggtgtgcttggatgtatgattatttcaaagttgaagttatcattaaaagaatcaccaagtgagaatgccaaaatacaagttttcagtctacaatgcaaatatttgactccagattaaagaactgttagcaataactccaagaaaaaaaaggttccacacctaaaattcattttggaatcaagcgctctagcgttcctgaactgtatcaatactaacattggagtcgtgccactgcaaagttgttgctactttattatataatacgcttttattatgtaatgtgttcctattttatatgcttaaaattatgtcattcataataaaattagatgtacggcttttgctttttcacacgcaaaccgccacccacattcagtatgtatacaagcgcgcaggccatacgtccccaggaccgctcagcttcctccgagtttcagaagcttcccgggtcctgacagtaaccaccaccccccaactttttttcttttccactagaggcagaggatctttccctagaagagattctgtgaaacgctccctcttatggaaacacacataaagtctctctcttgcctgtctcccgttgaagatcaaccagttctcctgccaggtttgaggacccgggctcaggccccggcaggtatccgggatggtccctctccctaacccgggcaaggagcatcggtgaccgctgcaagccctcggcagcatcccagcttggcagcccctccccctggcctccccaacccggcgccctggggaggatggggcacttacaggcggcggctgagaccctccaccgagcgcccgcaggagggcaccgcgtagctcagcaggaacaccgcgacgctccactgctgaaccagtctccgctgcatcgtctccgctcgcgctcgggacctgcaacagaagggaatgggacccgagtgtcagtctggactctccatctccccgcactactccgctccccctttttagcccgctctcaaaaagcctcttcaacatcaagggcatctcccaagttgaaaagaaaaaaaatttctctggagcctctcagcacttacttatttagcaaccggctactccaactgtgctttctccaaaccacacagccagaaagagcaaaaagggaaaaaagaaacaaatcagaggcgcttcctctgaaataatagcgaaaataaaatggttttatatatgcatcaatgataagtagtgtgtttacacgtctcccatagcaatgtctaattaatctggccagcagttctcctgggttcgtggaacagggctaaccgcctcctaaaagaagaaagtttccccctctgaagtcagcttctttgcgaaccaggccctttcgttccagagccacttgtagcgaaacccacatatatatacatagctgtctgtctacctcctctggtgggctggttgcttccggaaagttgattccacacaccctgagaacaagtttcaagtgcgtgtgtcgtcgatcaggagggccaggtggcggcgagggcgggtcgttagtggcagccggagcggcagggaggcggcagccccgcttcacgggcggggagacatgctggccgggcggcgcaggttggaggcgagttgaaaaccgagcggaggaatgttcacacgctccgaggcaaacctgccggagaagtgagctagtcgcaaagaggtggcgccctaggaacgcgcgcggggcgagcgagggcgcaggcgggctggcgggcgggcgcgcggggggcgggggcggcgacgggcggcccgaacgggccccgcgccgcccgagcgagtggaggggagccccgagccgggaatgagcggcgagcggcggagctcccccctcccgcgctgccgaccccggagctgtcaggagctctgccgagccccaccccggagcccgggccctgtcgcgccatccccgtgccgggggcgtgggcgcatccgcttgctccctccaggcccggccggctcctgccggcgcggcggatccgggagccgagatccccgagggcgtgcggactgccccgggcagccggcggtccccggcgcgccgagctggacgagcgggcgccaagaccaccaggggcggaccgacgaggaggaggccaaggagctgggccggggaccgcgggcaaccgggagcctgcgcggagaggacgcgggctgttggcctgtgaatttaaggagcccgaagctcgcctggcagctcggggcgatgcatgagaaccttcctccctggcccattcccgggatgaactgagtggggagcatcggctagagagagggagatcttttgcttagaagaacaaaaacagttccagatttcatatctaaattgcactttttgctgtttcagaactgctgggagacatctggagccggtcccaaaaaacccgcgcacaggagagatcccccttttgaattgcagagggggaccgacactcctggagcacgcacacggcccttttcactcatggtcgggagtctaacccatcctttctctgataccctacctgcttgtcccctccccctcaaaagtcccaggttacagattcttggaagactgtatccgagtcgctgcagccagcggacagatgcagtggaactatggttatgtgctgctctgcctgggagaagcgacgggaaagccgaggttctttccaaagctaatgggcggggaagaaagactgctcggaattactgggtagtatcatctaggaaaggattgcagcgggagtggataccctccccagggctcctctaactttttgaaaagagcgcgagtggactgggaaccattcaagggatatttgtcttctaggcaatcctgctggtagggttcattagtttctagaaggctagtgtgatttagattcttgagatgattcaaggaatgtggcctttatcaagcccgactttccgggtgatgctccacatattttacccagggtgggagaaatagcacgctgtcaccgagaccctcgctcatcggggctcccactggttcactgcagctagctagcagttaaagtttactgcttaggttgggtgggggggcatattttcttagaagctcctgccttcctcagttcattactgtaaaccccgtaccttaaaagactcggcttcttctcactaacaaagaaaaaaagcaaaacaaaaccaaaacacacacacgcacacacacacactctctctctgggaatttccacaacttcccttgaatgtgtaaggatttctaaatgttagacttgtttggatagtatgaaaggacaaagtatcagcactcagaaatgtcaacctttgaacctcgaacactttctgatttataaaaaga

SEQ ID NO: 916717 - DNA, 4001 bp, Homo sapiens
ccaccgtgaggtcttcatttctgtgccacaaggtcagtatggcatttccactacctagggggctcttccctacgtcctgggccaggagagcaaagagctggtcagcttctctctgggggccccagcaccaaaagtctgtatggccctggcctgactttcccatctgggctgatgcagggagggagaataccagagaccaaagttcaaggggccgggccctctcctcccctgttctgtccttctggtcactgtccttccatgatcccttttccaggagaatatgtgacctgggccctaggtcttctgctaagcagccctctggcctcatttactcaacacaggcacacacaccgacaccggccgacagccatgcacagacacagttagagaggagcacccacgcgatgggagacacatggcccagcgttgggccattctggtccacactcttgagacagcacgggagcacagcggagccactcagcactcacaaagcgacaacatggctccagaacatctacgtctccacatgcacacatgtaactgacacgggcagtcccacacactcgctggatttcagacatacaaagacacctactcagtgaagtcacatgccaccgcacagcccgccggagggccacacgggcgcaccttggcagatcgcacacagcccctctcccaccgccgttaatcccattggctccccccgtttcactccgcgggcctccgggagacctgtgtgacggcccctcagcaaccaccgcgccccccccccccgccatacacatacacacacaagatagggctcccagcccccaaaccccggccgcgttaatttcccaaagcgacactccgcaggttccctggggaaattagaggaaggctggaagagaggcaagggcgaacggatggggccggggaagggagctgatgagggcgaggacagctcgacgcaatgccatgcaatgcccagcctcggctttttcgaaggctagtcctgccccgcttctaatttttaggaattcgagattctttcagtgtgtatgcgggaaggggacgatgaagagaaaagaaagctgaaagccagctgaggggagggaacgagaaaacagaggcggccgccgtccggggagagaagcgagcgacggtcgggccgcggggaggggcccggaggagcagcctccagggagagtcctgtttacacttgaggatctcaaaccgcttagcgaggaaaggtgaggtcaggttgcaagcaaagacgcggcagcggggcgcagggagggggcgcggcaaagtgagactcggggcgttcggacgggaagccggacgggatccggtcagcgaggtggggccgaagaggggtggggacggctgcgggggacggcgcgaccggagcggcgaggccgggcgccgtggtgcgcgcagggcagctagagggcgctggcgctagccgcgcggagccgggaaaggagctccgggccggggagcggtgggagggcgcagtggggtccgccaggacccgggcgcaagggccgcgcggggccgtcgggggcggcctggggcgaaggaccgcgccgggccccagggctgcgcgaggtccgggccgccgccgcccccgcccgtaccttggcgctcaactcggccgctgcctccacgcttttctccgacatggtgccggggccggggccggggctggcggggagccggggtcccggggccgagacggaggggccctggacggcggagggtggccgcggccggaacctggcgcggtggcggcggcggcggcgacagcggcagcggcggccgctcggcaagctgggtctctggaagaggcggcagaggcgcgcggggtggggcgggggtgggtctggagcggagacccgcagggctgcggccgtccggagggcgggcggaagggcggtgcaggcggtggccggcgcgctcggccgcggtagctcgatcccgggctcgccgcccccgcaccagcagagctgccgccgaccagccgctgccgcccccgggaagggaacccgcttataaggcggcgctgcccgacgggaggggcttcccaggggtggggcaggcgggagcggggaggagaggagaggggagggggatgaaagaggaggttggagaggtggggataggaggatgaaagcgaggggagggagagctagggagtcgggagggaggacgagaccaggagggggaaatggagagactgacggccgcggagaaagagtggggcgaggaggtgggaaggggtggggttcctgcggggaggcacctttccaaatcccaacctactgcctgcgaatgtggagtctggcttttgggggcggactggagaggtggccagaatcctactgaccccaaaaaaagccctgggattttgccaaggggtggggtgaggggagcagatgggaagatagggcaggtatttgagaaaccaaaagcttaaagaagaggaagagggttcgggcgctccttccacaccacgccggatttccccctctcatcctccatccacattctctggatggccttgaggagggatgggagggcagaaagggcggcccagccttctgtcccgccagattgacacttgtgacccttgccgggtgcctcccttcctggccccgtgctgtgagccggggggagtcaggccccctggtctcctttgctgtcttccagctctcttccatcttctacctctcttattcgcccgtctcacctcacttttattcgcctggtccttctatttctcttcatccgtcctcagtcatctgtacctagacccctccttcacaaccaattataactcgaatcgctcccattcttctctcacctcttctccactcctcactgactctcttctgcccttccacctctggtctctttccctatctttcccagacaaccctgctcttgtcttatctgagtcaggcacctggccctctattcttggctggctttcctcaactcctctttctgtcctcattttttacattttccatccttcagcttttctcattcctctgctgccatcttccctagcctttctgggttatatttgcctcctttgcaaatataatacaggtccaggtctggagttccagccccaccctattccacacatcctcagctcctcgccctcaatctcggtatctttgagtcattttgaaaagcttgggatttcagaagggaacaggggctgggttgtgtattaaaggtcaggaaggtggacagagtggaaggctggggtttggaaaaagacctttggtgtgcgtgcactcccatatttgtctgtcattatcattattcctcatcttattattttcattttattaataaaaaactacgttgatgatcattatcattattttgtgtttgagtgcttaaatacaccatcttttggtcccttgatgtacacgcctcccagtttctctttctgacttttctatcaatatttcagtctcagtctcctcaaaaatcttggggccccacccaggatttttccttgccggactctgtccatcttttctgagatctttccatgtccctctctcaatctgtttctctgactcactggctgatgtcttcagccgtctctcaccgtctccatctctgtactcctcttgcttcatttatctccctctcctcgatcctttgctactcccccccccgcccaaccaacaacccagtctcccagtctcgctccctccccatcaggctctttcctctccctcccgccttcctttcctcttccctccactccacctcccagccccgcctgctgtctcggacaccctgctgggctcttaccctgttgccctggtaaccgccccccactccggtcacctccactcctctcccccctccaatcaccgccaccaacaacctccatccaccttcctcctatttttcctgatagccaatagaaaccctgttgccaggtggaatgctcatttgaatcagccaatccagaagcctaactg

SEQ ID NO: 916718 - DNA, 4001 bp, Homo sapiens
tctcccctttttaaattccagatccatgtatgaataacatgccaggtgtgtttggaggagacattcctaatattttgaaaaatctcattcaggctgggtacggtggctcacgcctgtaattccagcactttgggaggccaaggcgggcggatcacgaggtcaggagtttgagaccagcctggccaacatagtgaaaccctgtctctactaaaaatacaaaaattagccgggcatagtggtgcgcctgtagtcctagttacttgggaggctgaggcaggagaatcgcttgaacctaggaggcggagattgtggtgagccgagattgcgccactgcactccagcctgggcaacagagtgagcctccgtctccaaaaaaaaaaagaaaaaaagaaaagaaaatctcattcaaatagcctcaatagcttgaatcgttttttaaatgtctgagacagtgaccataattgaacaatcatggaaaagaatagacaatgggtcttaagtgtgagtggtatatagagtgactatacaaaatagcaggatcactatctgaaaacaacaggtcacactactgtttgacaacaaaattaaggcttacaaatggttagcaatagttacaaaataatagaagcaacatagtgattaaaagtagggattctgtctccaccacctactagctgtgaggttaggcaatttacttaacctctgaaactcggtttactcatctttacaatggggataatagtagccatctgatagggctgtggtcagaactaagcaaatgttagctattagtagtagtattaccctgacctttcaaaggatctcattaactcactaatcctcctaagtttcaaatcttgtcatttactagcatgttgcttctgggcctcggtttcctcatccataaaacgggtaccagtaaagtgacctgactgttaaggttgcagtgaaggattaaataacgagatgcggctcccttcctttccatctcccaaagcgaagatcgcagaggaaggaaatacttctagtggctgcagatacagtcagtttttccatttctggcacgtgaggggtaggaggaaaagaagacacaaagaggcatataaaagggtcaggggtcctgcgtgaagtccccaaatgcacgaaagtggcacagtgagccagaacgactagaccactgggggcccggccccgcgcaactcccctctcgtgtcccaaggagcctccccaagtgagcagggttatttcggaatcaccatgaggcaattctcatgaggcaatgggtcaggaatgcggcgctgagcctggccgctggcacccgtggttccctcggcggctctacctgccccgggcctgacgggcatccccggggctgccgcagccggaactcggggaggcaggaaatgaatggggacccgaggggtgggggcgcggtggggccggcccccggcccctggagggcgaggggacgaggagggaaccggcccccaaccccgacccggggcgggagcccgaagcccggccggggcgcccccttccggacggggctaaccgaacgcggcggtggccgggccgaggcccgcgccgggcccctcggggctcctcacctccgcgatgtcatgttcctcccgccctccggctccgcgacggacccgctccttgctcaggctccgctgggctcggtcacatcgggctggcccgagggaggcccgctcgggaccggacgcggggcagagccagccggccgcgcacagacccccctccaggcctggggatcccggagactgtgcagctgccccccggcccggctcgctcctcctccgcccccgcccttcgccgccgtcgcccccgtgatgtcaccgctcgcgacgcccgccgccacttcctgcttcccgtcagcggaggaccgagcgacggccgggaatggcagcgcgggggctccgcggaggcgccacgcacagtgtccaaagcatccttgcttcctcctggaaaccgcggccgccaggtgtgagctgcgcgctccgcgtctacgccaccgacccgtccgggcccgctgccacatcgatttcattcatttcgttccacaaatcgccgctccactcattagctgtggaaccttggggaaattacctactgtctccgagcctcggtttcctccattcttttctttctgtaagataaagatagtaggctgggcgcggtggttcacgcccgtaatcccaacactttgggaggctgcggcaagaggttcgcttaagccaaggagttcgaggccagcctgggcaaaaaagcaagacctcatctctacaaaaaatgcaaaaaactaaccgggcgtggaggctgcggcgggaagataacttaagcccgagaagtcggggctgcagtgagtcgtgatcacgccactgcactacaccctgagcgacagggcaagacactgcctaaaaaaataataataggctgggcgcggtggctcacgcctgtaatcccagcactttgggaggccgaggtgggcggatcacgaggtcaagagatcgagaccatcctggccaacatggtgaaaccccgtctccactaaaaattcaagaattagcctggcgtggtggggggcgcctgtagtcccagctgcttgggagtctgaagcaggagaatcgcttgaacccgggaggcagaggttgcattgagccgagatcgcgccactgcactccagcctggcaatagagcgagactccgtctcaaaataataataataattacaataaatactactttggggtgggagcggtggcacacgcctgaaatcccagcacttccctttgggaggctgaggcgggcgaatcgcttgagtccaggagttgggaaccagcccgggcaaaatagtgaaatcccatctctacaaaaaatacaaaaattagccgggcgtggtggcgcgcgcctgtagtcccagctactcgggaggctgaggtgagaggattgcttgagcctggaaggtcgaggctgctgaaagccgagatcgcgccactgcactcaggccaggtatggtggctcacgccttcatcccagaactttgggaggctgaggcaggaggattgcttgagcctaggagttcaagaccagcctgggcaacatggtgcgaccatgtctcttaaaaaaaaaaaaaaaaaaaaaaaaaaaagccgggccgggtggtacggaagtattactttggacactctgtgaagctcgagcaagagagcaaggccagaaacagagaagccagtcaaaatacggaatactatagtattctggtctgggaataatggtagctcagaccagattgagaagagtagagcttttacttgattgatgcgcatatgactcattgaaggctacagatctagctgagcgtggtggctcacgcctgtaatcccagcactttgggaggccaaggagagcagatcacttgaggtcaggagttcaagaccagcctggccaacatggtgagaccccgtctcaactaaaaatacaaagattagtcgggcttggtggcgcacacctgtagtcccagctactccggaggctgaggtgggagaattgcttgaaccggacaggcagaggttgcagtgagcccagactgcaccactgcgctccagcctgggtgacagggtgagactctttctcaaaaataaataaataaaggctacagatctagtgaatggcagagccataagtttaacccatatctgtatagctccaaaatcctcatttttttaatgcttgcccatttcattcatatacaagtgagtctcatactgtgtgctaactgcttcagcatcatgtgctccttacaaagatcacctttaatatatgccaatttaattcacataagagccatttaacaagcagttgtccctctccctaaatcctggccagctagatgacaagctacattttaactgatctcaggcctgcaggcctaaacttcctaatccaatctccacatagtagccagagtaatctaaact

SEQ ID NO: 916719 - DNA, 4001 bp, Homo sapiens
ggtggggaagaggaagggcagggggcagacacggagccagccatgtgaggctcacagagagagggaaggccttgaaggaggccgatccaggaaaggaggcctcccaggtgggccacagggctgcaccgtgaccgaatccagctctaagtttcaatcagtgccttgaccaaaaatattgatgcagtttggaggcccgaatctcagagaggctgcaagctggcaggagcaaggttcccgatcatttcaataaccgatccatgaatgcagggatccacggcaagggcaagtcggcttggcccaggggtgcatgtgaaaaccccctagcgttattccgctgccctttactctaaggggatctggcattgagatgcggctgctgaaaggagccatggtgtcatgaggagcattcagagcccccagcccccagcccatgcctttgggagaccacaggaggagtcggggaggccacaggaaggaaatgcctggagtattactctgtgcccgggacagcgtgagacactttacacaggtgaacacttcacatcgtgctctcaatgatctctgtttgggccggagacctatttgaccccacaggacagacccatccccacggggcggctgggacaaggcatcaagtgtcttggcaagcattcatccccatcttcaccccagtgtcagctcctcactgtcctaacatgtgctggggtgaggggcagacggaggaaggcaggctcgattccagaggaagaagagctttctaacaacagagctggcctgcacgacatgctggccaccagcagtggcctccctgtctccagtgggacctgggttgcagcggccagggctcccggagtagggcgaggcagctttctgtggcttcctcggggttaggtggaaagggtggtaggttaggctctgagacaccaggtcccaggacagcagggaggagggacattgagagccccagctggtgcagggaggggaggggatggagggtaggcagcgccggctgccagtctccctgcctccctggctgttcagggtgggagccggctcatccctgcttgggaatggcgggggtgcggagccctcacctctcactagtgggatcggagcagttcagcgggtacttgaggtggatgatggtgccgtcgcggtcctgcaggacaccctgctgctgagtgtagtactccaccagctctgtcagagtcgcaaacttctcccctccatacaggtcatagaaatcccctgagttctggatccgaatatgggtcacctgatcccccaccctgcagggcaccaggcggtgaggccagtcggtgcaggagtagaggcaggagggcagggatcggctgaggtcctgggtgggggcacacatgggcatgggtgggcacagacagggatggggagtgtgggggttgggggcaagggaacagacggggagtcagcactgccacggggaaccaggaatgagtggttcagggcctggatggcacaagagagtggccaaaatgcccggggttgcggggggcccacctacctgacggagagcgagaagtcaccctggttcttgcgactgggccgagccaggaagctaccgtggacacctcggcccttgagcagggtctctgcatccagcccactgaggtctcggtgaaaccacctgggcggcccaggcagggcagtgaggaggggtcccgtgggcaccaggcacccttgcctcctgtctaccgtgggtggcaggcccttacctcaccatcctgggggcttccggagaggaagggggcgcagggaatgaggaggtgcagctagtctgggcaggcagagagctcagggactaagcctcagatgcagctcccagtgccgggccgcctcaccacccccggtggtcccagttctggggctgccactccactggcctggggcagccggcagggcggggacaggaagaggcgcggccgaccccttgggggaactcacttgtacttctcgttttagagcacagcaagggaagagaagcagagcagggtggcactgggggtggggacggggcccacttcccacacgtctgcaatcaaaggctcaggagcatggcattgcacatatgtgacaacacatgcagtaaggacacatgtgtgccttgcacactccaggcccagataatacttcacgcatgcgaacccagacggtcccacggcatctctccctcctccaccagctgcttttacgcagccctccctggcccacgctaataacaatgatggcggtgacaactgtcatcgagtgagtcctgctggatgccgggcgctgtgctataatggcgttcacatgccttgtctgattggtttctcaccacagccctatgaaacaggggctatctttatcattttacagacaaggaacctgaggctcagggagtttaaggcattgcctgagtccatcagtgagtcagctgcagtgccaggattcaaacccagacagtccggttccaaagccagtgctttgaactcctatacaccagccctcagggcttcaaagaacagagattaagagcctccttgtccaaaggggctgccatgggagcaggagactaatagttaagaccttgccaatgcttgcaagagagaagggtgccctcctctaaccaacatatgcagtttgtccatgccactgtggcagagggatggacaacatgaccctgagcagccctgtcaacatgggtcctttctaattcttgtccctaggcctctgccctgccccagcactcccaccagggggcctatctcctggggggctgggggacaaggtcctcaccatggctgattttctcagggctggttgatcttagaggccctaaacactaaggtatatgatgctgcctacctgtaattccaaatacaaacatcaacaccgccaaaccaaaacgaggaaaagcagctcaacaggggatacataagaaacacatattggtggcttcccctagggagggaaactgggtggctggaggacagggctgggggagacacttggttctctacatacctttttgaatgttatatgatgggcatgcattacctttataaaaataaatatgctaactgggaacaatttctgggaaacttttagggtacagggaaggctctttgtctctatctggatgctgtttgcatgggtgtgtataaacgtgaagttggccgggcgcagtggctcacgcctgtaatcccagcactttgggaggccaaggctggcggatcacgaggtcaggagatcgagaccagcctggccaacatagtgaaaccccaactctactaaaaatacaaagattagccgggtgtggtggcacatgcctgtaatcccagcttctcaggaggtggaggttgcagtgagccgagatcatgccaccgcactccagcctgggcaacagagtgaaactccgtctcaaaaaaaaaaaaattaaaaaccatacagatcaagatcaatggtgatacaagaagataggcagtctggaagcgcaaacaaggcaaaataatctgtagaaagttctggaactgctctgagcctcagaatccccgcctgacaaatgagcttaacaatatttcccaaatactgatgtgaaaagctggtaagtggcagggtttcagtgctgccagcttttacattatactattaatcctcaggccaaccctacttagtaggtgttattcacccaattttagaaacagaaactaagactcagagatgttaagtaattgcccaaggtcacaagctagtgagtaggaaggtgggtaaaacacggctgtcagacgccggagcctggtgccctttcccccaacaaccatactgcagcagacagcgtcgggggcagatgggatgggcactgccacagcccatgatggaaggtggaggaagaagtgctcccccagaggcaacatgggtcagggcaaagaggtggcacgcacagagtccacatgggcagtgcctggccgtgagcaagccatgtg

SEQ ID NO: 916720 - DNA, 4001 bp, Homo sapiens
ttttctttttctttcctttcttttctttctttccttccttccttttctttcttctttctcgctctttcctttttttccttctttctctttttctttcttccttcccttccttctttccttccctctcttttttttttttttttgacacagaatcttgctttatcacccaggctgaagtgcagtgtcacaatccaactcactgcagcgtcgacctccttggctcaggtgatcctcctgcctcagccttccaagtaactgagaccacaggtgcatgccactacatccagctatttattagtagtagtagtagtcgtagtcgtagtagagatgaggtctctccctatgttgcccagggtggtcttgaactcttgggctcaagtgatcctcccacctcagcctcccaaactgctaggactaccacatgcttgggccatcatacccagtatttttttttaatagagatggggtctctctatgttgcccaggctggttttaaactcctgagctcaagcaatcttcccccttcggcctcccaaagtgctgggatcacagacgtgcgccacctcatctcgtcaggttttcactttcaacatcctagctccaacatggtctaacctgctgtggccctgcctccgctccactagggtcctctgccacgggcacactgtcctttttttgtttgttcccacattagggctttgtgctcaccatctcctctgcccagagatgcttgactcttgatcactacgtcacatggccagctcctcttcctcctcatccgggtctcagctcaaatgtcacctcctcgggaaggcctccctgatccctccagctagtaatgtcacctgcacacccagtcacttgctagcatatgaagctggttcattttctttttttttttttttttttgagacaaggtctcactctgtcgcccaggctggtgtgcagtggtgcaatcatcgctgactgcagccttgacctcccaggctcaagcaagcctctcaccttagcctctccatagctggaaccacaggacgtgtgccaccacacccagctaatttcttattttttgtagagacagggtctcactatattggccaggctggtctcaaactcctgggctcaagcaatcctctcgcctcagcctcccacagtgctgggatcacaggtgtgaaccactacacccggccaaggctgtctattttctgcgtaatacttctgagaatctgcaatgatccaatttattgggttatttgttcggtctgtaacctcccactggaatgtaagctccgtgagagcagagaccatgtctgtcttgttcactccagtattaccagcatcttaaacagcacctggtgcataatagatgctcaacacgtacctgttgaatgaatgatgcaggggaaagggaagtgaaaggaaacaaagaagatgggaccaaagtctgatgttgggaagtgcggagaagttggctggacgtgggagggccttcgcgggtggcctctgactgctatgtttgaggtgttgtgagctacccagggggacaggtcctaagcaggaggcagaagcaggagcccagaggctggaagtagaaatgcaatggagagaacagatacacacttgtccaggggaaaatgttaaagagggggcagaggagcatgagtgagccgggggtcctcacaccttgcgggaaggggaagttcatagggaccggaaacaggcgcagggcagcggcagatcgcactcacgttcacacacgtcggagtgagcatcaacaaagccctccctccctccaaaactaacaggagactgggaccccgatggtgcccgggacttacccacgggacagcatctctctgtagggagggggaagccacggcagagggccgcagggggcggggctgagccagcggcacagctgtgcacagtggcccaagccaggtgaggaagaaccgctcagtaatcagccacttcctcctcgatcctgcctgccaggccaatggcactgcagggacaaaccctggactaatagtctccaggaaaaggacaggtggggcggggctggcccgagaccgcccacagcggccagcttccctgcagccccaaagcgggagtacagcaggcccgcctgctggtccagggccgccttcccccgggagaggaggagccacctggagctccacctggagctcaagctgacagagcggcggggtattgggtaggggaacagaccaggaagtaaccctggctgaggaagagcaaccaatgggggaaacctctccgtaggcggaaaccaaagggcctaaggaaaatccctaacagcccagttcctcagagaaggaggtaccccctgtgcaggcccacccacccagggcgctgagggacccactccagcctctcaacctgccccgggggaaggggaggagcctcaggtagggttaggccctggggcagggttaggcccagccaggaccatagggaggagctgttcagggggatggggcctggaaaggcagagggaatcagggaaggagagatgggggttgtcaggtccgcaagagactgacaccaaggctaagtcacaggcgcatttattattgtctggaacatcaaggcctttcctcccctggcagtggcacaagggagggccaactctcaggaggcggccacgctgccaccagcagcaggcccatggggtggcagggtcatgggcggcagaaacagcgccttcagcttgcctgacaggctggcgatctcaggatcctgggcttcgtaggacttgaccaagcgagcaaacttaaggacacctgcaagagggagtggaaggtcaacccttctcctaaggaccagcgtgcctaagacacctggagggggtggtagtctaagcatgaactgctcccccactggctgggcagctgtttgccaaacaggacgcatgcaggcctctgtcccgtgtggtttggatgatgacatttggtctacactgggcacaactagatgggatgcagtgaatgaaaatgtcccaaggcagtgtgcttcttgctctcaggtgaaccattttagcagtttagtcactggaaccccaagaatgaacacgagaccccaggtctgtagctggaactcaggaaggctatgaggcagcagagctgaatcagtcaacacctttggggaacaccaggatctcaccaaaaatttaaccaccaaccccccccaaacaaaaattagctgaaacaccctggagagactgcagccactgctgtcatgcagacatgtcactaaaaggtggcacaacagcatttaagtccagctctgctactcgagagtctgcaccattagagtttgcttcctcatcacaaaatggaataataatgtgattaacagtacaggttgaccatccttaattagaaaatccaaaatctgaaattatgagtgccagtgtgaggccgaaaatggaaaattccacacctgacttcatagtggggggtgggggagactgtagtcaaaacgcagtcaaaactttgtctcatgcacaaaattattcagactattatataaaattaccctcaggctatgtgcataaggtgcgtgtatatgaaacaaaacaatttcgtgttcagatttaggtcccatcccccaagatatccatgtatatgtaaatattccgaaatctgaaaaaacccgaaacacttccggtcccaaccatttcgggtaagggatacagaacctctactgtacaaaacgcaactcggacgcacaagctcagggtagaccctgggctctgagtgccaagaatgttagtcagattgtggctgccgccgtgtggcgagaaaggggacaaccgctcatgggcccacagatccggcgccctctcccgacccaactcccgccttcccgcgtctgacccgccttcccgcgtctgacccaccttccccgtcgcagctgaagccataggctttgataacctcctgctggatctgcgtggccacgggcagcacgaattg

SEQ ID NO: 916721 - DNA, 4001 bp, Homo sapiens
gaagaaaaagcaatagaaaaagttgggcttattttaatgagggtcatgaagttttccatcattgggcacgtcaccatccacctccattagcttatgaatcttccataggaaatatgttggggcatgtggacttcccttaaatgtaaaacaaacaaacaaacaaacaaacaaaacccccaagatatttagtagaaagactttcaggatttgctctgaaaggaatagctcacctttttgtaaacagaggctttcattgaccagttttccctccttgttgacatctattttcatccagctatggaggtatttcctggccttcttgaccactactctggagccttgtttctggagaaagagagaggcattttccacctcaaggaagccttcctgatcatagcaggtccatcggggtgcctgggaacagcggtccaagatggctgagcgggaggggccgcgggaagagttggagatggccaagcacagtgcagatttaacatgaaggagcttttcatcctcagtccacatccactgctggttctggatggtcctgttgcatgagcccacgaccactttctcatttttgaaaagacactgttgtttctggacatggacaatctgaaacccttctggaagatgaaaagctcataaagcactatgtagcaaattatgaggcccattagaaaacggaagaacccacccacaaatgagctaaataaaatcactagttttacttatattttgttatttctatcatttcaagtgaacattctcatatttaacacatgtgatttaaaattccaaagctgacgatataaaatgtcaatatgttacacttaactccccatcttttttttttttttaattttcacatgctttaggggaaaaaagcacacctcttattggaaaatgaaaggaagcttggaaagaaacaaaaccatccaaagtatatagtatattttagcccaattagttagatatgctgaagttatgaaatgctcagctccctttttaaccatttgacatattcgatataagcttcctcccttaccttaaaaaagcacccccttttccagtctttaaattcacattgcagtatttatatacaaatttcatagtttgaataacaattttttaaaattgcatacatttatcaaaaaataaaacaaattttcccacttctccaagcacaacctcctagctaattgcagccaatgaaagtattgattatcacaaactaaatttcctttagtcgtggagaggagcatttctctattttatgacaatatctacagttttctctcaaatacgaatagattttctaaaaatcatcatgtgccagtgtaagaaaattaaacatcaaattgctaaacatcagtattaaagagcaagatactctggctcagaaaccattttcaatgaggttttacttaaattgcccagctcgctcatgaaaatgttcagccctcccaaatgacaacttccaaataaaacacactacatttcctcaccccctttaatcatattccttcaattttctttcttcaacacaaaagaaaataaaactataaccgggtcggaaaaaggcttggggaaagccacagactgttatataataatacaaacttttcctcggggttctttacgctctgctctaaatgtatcatttcaggggctgcctgaagcatttggaggatgagaggagagcatttattttcttttggagagaaatctcaacagtatgggcatagctggctccttttattcctgcttttcatcgtctttggctaaactgccatggagacctggccccttctaccttatttcagacacttcaaagaccagggactccttggctagatcttgaagaaatgcctcaggacactgaggcagacccactcacctgagttcctgaagatcaagcaggtaagaatcaccatgtaaaattcagcctccattttccacttagcaactgttcatgcttcgcttggggaaaaaaaaaattctcccagataagagaagcaaagactaggaaggaaatgtgccttcatggtggggggaaaagtcagtgacgagcacttcctcctattgaattgtttggggaagttttacaccagtgtccttttgtctgtttccttagaaagaagggattatgattacctcttttttttaatgtagaaaatattccagccttcaagagcagagtaaatctcgttaagacctcacctacctttcctttggcatgtgactgcttcttaacctcaagaagaaagaaaggaattgaaatctcagataattgaatgttcctgaaacattacatctcttcaggtgatgtgattctgctgaataaacataagccatgtaattgatgagggtctatgacaagtgatataaagacataaacatgtactgtttgtataatgatatgctgcgagtctattgaggaaaaccacataatgatggcacttctagatcattatctcccaagtgatgacaatattacattttgagatcgtcatcttcactggggagatgcagacactaaaattaaacccatcacattatctactttggtcttccccaaacagaggatggcgtctttccaaatagaaaaaaaaaaaagaatatgctttactcagtatttagtattaagagtttattggcagtatgaaacaaagtcaacattgctgcattaaaaattcatatatgagcagaacagctagtgtttgctgagggtagttattttaattttttttgtctcttgaagattgaaagctttcagaaatgtaaggacatacatggaaatgtccttataaggagcctcgaaaatgggacagattatatcattcctgaaggcatataccttttgttgagagagagattccaggtagatagcatattcaaaaatcccttcttagcaaaagagagacaagtagttaaaactcttgatacttcagagttgctacaaatttgtttttcccttttaaagtaaaatgactcacgatgtggaaatacagtggatagagttctggagcagaagccacctttatgcccaataatagagagtaaatacatatatacccaatgacaatcattgtgctctgtaattgtttgataggagggactataaatacacatttaataggtaatattatcaagacacatttccatataaaatagttactgtttttgatttttgtttttcaaaaacaaagacttctctgttaaaaatccattatcaatcacttgcaactttagcagcaagattctggtaactgagaaaggtaatagcacttcaaaacaggaacagtttaacagctgacagtccattcacaagacagattttgcaaacattaaagcatctaacacataatacgaatgtcttcagcagctcatccagtcatcacctgatgacatttattactgaatattacatacatacattctgtgtggcagatagagtcagtacagacaaaacaaaatctgccttaggctgtgtgataaacctatcatacctccatcatcaaaaaaccttcagaataatttgggggatgcttacaaatgcattcatatacacaaggagctggaaatcttaaatatgttgcccagtcttccacaatccatgccatacatgggcttcagagcttctccttccttccattgcaggaagctccttctagaagccttgggtgggtaatttgattaatcaccccaagagattgatggtctgacaagtcttcaatgactcactggacagtctctgctgaaagtctgctctcatacaggcacagagcatggtgcacaaattcatactgctcactggtttgcaccattccacctctgcaaggaagaaatcataaaataactgattttgctaaaatcttgcaatttcaagtaacacagagatttcatccaagctagggtattatgccaaagacacatagaacagtcgacctagtggttcttttgttatccctcttacctgtgtccaaatgtctcaacta

SEQ ID NO: 916722 - DNA, 4001 bp, Homo sapiens
ccagtcagagaaaccaccagattcttaacaagcgatttctcttttcaacttaagatgctgcaaatctcagatatcatctaaaagtttcatctgaagtaagttaagtgatgtaattgggcattttgatttttttctttgaaaaaaaaagataatatctagttgacttactacatgagcccagttaaattctctgaaactgctgcacctgcctttagagctgaaagttctcacacctctttgaagaactgtagcaaaagaaatgatcctgtttcaggttgaaatgtgaaagaatactaagggcaacacatttctaaatttgacttttaaaattttaacataaatttgaatctctggatgaaggtaaggatacactgttgcaacaaatagagataatgaagactaatgaagtcagaaaacctgaaaattgttaaagaatttagagcatgtctgagggtagctctgaggattaaatgaggtaatgtacatgacagcccatacctaagtgttgagcacttggtaagaacttggacttgaatgacctaagtctaacactcccattttacagataagaaaactgaggcaagaaaggcaaactctgaacatatccacatggagggattcagcaaaagtgtaaggaaaataattgctgtaaagtaatcaaaggacgttctctgatactatgctgtttgggttattactcaagagatacaaaacaattttcatgtcctcatttcaagagacttttctaattttccctgatgaatggctccattctattcctgcagattttatgtacagttctaaaaataaaactaagttgaggaaaggcatacccctaatattgtacttctattatttattctaaaaacgtttacttaaaattattccagggtttgacaatttaatgcaatggaagcgtaaaccacatcactttaaaaaattcccaccgcagcccaaagtttctctttgctgaccgccctgcaccccaccccgaccctttcagtagctagttggctgttttcagcactaagggagtctctgaaagtccaccaagctgcttctggctagatccgaggaaaccagacatttctgtcaatatttatcttcacaggtatttttaccttcattttttgtatccctggaactcaaatgaaacaccagcttgaaaaggcagggcccaaccccgtgtggcttggccatccaattgcacctgtcatcctttacctgtttgcaagaccactgttctctcttcatccagagaaataatcctgaagttatagatggttcctgcttgtaaatcttgaaggttacatccgtatgtggtgttgtctatccgaaaggtagggcacaacgcggcccccagggtgtcactgctatagatgaggctaaagttacagggtgagcccaaaattctccactggatagacacagaatggctggaggccttggactccgccagggtgaagttacatctctctggctccgccagtccagtctgcaaaggaatcagacacaacagtttaagtccacagtctggactgctcagggacatgtccacagcaagctcctcaagccacactttctcctctacttatcctttgtcccttgcctcagccagtccttttgccctctggccagagaagaggcttgcaggggaggtggatggcaactttctccctagctgctgtcccttgagagcagctggagagagaaggtggctttttgctttgacagctggataagctgtcattctgggttggggggctcaccagaggatcattcttcccaaggcagaagaagaaattttgccacctccctcttcaaagcacaacccgatagacgagaaagtggagtgggaatttggttttcggcggggagggggcgcatcagctctgaccccttctcgggccactcacctgcagcaggctcagtgtgatccacaaggccaacccggctccatggctcagcattgcgctcagtagttaagatccagaggagaccgagggggctggacgtgggacggcccgagggccggggcagggggtcacctgttgcgcgcgctcagcgcgccccgtgggcgcagcgcgcttccctcggggctggcgacgcgcaggggccactgcggccaccgctgctgctgctgctcctgccgccccgggcgggctgcggacgcgagaggcggcggggacaggcagcgcgccgcccttcccacgctgccattctgacccgcgctgcctcgccccagccccgtccgctgacttccgcaatcaaaaggcaatttcctcgtctcccggcaaaggaacaatgcgccggcgagggagggagccccgaggagccaacgcctgagcctgccaaggggcccgatgtgggccaagctgcccccgctgccccgcgccgataccttcccggccaggggtccggtccggctccgcggggctctgcctcctcctcctcccgtactctcccttttccccagtctgtggttctcgacccagtcgccttagccacaattagtgcttgctccctgtcactttccaggcccccacccccgcccctttcctccctccacacccagcgtctccccctccctatcttccttcctatcttcctcatctgctttctccaggaccactttttcccaggattaaacttgaccgcagcatatttccccaggtcgcctgcactctttcctgaagtcttttattagagagcttttgcccttctcacttcaaagcattcatttgtcccggtggcatcccctgacactagcaagagaaaaagaccccaaaaggattgtcagcttgaccattcttttctcccaatcactttcccttttctcttgtataggtttgtatcctccctaaatcttatgtaaatagcgctaacgacaaatataatcactaccaagtgttcaacccacagctaacagttttatcatccagtagttaaagccatttcatccctaattgtccagccaaaagaagacagccatgtaaactctcatttgtggaaactactgttgatagtcagctctccacaagttaaaaaaaaaatggcatttattcagcgttcagccctaactgtatgccctttagcaactgcttcagtacccaaacggttatttatctgaaaactgattttagaaaagctcccaataactaaagagcaaaaatatttaattgtacacaagtgagaaaagcaaaatattgcaacaagttttataattttttattgcttttttggagcaccatccctaacaactgccaaaagaaatgaaattccacattctaattttcaaatcagcgggaaggatggcatattcctttctttttcaaataggctatacataaagctatgttattgtctactatatctactgtgtctactttgaggaaagttaaaacaagaaaaaagaaaaaagtgaaaattgtttcaattctatttatttatttatttatttttgagtcagagtctcactctgtcacccaggttggagtacagtggtgcgatttcagctcactgcaacctctgcctcccgggttcaagcaattcttaagcctcagccttccgtgtagctgggattacaggcgtgtgccactacacccagctaattttttttgtgtgtgtgtatttttaatagagacagggtttcaccacgttgaccaggctggccttgaactcctgacctcaagtgatcgacccgccttggcctcccaaagtgctgggattacaggcgtgtgccaccgtgcctggcctgcttcaattcttttagaaaacatgcttttaaaaatacctcttaatgaaaaaacgaagtttcttcccctcgagagattctacagacttttaatctacagccagaccagagatttcaaatcctttcaagttaacaaacactcaaagaaggtcaaacctagaacatctgtgtatttctgggaacaaaaaaactccctatttctctgcctaggtcacctgaagagtaaagaacttttactctgtatttt

SEQ ID NO: 916723 - DNA, 4001 bp, Homo sapiens
ttagctgttgctcgtaaaatgcatagtgacttggtttctaatttttggttcatgacaattattgcataggtaaaatagttgtgacagtttgataaatagttagaaaacgactaatagacaacctaataagtctaatgcatttatgatgtgtatgaaagaacaacctcctacagtaaaaacatataactgagcttattatttaccatactttaaaattaatgattattgataatttaagaaaaaatgttaaaacatattaaatatattttaaggtcttacttaggcattctgttgctgtttctccctgaattttttttatatttttcattaagataaatgaaaatatggagtatttaaaagtaatgctgttcttaatccattggtcctgttccattatattctttttaggcattcataattaatggtgcatataagcaagaagtgactctataataagaaaacctttggatccattaacctggcatccatttctagggaaggtatcactgtggtcctgaaaggatagctccaagtcacctgtcgacattcttgagtttgctttgcggagagaggaaaagactaacaacagaactaaagtagatccactgaagacatgagtgatagacaatcacttcagaacttcacatcgccgtccaagaaaacatctagctgacatttcttcaaaaaaatttatgtacagtatagttgtcaaactgatttttcaaaagcaactcctttgcttttcatttttctcaaagtaaaacctcagggtagcacattccaaagaagatacgaaaaagtttattattatatatttttccaccattaaatctaggggtaatatcatctgtaaatatagtggagaaagtctggagactttttaaaaggaattgtaaagatgttgataggagttggggagaggaatccttaccaagctctctacctgacactccttattcaaagaaaattctgccctaacgtagccctggcagtccatttgtgtccagggagctcagtccccctccactctccagtgtataattccagcagtaaggaaaattaagacaaagcattctgtgcgagggagggcggaaaggttaagcagcgttggggtgcagtggaaaccagaaaagaaagtgacctcattttgcctgagaaagcacgatccaacaagcccacctttgatgtggatttcagcagcgataaaagagcacaaagggcgaaagccggagggagcaaacttcccttattcttccccccgccccctacctctcaagaccaccaggaacacgcacacgcgaggacaacaaagcgtgcgcccaggctgcacggcaggcgcttcccgcggctgggccatcgtgccctggggcgcgccgctcccaacggcagagcgagggcgccggagcgcggctgccgcccggaccgctgggaaaaaggggtggaggagctcccctaccttgaacagcacaaagagccagagcagaggcaggaggcggcgggcgccgtgtatccccgtgggcaggtgccccatcgctgcgcggacggggactcgggggcacggctgcgctagcggactcccccggcggcggctcacaatggcgaactggggctgcagcctcagaccctgggcgccgaggttgctcctggcgagcgcatgctgcctttccagtccccctgcgcctgctccctttcctcctctgcgcccggggtcctccaagaacgtgccaggcgctgctgttctttaatgactaaggatggagagggtggggattggagtgggcgaggctctgccgccgccaccaccgcggctgccagaggaggcgcggggtctgtgtggtgagcgagaggcggggaccccgcgcccagcccgccgtagtcctctggcagcagggacactctcactctggctgccgacccataaaatgacagcagcctcccaaccctccaccaggatcggcccgctgcttgctactgctggacagcccccattgcagactccgcctcaacccctccctcaatctctgggtctcaggagttctgaggggtttccctgacctctcttgagcaatccaggcgccagatcccagttccctctcaatcttcctacatctgtactcaattgcagttataaaggatcaataacagttgggtagttgtgactgtagaaatagtgtgtagtgtgagtgtgtgagtgtgtgtgataggaagggtattttctctccttccccactgcttccattatctccatcccatttcaacactctcaccgtctccgtcccacactcacccaggaacaaatagcacaattatgcaccttttccatttgaaatccgcagttcttgtacatttcagattctcttttgataccaaagtgtgtcgggtcacctgaagctgaatatagaagggggaaaaatcacagtattttacatgtatgacccttgaacaacacgggtttgaactgttgggtccagttatatgcagattttcttccacctttgccagccttgagacagcaagaccaaaccctcttcctcctcctctgcctgctcagcctgaaaaggatgacgttaaagacttttatgataattcacttccactcaatgaatataaatgtattttctcctctttatggttttcttaataatattttctgttctctagcgtactttattgtaagaatacagtatacaatacatacaacacaaaatgtgtgttaatcaactgtttattatgttatcagtaaggtttccggtcaagagtaggctattagtagttaaggttttgatgagttcaaagttatatgtggattttcaactacgtgattctctgtgttgtccaagtgtcaacggtatgtacagttatatttttaaacaattatctgtgaataattttactgggatgttttagaatcacaagcaacgactttcaagctgtgggtccccaatctactacttgtctccttttttgttatgtgtatttttttaaagataagtctgtcgaaatcaactctggtatgcactgttcagatagaaatcatttcttattgtcatgtaaattacccttgctgtgccctgtcagtattggaacttatttatacctgagacatgcttgggcaacaggagacaggaaaggccaccctggtcatgaatgtaggtgttcaggcatagactttgtcagtcacacagctagggagtggtggcctgagaaaaggatccagagctgtgtttactcagcttttgctgcatgagcaatggccaaacactaatcatttggttgttgtttgtatgtgtcttaaggaagctttagattgaatatgtttacataagtgtgaatatgtatatatacacatgtgtacatgtacacatatgtgtacatgtacatatgtgtacacacatgtgtgtgcatgtacatatgtgtacacatatgtgtgtgcatgtacatatgtgtgtacacatatgtgtatgtgtgtacatagatacatatgtgtatgcatacgtatatgtatatgtacgcatatgtatatgcatggtacatatatgtatatatgtaccaaatttcatatgcatgaaatatgtaccaaaattcatatgcatgaaaatatagaatgatggtctgaatttttgtgagaatattatccttggtgtcttcttttagaagcttcttttgttttcacattcccatcacatgctctcttcaggtccctcatgtccactcatcattggtttggacattttctttcttttgagaaaatgttaactgctcctccctccctctgggttagacttacgggctatctgaacatttaatccttgggattgcacttataggaactttggtttaatatgttttctttttattttgacgctcctgaagcagcattttattcccactcgccctcagaagtggctgtaaagtgatctaatctctagaacataagatatatataggccaagggcaacaatcacactcacaggatgccaacaatttctctttggagtagc

SEQ ID NO: 916724 - DNA, 4001 bp, Homo sapiens
aagttactcacctttggcatcaatgcgtgacaatgcctgcctccctacattctttccagtaccatacatttgcaaactctgagctttcccattattactagtgaaaattgtatattgtagttttattttgcattttttttttaccgtaagtgaggttgctgaagttttcatctgttcaagagatttctgtatttttctatgaaatatttgttttgggttgttgacctttaccttttttgacttgtagcaattctttatatattaaggacactacacctttgtctgcattcttagcttttatataacatccactaaaacatggcaactatccgcactaagaaacatttagtattaacttattcttgagtcaaagaagttgctaacttggtggacccatggccagactagtgacaagtactactgtacaacagcaaaagatgagccagcatttttttcaaaacaagattttgaaacacccttgcataaagaaatgagagccatcagcattttcttccacttccttctctttcactattctataaaagaattattctaaggaaagacttttgctaacaggactcagttgtagtaagtagctaactaaccattgttttcttaaaggaaggcatcactgtagttatagagaagaaaatccattattggcagagcagttattttccaaaaggattcttagaatagagaaaattcagctgttcagtacaaatcaacaagagatacattcatagaagggaatctcaaaaggagaaaggaatcaaagcaaattatcttagcattcaatatgaaaagatttgcactcccagcattccttttttcttctcaatctcatgaacttcattatttaaaaaagatcaattacttatgttcgcagtattagtctacacactatattatgtaaaatccctaacaaatctgtccttttcctttcacttctggctgtgaaatattttttccttgtggcgttgccactcatagaactgcaggttcatctctttcctttcattcattctgacctggtgaataactctgtttatcgtatctgccatttgtaattctagagctttagcaataaccttctctcagtcttcattttgcaataagactgtcccccttacaaactagatatgcacgtttcttttaaattctcttggtcgaatggacctgtcttgtggtacttatattttactttacttttttctatacttatgcaatgtctacaccatataaaaatgttttgaaggcaaatattgattctatcatgtgtgttctattcagtgcctttatatacttggcaaatggttcatatttgttaaattatattttatattgtagggtctttcttcccttgatcaattcaatggcctactacctttattcctttgtctgacctggagtgacttatgaattaggaacaagtgatacagacaaagataaaagttctcataacaacttttgggcttggtctaagcctgctgttaatttctatcagtgaaacacaaaagagcaaataaacagttttcattttatatagctcaaagaaatagaagattcttattttgcccagataattagccttacttaagttaactgagaaaaggtagatcaaaaggtacagtacctgaagtttggttttctgactggagccaacttgttgacagaaaacttcaaagaaatcagctactccctcttccacccacagcaaagtcactgaagtctgggttttgttcactgcgaagagtgatttgggtggagctggttctgagcaaagacaaagttttaaaaaaaatttaatttactaagtgtattctttcttctttcactaataagcaggtgaagcatcccccaattcaaatataggtaggtaagagcaccataaagactttatattgcctttgaaatatgtcctttcataaagatagctatctaacttggaaggcagaatactttgccttttcccccttccatttttttacttctcttttcagaacacttctgttttctacttcagtttcatcatagtcataatctattaatagtttctgtgtcatttatactgaagttagcattgccctgataatacagaacttcctggatgagaaacaaaaatctgcacttaataaaggtggagaaaaatgaaatttggtgtgcttccttctaatgatgagatgcagtttggtatttagccaacaacctgtcttcctttctctggaaactatctggaacaattcagacagaaaaatggctgcttgaaaatttagtcaaaatttaaaaagataaagctaaacagatagtatcatttttttttttttttgaggcgggggtctcactctgtcacccaggctggagtgcagtagtgcgaacacagctcactgaagcctcatcttccctggctcaagtgatcctcctgcctcgactcccaagtaactgggactacctggcttatttttgcattttttgcagagatggagttttgccatgttgctcaagttggtctcaaactcctgggctccagcaatccacccactttggcctcccaaagtattgggattacaggtgtgagccaccgtgcctggctgataatataattttttaagaaaagaattgataggaggggattggaagattaataaaacattagataaattttttatcttagacattttatcttaataataaataaatccattcgtaaaggaagctgtgttgtctgtccttttcatacttatttctagtaattgagtcactggcattgctctcttgagaccaaaaaaccctgcctgttcctcaattctaatagtcatctgctgtctcattctccattcctgaatgtctcctggtcttctgcttgtgaccctgtcttttggatgttgtctttccctctaggtcccccagtatgcagagtgctgtgcctgaactcaaggttttaagctggggtccctgttacctgctctcagaccccctgacattgcttatttggacatattgtaccttgctgctaggttcacataacagcatcctccatccacctatatgcgcctgtcagacgactacccactgttgtaggtttcttcctgcttgttacttggatttttcattttctgccccactctcctaagtctgttctccagctcctgtcctttagaggtgcttgaaaaagtcctgtcagccatttcactgctttgacaggtacacatctttgtgtggaaagatttgaaccttgtttctagaatatcatcattgtgactctgcccaggaccaagaagtatgtcaaaatcattcttgccatgatttatcacagatctcctaaacttgtgtccaactaaaaagaagcatgtttctttcctgcagcaacttgacaaggttaggcagaagagttgaaggaggaaagagatgagttcttcttaggcaagcaaaattcacaataggtgtcaggagccctttttcacttgcaatgaattgtccagtcctccaggcattgtattgtcccacttctgctctgaggaagactgctaatgaaacacagaggtcaatttccacttctcacttcctttataactgcctttgctaataggattatgtcctttagggattctgactcatgtggaacttgaatctatagaaccaagtgtgaagttgtttgggggcatagatgaatgattagttaggctgagcctaggcttttcttttttaaaaatgcacactacagaattgttcctcagtcacaattctgaggctcttcccttatttctcagtcccagagagcatatcttttaaaaactcgttaccttttcctttaatctttttttttttttttttttttgagatggagtctcgctctgtcaccaggctggagtgcagtggtggtgcaatctcggctcactgcaacctctgcctcccgggttcaaaaaattctcctgcctcagcctcctgagtagctgagactacaggcgcatgccaccatgcccagctaatttttttgtatt

SEQ ID NO: 916725 - DNA, 4001 bp, Homo sapiens
actaagtatacttttattattttactgttatggaaagaagtttacaaaatccagtcctgcagctattaatccttcaacgaagactttctttccagtctaaagcaccaaaaaaaaaaaaaacttgagctcccatatgcaattattatacaattttcatacgtaaattgtataacagatttattgccctttttactgtggtttctaggaatttggagaataaagtttgcaagtcaatttttaataactgtgtaacatcctgtggtttacatacctgcattcaaactaccctggcctcttgtttgcatttaagttttccttctttaactttacataatttttatttcctagagtattgtattatattcatacatgtatataaatatatgcaaaaatattcatagaaaaaatgaaataggtaatatataaatatgcataaaattgaaatgaaaagacacaataacattttaccaagttttaaaatctcaggtgggtgtgaggccatgactgtgaacgttgtcagtcactgactgtattcagctgtaaaggcttgacaaggtgagaaaaacctcccacacttttaaaatgaatgaaatgtttgaacactaagtagtcatacacaaaataattaccttaatttcatatgttgttccaggattaagattagtaagaagaacttccagactgtctggctttgatctgacttgtgtatatactgtttgcatccacggacaaacttccttatatttgacaatgtaagatataatccttccatttggattaggtggtgtattccaagacagaagaatcccagcagatccgactctttccccggctaggaagactggaggccctggttctatttttaaaaaatccattttgttaaaaggtcaaataattattgcattttcacaaaaatacataataacagtatttataaatgtaaaatttgaaatttccaaagagcaatatgagttcacactccctacagctctgttactattaaaaaaatactatgtggaataccaaaagcattcctttataagaatgtgaaaaatggaatgctactaaataaatactacatgccgaatatacttttgttgccaaatcatttttaaaagaaattcacttacgcaaggcttacacagaaaaactaagaaaacaagaaataatcttacaaatggaataatccttcctgagcaaatgtagccagttcattttcatggttctgtattatttaaatgttagcattaacagtctctctgatctatttcacaaacaagtatagagtaattatctttgcactttgaaagtaaaggaagctgaagaaacagcagaatgcaggttctaagcagatcactttcttgtttccattttgccttattctacactgttttcatgaatttaatgtacatgttgccagtataagtatttccatccagtagaattatactgactccaaatactttacttacaaagtaatttaaaacatatactcacttgttacatttgttgtcactattctagtaacaggtgaggtgtatgttgtagaaattgaagagatggttatatcgtacctagtaccaggaacgacattggaaacatcaacctagaacaccacaaacaaatagttgcattaaaattctttctggaaagcaagcaagctaaaataaatctatcactataacaaaaattaactcttcactatataactctgcactgtttataacatcacaataagttccatattattgtaagatacaaatatgttatataactttttaccaaatgactttaaaataaaaacttacaaaacgtactgcgttatcacagcctaagtcagcatttctatctatcctagttcactgtcacaaggaacaactattcaagtcttgagaaatctacagcccatgacttagcccttgtttttaaagagtgtatacgaaatacctgtgtctctgaagtcccaataaaaagtaaaagaaaaatgataagaaaatccatctttattacatttttcagccagtagaatcacattgatggctctagagagaaatgttgcctgcattaatgatttaaagacagatccttctggcaagtacacaattaatgagcccatattactcaatagctctgccttttctttgttaaactattcatgaacccttggatgactggctgtaggttcagggtgaacttaaaaaaaaaaaaaaaaaaaaaaagcagcatagatgttgctaaggtaacagtccaccaatgctgaaacttaacactcatcagtttgacatcaacgtttttgtcttcaacttatgctttcaaaaacccaacaaggagtaagtttttgtggtagatgggtttcataaaataaagaactttcctattaggagcaaaatataaatacaagtaggctcggcaagtacaataatgaaaactatacctgatattctccacctccaagatctctgatagtaacaaagccactgtcaggaacaagatccacttgatacctttccacatgaccagagggtaggctccagtgcagagaaaaggaatgtgtggaaatattgaaggctctaagtttctcaggttgttctggttctgatattgaaaaatagaggtttaaaataaagttattctcctaaagtttcaaaaaaatgaaaacaaatagtataggttcaagttccaaaataatcatgttgttagaaatcactgagtacaataaatgatctctaagtatacttgggtgttaaacatgtaaatatttaacaacacctaggttttaggtataactatcataaataatataacaattaattttctgtttctgaaatatgtcttatttgctaaaagtctgctagttgaccagattgtttttgaaagcttatgctctaattgaaaatttgagtcattttaaaacaaagtaaatataaactatttatccaattacttggaaatttaccaaacagaagataattggaaaaatatataatcaaaatcttccagattttttgaagggtgagcatttctgataaatatttgttattttatcttttttaatttttaatgtctttttccctttactgtggtgctgatctgataaatattttgttaggtgtttctttaaaagaaaagataaggtttcatatcagaaatgaaatatagttttaaaacaagtaccaattgttttagccatttcaaccatatttttctacctttgcttccactttttcaaaaattttgttcatgctgcctgtacctcctcgaagggagttttccacataaagttcttctgattggttgccaatgagtcaggtttgcactctgccttatctttagtgcagattccaggcaaacaatatagggggaggaagagagattatgaagccaagcatgtgaaaacacgcctgatgcagattcaatctaacactgtttctaaaagaaaggaggctggaattaattttgaacctcatttatcattttaaaaccccactaccagaaacgatttgaaaatggatataataaaatgtacattttctaacaaaactaacagggcacattgcatataacaaaaatattaacataataggtcactttcttggtgtttcagggaagagcgtttctgaaatagtttttctttatcgcctttgaaatttcttctaatgattataacataacgttgtcctccatacccaaagcttatatcaattgattaatgtccaccccaacattctcaaagttccaagcattctcttggcatccaccgctaattgtccactatagttttctggtaactctaggaatactgtaaacccaaggcaaaaaatcagagaaatacccagcctgtgttgggtagaatttcattgttagctgctggcattttttacaaggtaagccagacctatgccctctgtattctcaagcttgagagaaaaaaagcttgaatctcctatctgctacattaaaatacacaaaaatctaccatgactgatccgtctaaccaacta

SEQ ID NO: 916726 - DNA, 4001 bp, Homo sapiens
gcagagtgtggaataagttttagctagtgtttttgtggttctttcaactgaagaaggatatggaaaaataacaataagcatataattttccacaatgtgttattttagtgattagcaccttgagaactgtctcatttctagaaaagaaagattctgagtgatgttgtctgcagcataactttgatgcacaacatgactctgcctatttcatcctgttattacttctcaattaccacaataagagtcttctttttcttttaggaagattgaggtcctggtatttattaggactgcactatgtctgatctaattattaactgttagaagtatatatattgatcagaaaaacaagggaaactatttatagcttattcctttttgtgacagccaaatatagacatggctaatttgatacaacacaatccagcatcaattatcaactgagtaattcgcaatagcaatttttaaaattaacttgaagagtatgaatgctgtagggcaaggtattttagtgtacaaggctaagaagccacatcttctttaaagcttaatttcttttaaatgaaagatttaaacaggttagtcctcctcatattaaaagctatataagcaataaacattacaagaaaatcactaaaaaaactttcctttccctttagtctaaaatcttgctgctgagccctaaatcctgctggaaattcttgccaagccatcatttggcattattacctgctcatgtctcacaccagagttgcacttaaaaaaataacatcaaatctggcagccctatattttgtgggaaacagagcttgacttcttgaatcaaataatttatttgggccatcttgatgactgttttctgcaatattgaatcagacagaaagttaatccaattttattattaagatggatgtaaacaccagatgcattattttttgacattgttattcatcatcaaggaccacagataaaattaaaattatctatgactttgtaccaacactagaaccattatattgtttttaaatattgaaactaaattcttatttttaatctttgttgtccagaacttcgtacaatgcctagaacacagtggaaactaaatacatactttttgaaataaagttaagtggaataaacattgggcgaggtttttcacctcaggatagcactttctatacagattaataaatttatacatcattttaaataagagccatatttaagccaacattaaagagtaaggttcttggtttactgataaaaaacaacaaagctgagttccccagctgggaatttagctgatgatgtctcatagcactgactttcactcactggaccctacatgcaattataacagaagatactgactagtcttttagtgaagtctgcacacaaacacagggtatccgagatgtcattattataaaaatgtctagatttagtgaattaacccactgtaaccctctctcaattttcgtttctagttgtagtcatcttttccctgatgtcagtgtgggaaccacactaaacaaaacaaagaaaatatctgctccactcaatgtcttttaagaacttttgagttctgttcaagtgaacatatttataattctactctccttaggatgattatgaactttacaagaaactccttatgattatggtagatatttactgttaagatattttgaatgactgcatagcattttcttttaatttcagacttttaggctaaagatatttccctagatatcacataagttctatgctgactcatttttctacatttacatgaacagatatagacataaatcttaatatttaccctcctaagctcttaacattacaccgaggaccctctgcctatcatgagagattatctcacctgtttggaaattgactgcatgttgtgatgaagtcgacttccatttgcactcttctttgtgttatttccttaccatagcaagcaggactaatcgtaaagctttctaagcttgtgtgctgagatgaagcctcatttagtcacctggaggtaaccgcctggtactgtttctagagacactgcggatcccaggtctactgcagcagcctgtgctttcccaagagatatcccaggtgcttgctgtttcaacagtttactagaattgaaattcatggggattttttttttccatgggaattagcaaaactgtaagatgagaactttatgggctgtggacaaggtgtgttgcatgaggaatgtttttatcttcctgaccaacatggcacatgtatacatatgtaacaaacctgcatgttgtgcacatgtaccctaaaacttaaagtataataataataaaataaaataaaaatattaaatactcataagctagtttcataataaacataaatttcttttcaaagttccactatttccaccaaaattttcttacttggtgctagggtctttatagatatcttattttagcagtcagcatgacttagaaacaagggttattattaatttttatattgattggcaaattaaagtgactcaatcagaggcaaagtaactaatctgggattcaaatattagctggtctgattccaaaactgatgactttttttttcttaccataccatatgcataccattatgattgaaccctgagggatttcagataactgttgtaattattattattagagaaatattttgtctaaaaatagatggcaacaaaaaaattaagacattatctctgtcttttagaagctaatagtctgatagaaaaagggtagttgaaacactaggaattccatgaattatggactcaagttatatggcataactctaggaaggttacaataaaacaatcatttatacattactggccacatggaattgattttaaggcaatagggcagtgttaagggtattaaaaatgttcataatctttaatccagtaattccccatctgcaaatttatcttaagaaaatgatctcaacgaataaaaaataagtaggcacaaatattttctttgcaacataatagtaaaaaatcagaagcaacttaaatgaacatcaacagtaaaaaggataatgttacatcaacaggagataattgttgtctaattctccctctcattcctgcatcattagttcaccctttctactagatttttctaatttatattcaaatgtgttataatatttctcatattaaaacaaaagctgaacaaatccaaatatcctgttattcagctaccattcctttttttaatctcctttataaacaaaggtctcaaaagagttgcccatatttattgtttctaataacgctttccacctcccattctccctgtatcagctcctgttaaactaaaccaggattgctacatccaatgttcaatccttaatattcctcctgttgatcttccttcttaacacaaatgattccttcctctgccctgataccctttcctgcctaggcttccagggtgccacactttcttagtttttcttctcattggccattccttttcaagttccctttgcttatttgtcctcatcttcctcacctctatacaatggacagcccaatgctcaattcttagtctcttcttttcctctatagtctgaaatttagcaggatctctcccttagaactcaagactcatgcatccaattgcatccttgacatacccccttaaataaccaactggatcttgtccacactgaactcctgattcctactctactcacctctaccctacatctgtttctctgtcaattctcttcctttccgtaactagcaacttcaatctttcatgtgctcaggttaaaaaaccagccatcccaggaagcggaggttgcagtgagccaagatagcaccaccgcattccagcctgggtgacagaaggagactccatctcaaaaacaagagacaaaaaacaaaaacaaaaacaaaaaaaccagccatcattcttgtctcccttctttctctcaccctccagagttggtaa

SEQ ID NO: 916727 - DNA, 4001 bp, Homo sapiens
accctaattgtgactgacaagagagggaacagcacttgagatttcccatataaaggaagaatcacgtatattaaaatgcaattaaccataacaaggaactatgtcctttaaaacagagatgcccagaagacgctgccataatttcccaaaacctcccactttctctcattaaaattctttcctcttaatctctgccatgtgaaatataaaaatcagtttttactcaattctaaattattcttttgtttattgagtcacaattcttagaaattttttttttcttaatgcttgacccataggagctacctctgaattcattatggtggaagatttagggtactcttgttacttcacagattttaaactctagaaaacatgcttatcttcaccctgtttaagactgtgcttgttttatatcctctaagtttagcccatgcagcctgtctttccagagggagccccaatctttctaacagtaaccccttcccagtaggggaagcagaaataaacaaaatccaataaaacacttagcaacattgttgattgtggagagaaataagtaacataatgacttttggggggcacttaaaaactaaggaagaagtatttatttaaatgtacaaaattaaaaagaacatagctcacagggaaaaaggacattaaaacctatttgtaaactctaattattatattacatcttgaaattttcaaatgagtagaaacatcttattctaccctaaagataccgttagttcattcaatgccaaatagtactgcttaatttagtgggttaagtttgttttgggttctatttttaaaattagaaacatgcttttaaaggctacacattattacttacagagctattccagcatatacatttatacttttgtactatttatccaccttaaaaatgaattagtagtctacctaacttagcctttgagggtataatcatctccttttcatagaatgctttcaagtccttttaaaaataaggaaatcaaccattccttagggagtaatcttgtctcaaagacatatctctttttaaattttttcctgagttccataaagatgatataaaaggagaaataaagtaaacccaaagtgtgcccgtgagactttactgactttgagggcttcagtgacctcagtaaatcactgtctaaagcttcattctcagagttgatcaagttactaaaaactgcattgcaattacagccttattattcaggtcagcatccttaattccataagctctcctttagcaatcgctctgatgtcagatatgaaatattcctaatctagcaggatcatagtcttccttctgctcggaagcattttaacattcatttgaatggcaatgtacccactaatatcaagcagtgggctgagcaaaggataaaatatacaaagaagcaaacttaccatcaaacacgttactataataacaaagatgctgagaaaaatgacaacagcataaaatccttctttgctccagattttgtccgcttcatgctgcccttgtaaaacatttttctttaaaagcaaaacagaaagtccgacgttaaatgagagcttgagaaaactggcgttcttatcagacactaaacatatttttagccttattccattcagtgtagtgcaacacacctacaccccccgctgccagagctgcttctcaaactgatctaagacaacagactgccatccttatatatcgagattatttagtctcctatgcaggagcaagcgtgcctgacatggcatctgcaggtcccaggctttctaaacatccctcagcgtctctcttggaaactacctggttcataggtaagagagttctgttcttttctgtgtggaggaaattgtttctgatttccttactctgttttaagtcccctcccacaacatcagcaccctggattacgtgctgtactacctctttacttttaaacaaaagtgaaacaagtgcaaacaaaagcttgtggtgcattaataaatacagcaacaatgccagcattatttccttctttcttttaatcacatcttttttttttttcaaatagagtctctgctgtcaaaacctgactaaaatatcatctcaagaatacatattgttagaatatcacatatttttctaaagtaatacggaacattaaaaagttcagaattatttgtcaataaaaggtagaatacacaggtttatctttatttgtatcatttttgttccactttgggggtggaagagcagagaagaagcatgaataaagtgtgcatgactctattaattttattttattaatttttttaaagaagcacattgactaaaatccattcttagattaaaattcagttgtataatttagtgacagtatagatttatagttaacgaaactaacttgaaaccaaatagtccatgattgggaaaaacatataaaggctaaatcaagtcaaatgctttaactcatctaaaatttcattttgttgaagggtgcctttttattccctttagtgagagtacatgtctgtccttggttattgtttccagtgattaagaaggcctggagtaaaacacgtcttgtaggtgtctgaactttgaaatcattgctaatttatttttaaggcttttaaaaaataaaatatacccaacatttataaatcagacaaaaaatttaccttgaaaaatattttatgagaactttcattctggaatgcaagtgtgttttggtgggaagataagcaaggctgaacagaaaagatttttgagttcaattgtgattacaaaaattatttggagaaagcctttattaaatgctaacgtaatcaggattctattttctttacttgtaaaacagcgatgtgctcactaattatagtagaatagtatctggcctactttctaagacatagatagatgcatagatacaagaaatgatttagatatgtattttaaagatatataaatgataaatcgatggagaatctgaaaacacttgattgataaatgattagaaaccaagtaccctgctgcaaaacaactttgggttcaagcgacaaattttctttcacctctttgacgtcagccatatcgtttttttaaattccaatgtctctataagcatagctggaaactaatagaaaactcttgcagaaatcaggtataaatatggaaatgaattttttacaggcaacaaaatagcatccattgtttgctataaaagcaaactagttaagccttcaagtaggcagcataaatttgtcaaatttaagtataaggagttgagcttaagcccatgtaaaatttggataaaaaggggtggttaggtgggtggaaagagattttgtgttcctaacccgatttggttcatttttttttcttgctgtagttctacaactcctagaatatcaacatgttcctttctgcttaagacaaacctgttttgttttcttttttaactgaagcagtaatgatgaaagaattaactcccaccctcccatcccccactcccagttagaaagacacgttttaaactcctagaacttagtcactgcactttcttggtaaatagatttctttctgagtcatgctactcctgctgaacactactatatttgtacagagatctaaaaaacttgataagggcagggtaataaatggacaagtttgtagttaagagctcacaaatcaaaagactataattcacaagaatcttcaatctaacctttgcatagggttaaccccatgctttttatattttgtcaggtggccgagagttgaataattcagaggctctgttgttgggtcaagccaatgccactatatcatctttatgttttattatttcatagctacatttctttgccctttaacttagttgcagtgaaagaagctgatgggttttgttctattatttaaaatttggtcagttttctgtatagttaacaatggcttctctatatcctgtttaataatttgatgcactatagctcattct

SEQ ID NO: 916728 - DNA, 4001 bp, Homo sapiens
ctattattaagcaatactataaataaaactcaacccaatgtgtatgttttcatcccacatttcagcattgaagaattgtatgtggtaacgaaataattcactacagctgtttgcaaataatttaataatcaagtcatagctattttctacttctcaaaatgtgccaaagaactattgaaaactccacaatataacatcataattataacaattaacatgtgtatttaataatagctttaataatcctatgcattatttgctcaaaagattcatgatacatttaaataatagcgttagctggaataagaaagtaccatatttcactcctactattgtacacagagaataaaattcacccactcttttaaaaaagatactgcaaggattgtaatttcagaacaattatttttactcattacccctagaacatagtatacactcagcaaatgttgcttgaaggaatgaatggatatgtgtgattggatgagaagcacactcagggaaaatgcctcgtctctggttgttacaggactactgcatggacaactgctgtcacagtagggtttctaaaatctccctgccatattttattttggttcatgtgtgtgtgacaatgataaggaattcagcctagcaagtctgtctgcattaaatagaggtgctatgtatgcaaaaagcagggacaccacatataatatctctcaggtacttcccaaggtttgcttcctcacgagacttgatattgattctggtgcctcaaatctatttatatttgggagcagtctcactgttactcttggttacaccttatcaaatctgtccgagggacagtgcctaacccagggttgtcagctttggaactgtaattgttttttttttttttttttttttttttttttttaatatgccagcggacgctagccacggtgctgaaagagacaagaggattctatttgaaaccttttcttcctcttattggcttagaaaattcgagtgacaagagcaggggccaaaggagcctggtgcagcatcactaatgtgaaccatgtatttcgatcttttgggcggagatgtggtccatcaggttacagccaatgccttcctatgagcgctcgctagaccaagagaccttatgaatgtagtagccgctgcagtagaaaaggttacatctagcaggatgtcttatccctctcctgaaaaattgacagttaagtgcatagcctagaaacaagagcagggaatctagacggaggggaggcgaaggggggagcaaacctgtattcatattgaaaatgttcactattttcgtataaagtaaagaaaaatcaagagctaattttaggttaagttttcggcctcagttttccaacaggtgcacgactccctcaccccttccctgtcaggtactgtcctgttttacctttttagaaaggctttcttcgcaaggcaagcttttcctagagtccttaagcatgtgcagtttcccatctcatgcacagctccggctctaagcctggcaaccccttacctgcagcgtgaagattaaggagcaggcacagcgcagggaagcagactgctctccgcatagtgtttgcattgagaggtggaggagaaactccaccacgaccccacttcaggtaaagtgctattagaaagagccaccgccaagggtcttctagtctccgggattcaggtcctcggctggggtttgcagagcagtcagtctgtggcgccgacagaaaccagcaccagcttcaacctccctaagagagggagagaggaagagcagtaggaggttgcgggtaaggggaacagaagcgctcagaggcggcaaatgcctggccttctggacgcccagaagccaaggcggagacggcagggtggactccgcgccagcccagcagcccagcagcagcgccgcggctactgagcatgcccagcgccggccctcacgaggcaagggaatttcaaagtgaaattccgcttctccgggtcttagcggcggcttggagcagagtaggctccatcgctggggtggtggttgggggtgggggtgggggtggggaagggggaagtgcgggggagacacttgctgtggttactagggacccagcgtccatcacaaatccgaaggtggggtgtagctgagtgagagtagatgggggcacgaccacaggagtcagaggagggagctgatgacattgtcaaccatgccacccaccctactctttccccaaatcttgatttacacgtggaccgagctcactgctgggaattggcatttgcagattgaccagcttcccaggactcgcctacaggaatagaggtgtcttccactgctgagcattctggctgctcgggggaagcgttcccaaggcagcttgcttggtgtaagcagtaaccatgtatcttgggggtgacttcgtccttcctacagcttccccctctttgcttctctttccactctttccagctcaatgactgtatttaaactttcttctgactcaagtcctcacagtgacagaaagaagtgagaagatacttttagactagtagaatatatccatgtaattgaagcacaagaaggcacctttttgtttcgtggaggtaattaactttagtttcccttttactctttaaggtgaaagataatggatcacgtcagtgcctggactcatccggcccagctctgtgtctctagggaggctaccacagtctgccattagatggttttttatccctccatctaagtctttggagtgtggaaagccttattagtcatggctaattgctgctagtcaagtcaagaagtccctcagctagacttctcttttaactatcccagggcctctgccctttctgcctctgtgtctttatggacactgttgcctctttcccattttcctccacttgcaccaccaccacactagttttcgaaggtgtaatgttggtctcacttttccagaaagccctaactctaactaactctagattacagtgatctttctcttccacaacacttgtttagccgtgcctcatattattctttcagacagttcatttatctgtggtttgttctacagcacattgaagtctccataagaactgctgagttttgtattccattaacttgaataaagttgtcctagccaaataattggggctaacaagtgcccattgagttgagctgcacatctcattcagtgctttctttctccatcctctgtgaattgagacaactaatgggaaataggctatccaccagagcttaaattaggtgggaccttataagatcagagagcccaggcggtaccatttatttcttttatgatttatgtcatcttcagctctgagagacaaggccaggaagcactccaacaagtgggagaaggggacaatgagatgtacttttaatatcttgacaggccttctctgctgaaaatagagacatatctccatgtctagcccctctctagcaacgtgctccaccccctactcccccatgcgtgtggcacactccatttctgtggcactatcatttcatcccaaaccactctaagctgcaacctcttctcctattcctgattcactgtcctccagtttgcttttcccgtatcactttctaacaaaccaaaataattacttataaaatctattgtttagtatctatttccctactcccccccgcaaaacagaatttgagctccaatgttgaagaactttgatgactttattgatatgtcccaactccctagagcaatgcctcatgcaaaatagatactcaaaaatgaataaatgaaaatgatagttgacaaagttcaatactgacaattaactctttgaaattcttactgagtcaacctttgagataatttatttagcattctgtaaagcttagaagaataactcttctcatctaacatctgttactagaaatgctgcagggctggaggttagggaaaaataattgtatcccacttacaataggtctatttttctta

SEQ ID NO: 916729 - DNA, 4001 bp, Homo sapiens
ctctgctttcccacttcccttcttctatccttgcctttgctcttctgaatcacatccattgatcccctgaatattttccacttttatcactttcaattcctttctattctcccccttctcttatcctttctcatctgcaaagcagaaaaataccctaattgtgactgacaagagagggaacagcacttgagatttcccatataaaggaagaatcacgtatattaaaatgcaattaaccataacaaggaactatgtcctttaaaacagagatgcccagaagacgctgccataatttcccaaaacctcccactttctctcattaaaattctttcctcttaatctctgccatgtgaaatataaaaatcagtttttactcaattctaaattattcttttgtttattgagtcacaattcttagaaattttttttttcttaatgcttgacccataggagctacctctgaattcattatggtggaagatttagggtactcttgttacttcacagattttaaactctagaaaacatgcttatcttcaccctgtttaagactgtgcttgttttatatcctctaagtttagcccatgcagcctgtctttccagagggagccccaatctttctaacagtaaccccttcccagtaggggaagcagaaataaacaaaatccaataaaacacttagcaacattgttgattgtggagagaaataagtaacataatgacttttggggggcacttaaaaactaaggaagaagtatttatttaaatgtacaaaattaaaaagaacatagctcacagggaaaaaggacattaaaacctatttgtaaactctaattattatattacatcttgaaattttcaaatgagtagaaacatcttattctaccctaaagataccgttagttcattcaatgccaaatagtactgcttaatttagtgggttaagtttgttttgggttctatttttaaaattagaaacatgcttttaaaggctacacattattacttacagagctattccagcatatacatttatacttttgtactatttatccaccttaaaaatgaattagtagtctacctaacttagcctttgagggtataatcatctccttttcatagaatgctttcaagtccttttaaaaataaggaaatcaaccattccttagggagtaatcttgtctcaaagacatatctctttttaaattttttcctgagttccataaagatgatataaaaggagaaataaagtaaacccaaagtgtgcccgtgagactttactgactttgagggcttcagtgacctcagtaaatcactgtctaaagcttcattctcagagttgatcaagttactaaaaactgcattgcaattacagccttattattcaggtcagcatccttaattccataagctctcctttagcaatcgctctgatgtcagatatgaaatattcctaatctagcaggatcatagtcttccttctgctcggaagcattttaacattcatttgaatggcaatgtacccactaatatcaagcagtgggctgagcaaaggataaaatatacaaagaagcaaacttaccatcaaacacgttactataataacaaagatgctgagaaaaatgacaacagcataaaatccttctttgctccagattttgtccgcttcatgctgcccttgtaaaacatttttctttaaaagcaaaacagaaagtccgacgttaaatgagagcttgagaaaactggcgttcttatcagacactaaacatatttttagccttattccattcagtgtagtgcaacacacctacaccccccgctgccagagctgcttctcaaactgatctaagacaacagactgccatccttatatatcgagattatttagtctcctatgcaggagcaagcgtgcctgacatggcatctgcaggtcccaggctttctaaacatccctcagcgtctctcttggaaactacctggttcataggtaagagagttctgttcttttctgtgtggaggaaattgtttctgatttccttactctgttttaagtcccctcccacaacatcagcaccctggattacgtgctgtactacctctttacttttaaacaaaagtgaaacaagtgcaaacaaaagcttgtggtgcattaataaatacagcaacaatgccagcattatttccttctttcttttaatcacatcttttttttttttcaaatagagtctctgctgtcaaaacctgactaaaatatcatctcaagaatacatattgttagaatatcacatatttttctaaagtaatacggaacattaaaaagttcagaattatttgtcaataaaaggtagaatacacaggtttatctttatttgtatcatttttgttccactttgggggtggaagagcagagaagaagcatgaataaagtgtgcatgactctattaattttattttattaatttttttaaagaagcacattgactaaaatccattcttagattaaaattcagttgtataatttagtgacagtatagatttatagttaacgaaactaacttgaaaccaaatagtccatgattgggaaaaacatataaaggctaaatcaagtcaaatgctttaactcatctaaaatttcattttgttgaagggtgcctttttattccctttagtgagagtacatgtctgtccttggttattgtttccagtgattaagaaggcctggagtaaaacacgtcttgtaggtgtctgaactttgaaatcattgctaatttatttttaaggcttttaaaaaataaaatatacccaacatttataaatcagacaaaaaatttaccttgaaaaatattttatgagaactttcattctggaatgcaagtgtgttttggtgggaagataagcaaggctgaacagaaaagatttttgagttcaattgtgattacaaaaattatttggagaaagcctttattaaatgctaacgtaatcaggattctattttctttacttgtaaaacagcgatgtgctcactaattatagtagaatagtatctggcctactttctaagacatagatagatgcatagatacaagaaatgatttagatatgtattttaaagatatataaatgataaatcgatggagaatctgaaaacacttgattgataaatgattagaaaccaagtaccctgctgcaaaacaactttgggttcaagcgacaaattttctttcacctctttgacgtcagccatatcgtttttttaaattccaatgtctctataagcatagctggaaactaatagaaaactcttgcagaaatcaggtataaatatggaaatgaattttttacaggcaacaaaatagcatccattgtttgctataaaagcaaactagttaagccttcaagtaggcagcataaatttgtcaaatttaagtataaggagttgagcttaagcccatgtaaaatttggataaaaaggggtggttaggtgggtggaaagagattttgtgttcctaacccgatttggttcatttttttttcttgctgtagttctacaactcctagaatatcaacatgttcctttctgcttaagacaaacctgttttgttttcttttttaactgaagcagtaatgatgaaagaattaactcccaccctcccatcccccactcccagttagaaagacacgttttaaactcctagaacttagtcactgcactttcttggtaaatagatttctttctgagtcatgctactcctgctgaacactactatatttgtacagagatctaaaaaacttgataagggcagggtaataaatggacaagtttgtagttaagagctcacaaatcaaaagactataattcacaagaatcttcaatctaacctttgcatagggttaaccccatgctttttatattttgtcaggtggccgagagttgaataattcagaggctctgttgttgggtcaagccaatgccactatatcatctttatgttttattattt

SEQ ID NO: 916730 - DNA, 4001 bp, Homo sapiens
ccgggaggcggaggctgcagtaagccaaaatcccaccactgcactccagcctgggcgacagagcaagactctgtctccaaaaaaaaagcaatctattacttataactttcaccataaaagctgttataacaactgccgaagttaagcattattttcttaaacttttgtttcagtcagacactgcacgcactgcatgaacttctgtggaaatgtttaaagatgtttaaagaacacagaactgcgcaaagccacagtggtaactacaaaaaggaacaaaaggaatgtctacctgaggccagtcgcagtggctcatgcctgtaatcacaacacaggaaggccgaggcaggaggatcgcttgagcccaggagttggagagcagcctgggcaacacagcgagaccccattcctataaataataaaaaacttagcaagacaccattcctgcaaattataaaaaaaattattcaggccgtgaggtcaaggacacttacagccctcgatgttcgggaggctgaggtgggaggatctcttgagcccaggaggtggaggctgcagcgagcagtgtggatgcaccactgcattccagcctggaccacaaagggagaccacgcctcaaaaagaaaaaaaaatacacctacctgaatgtacccagaccctctaccttccagaaaaggaagtgggctgaggagagaatcctcacaactttaatacttagctctctgtccccttaacgctcacgacagcaggctcttctgagctgccccgagctgtccactgttctcagcaccgagcgtcagtacacctagctcatcttcacactctacttagcaggtgctgtgagcactcccatcctaaagatgaggactcaggcacccagcaagtgaaccccgccccagataacagcggttagcggcagggccgggcctgatggaaagcagcaggagctcgcgtgcagcaggagcagtgaaagctgcttgggcctgcacctaaatcctgccggacccgccgctacctgggcgaccgctcctgcacctaaacccagccggacccaccgcttccccggcggccgcacctgcacctaaaccccgcgggacctgccgcttcccgggcggccacacctgcatgccgtggtagcccttgcccgaataggccatgagcagcacgatcttccgcttgggcggcttctcgcgccgctcctcgtcgccaccgctcttgagcttcttcgccggatgttctccgtcctcccagacgcggtcgcccccggcccggccgctgcaggacctccggtcctgggggcatgcggctccggcgggcggcggctccgcgttcccggccatgcgcggcgagctgcggagaagggcggcgtgagcgggggcccgctcggcaccgcgcggggtggactggggtgggctgggctgggcgggcatagcggggtcgcccggcgtcgcggtcattaccaggacggacgcggtcccaggcgcagggtccaccgtccgaaggctcccaacagcgcgcgaagctggaggcccatgcgcaggctaccagtgcacccgaccccgccctgatccccgacccctgacccccagtgccccagctccgcctctgccgacccctaacctctcggaccctgacgctgcagccctgttccttctgacccctgacctccgggaaaccggcgccccagcccctctccagctgacccctgacctctcggacctggacgccccagcctcactcctgctgacccctgacctctcaggccccgcgcccaagccccgtctctactgcccccagaccgccccgggaccctgacggatcaactccaacgtcccctgacgcccaggttaacctctgacttccccagcctcttcacctcccgccccgcccggtgggctttcctcaggagtcgaggagacccgggccacccgcgtcgggaccagagaggctcgctcctgccccattcgcgacgcggctgactgagccggagccggaccacgtgggcgaaggcggaagtggaacgaccgactgcacggcggccgagcgcggacaaaactaattcgggagaagaggcagggcggggacagagacggagggggtgatgggggcggagactagggggtgggggtggggtggggcggggattagggtgttgagggcggggcaccaggccctcctgcatccagcaccgcggccgcgcgactggtcgctccgccgccgcctcccgggtgctgtcgcccgcccagcggagcaggggaagcgctgagcccacgctggccccgctcctctccgttgccgggtccgctcccacgggctcggcccccagaccctcagtggcacccaccctgtgcggccctcgtgtggccccagccccgctccccgtccccgttccacagacgctggggcgcaggggcggctccgccctgcccttcacccgcacggtagaggggtcacggctcaccgcagcctccgcctccgggctccagcggtcctcgcaggcgcgccccaccacgctcagctaattttttcttattttttatagagatgcggtctcctgaaaagtagccactcttttttgttttgttttgttttgtttggggggcgggggacagagtcttgctctttcgccaggctggagtgcagtggcgcgatctcggctcggaatctccacctcccgggctcaagcgattctcccgtctcagcttccggagtagctgggactacaggcgcgcgccaccacgcccggttaatttttttgtattttagtagagacagggtttcaccatgttggccaggatggtctcgatatcctgacctcgtgatccgccttcctcggcctcccaaagtgctgggattacaagcgtgagccacgcgcccggcctttttttttttttttttttaagagaccggcccactatgttgcccaggcagatctcgaactgctgagctcaagcgatcctcccgcctcccctcccgaagtgctaggattccaggtgtggccaccgcgcccaccacttccttgcctcctctcccaagcttgccctcctgtctcctgctttcccttagacaaactcatatgatcctgggcccgcgcagataatctggcataatctcaaaatccttaatcccatctctggggccacaattcaaccaactacaagcttgaatttggggaatgagccatggaggtgttggggagagcgtgttcctggcagtgcaagagccaggaggcaggagacagccgtctgcagcagccccactcccgccctccaggggctgtgccttctcctacaggtgaggactcagtggggccggggcactgtgcccacctggagtatgcaggtagagaaaccacagggctgcgtgatgactggagggactgataggaaaagaggaccaaggggtccggggccaggttgtgtggggcctcgtgggccaccgaggacttggcattggctatgagtgagatgggagccccagggatccaatctgacaccccttcccaaggggcactcagtgggctgcgagtggcttgtgaggagctggtggccgaggcaggaaggggaggcaggagggagatgcaattgtccagctgggagggtggctcagctgtataagtgaccccccaggagggcacccctccaccagcccaggctccaggactgaggcgggggggtttggacaggcacccaggggggccacagttctgtggcagtgtgggcaccaaggcctggtccccctggcttggagccccgcccccacatggccagtgtgtgcagggatgaggtccttcctgtactgccatggcttcccctgggcccaccctcaccacctggctctggcacaaggacctttacagcagctttatttaccactgcccaaacgcagaaacaaccgatatgtcggcaggtgaatggaaaaactgtggtacctacagacaatggaatactatgcagctctaaaaagaaatgaggccaggcacagtggctcatgcccgtaatcct

SEQ ID NO: 916731 - DNA, 4001 bp, Homo sapiens
ggcgacagagcaagactctgtctccaaaaaaaaagcaatctattacttataactttcaccataaaagctgttataacaactgccgaagttaagcattattttcttaaacttttgtttcagtcagacactgcacgcactgcatgaacttctgtggaaatgtttaaagatgtttaaagaacacagaactgcgcaaagccacagtggtaactacaaaaaggaacaaaaggaatgtctacctgaggccagtcgcagtggctcatgcctgtaatcacaacacaggaaggccgaggcaggaggatcgcttgagcccaggagttggagagcagcctgggcaacacagcgagaccccattcctataaataataaaaaacttagcaagacaccattcctgcaaattataaaaaaaattattcaggccgtgaggtcaaggacacttacagccctcgatgttcgggaggctgaggtgggaggatctcttgagcccaggaggtggaggctgcagcgagcagtgtggatgcaccactgcattccagcctggaccacaaagggagaccacgcctcaaaaagaaaaaaaaatacacctacctgaatgtacccagaccctctaccttccagaaaaggaagtgggctgaggagagaatcctcacaactttaatacttagctctctgtccccttaacgctcacgacagcaggctcttctgagctgccccgagctgtccactgttctcagcaccgagcgtcagtacacctagctcatcttcacactctacttagcaggtgctgtgagcactcccatcctaaagatgaggactcaggcacccagcaagtgaaccccgccccagataacagcggttagcggcagggccgggcctgatggaaagcagcaggagctcgcgtgcagcaggagcagtgaaagctgcttgggcctgcacctaaatcctgccggacccgccgctacctgggcgaccgctcctgcacctaaacccagccggacccaccgcttccccggcggccgcacctgcacctaaaccccgcgggacctgccgcttcccgggcggccacacctgcatgccgtggtagcccttgcccgaataggccatgagcagcacgatcttccgcttgggcggcttctcgcgccgctcctcgtcgccaccgctcttgagcttcttcgccggatgttctccgtcctcccagacgcggtcgcccccggcccggccgctgcaggacctccggtcctgggggcatgcggctccggcgggcggcggctccgcgttcccggccatgcgcggcgagctgcggagaagggcggcgtgagcgggggcccgctcggcaccgcgcggggtggactggggtgggctgggctgggcgggcatagcggggtcgcccggcgtcgcggtcattaccaggacggacgcggtcccaggcgcagggtccaccgtccgaaggctcccaacagcgcgcgaagctggaggcccatgcgcaggctaccagtgcacccgaccccgccctgatccccgacccctgacccccagtgccccagctccgcctctgccgacccctaacctctcggaccctgacgctgcagccctgttccttctgacccctgacctccgggaaaccggcgccccagcccctctccagctgacccctgacctctcggacctggacgccccagcctcactcctgctgacccctgacctctcaggccccgcgcccaagccccgtctctactgcccccagaccgccccgggaccctgacggatcaactccaacgtcccctgacgcccaggttaacctctgacttccccagcctcttcacctcccgccccgcccggtgggctttcctcaggagtcgaggagacccgggccacccgcgtcgggaccagagaggctcgctcctgccccattcgcgacgcggctgactgagccggagccggaccacgtgggcgaaggcggaagtggaacgaccgactgcacggcggccgagcgcggacaaaactaattcgggagaagaggcagggcggggacagagacggagggggtgatgggggcggagactagggggtgggggtggggtggggcggggattagggtgttgagggcggggcaccaggccctcctgcatccagcaccgcggccgcgcgactggtcgctccgccgccgcctcccgggtgctgtcgcccgcccagcggagcaggggaagcgctgagcccacgctggccccgctcctctccgttgccgggtccgctcccacgggctcggcccccagaccctcagtggcacccaccctgtgcggccctcgtgtggccccagccccgctccccgtccccgttccacagacgctggggcgcaggggcggctccgccctgcccttcacccgcacggtagaggggtcacggctcaccgcagcctccgcctccgggctccagcggtcctcgcaggcgcgccccaccacgctcagctaattttttcttattttttatagagatgcggtctcctgaaaagtagccactcttttttgttttgttttgttttgtttggggggcgggggacagagtcttgctctttcgccaggctggagtgcagtggcgcgatctcggctcggaatctccacctcccgggctcaagcgattctcccgtctcagcttccggagtagctgggactacaggcgcgcgccaccacgcccggttaatttttttgtattttagtagagacagggtttcaccatgttggccaggatggtctcgatatcctgacctcgtgatccgccttcctcggcctcccaaagtgctgggattacaagcgtgagccacgcgcccggcctttttttttttttttttttaagagaccggcccactatgttgcccaggcagatctcgaactgctgagctcaagcgatcctcccgcctcccctcccgaagtgctaggattccaggtgtggccaccgcgcccaccacttccttgcctcctctcccaagcttgccctcctgtctcctgctttcccttagacaaactcatatgatcctgggcccgcgcagataatctggcataatctcaaaatccttaatcccatctctggggccacaattcaaccaactacaagcttgaatttggggaatgagccatggaggtgttggggagagcgtgttcctggcagtgcaagagccaggaggcaggagacagccgtctgcagcagccccactcccgccctccaggggctgtgccttctcctacaggtgaggactcagtggggccggggcactgtgcccacctggagtatgcaggtagagaaaccacagggctgcgtgatgactggagggactgataggaaaagaggaccaaggggtccggggccaggttgtgtggggcctcgtgggccaccgaggacttggcattggctatgagtgagatgggagccccagggatccaatctgacaccccttcccaaggggcactcagtgggctgcgagtggcttgtgaggagctggtggccgaggcaggaaggggaggcaggagggagatgcaattgtccagctgggagggtggctcagctgtataagtgaccccccaggagggcacccctccaccagcccaggctccaggactgaggcgggggggtttggacaggcacccaggggggccacagttctgtggcagtgtgggcaccaaggcctggtccccctggcttggagccccgcccccacatggccagtgtgtgcagggatgaggtccttcctgtactgccatggcttcccctgggcccaccctcaccacctggctctggcacaaggacctttacagcagctttatttaccactgcccaaacgcagaaacaaccgatatgtcggcaggtgaatggaaaaactgtggtacctacagacaatggaatactatgcagctctaaaaagaaatgaggccaggcacagtggctcatgcccgtaatcctaacgctttgggaggccaggagggcggatcacttaaggccaggagtttgagacc

SEQ ID NO: 916732 - DNA, 4001 bp, Homo sapiens
aagaatcggtggaacccgggaggcggaggctgcagtaagccaaaatcccaccactgcactccagcctgggcgacagagcaagactctgtctccaaaaaaaaagcaatctattacttataactttcaccataaaagctgttataacaactgccgaagttaagcattattttcttaaacttttgtttcagtcagacactgcacgcactgcatgaacttctgtggaaatgtttaaagatgtttaaagaacacagaactgcgcaaagccacagtggtaactacaaaaaggaacaaaaggaatgtctacctgaggccagtcgcagtggctcatgcctgtaatcacaacacaggaaggccgaggcaggaggatcgcttgagcccaggagttggagagcagcctgggcaacacagcgagaccccattcctataaataataaaaaacttagcaagacaccattcctgcaaattataaaaaaaattattcaggccgtgaggtcaaggacacttacagccctcgatgttcgggaggctgaggtgggaggatctcttgagcccaggaggtggaggctgcagcgagcagtgtggatgcaccactgcattccagcctggaccacaaagggagaccacgcctcaaaaagaaaaaaaaatacacctacctgaatgtacccagaccctctaccttccagaaaaggaagtgggctgaggagagaatcctcacaactttaatacttagctctctgtccccttaacgctcacgacagcaggctcttctgagctgccccgagctgtccactgttctcagcaccgagcgtcagtacacctagctcatcttcacactctacttagcaggtgctgtgagcactcccatcctaaagatgaggactcaggcacccagcaagtgaaccccgccccagataacagcggttagcggcagggccgggcctgatggaaagcagcaggagctcgcgtgcagcaggagcagtgaaagctgcttgggcctgcacctaaatcctgccggacccgccgctacctgggcgaccgctcctgcacctaaacccagccggacccaccgcttccccggcggccgcacctgcacctaaaccccgcgggacctgccgcttcccgggcggccacacctgcatgccgtggtagcccttgcccgaataggccatgagcagcacgatcttccgcttgggcggcttctcgcgccgctcctcgtcgccaccgctcttgagcttcttcgccggatgttctccgtcctcccagacgcggtcgcccccggcccggccgctgcaggacctccggtcctgggggcatgcggctccggcgggcggcggctccgcgttcccggccatgcgcggcgagctgcggagaagggcggcgtgagcgggggcccgctcggcaccgcgcggggtggactggggtgggctgggctgggcgggcatagcggggtcgcccggcgtcgcggtcattaccaggacggacgcggtcccaggcgcagggtccaccgtccgaaggctcccaacagcgcgcgaagctggaggcccatgcgcaggctaccagtgcacccgaccccgccctgatccccgacccctgacccccagtgccccagctccgcctctgccgacccctaacctctcggaccctgacgctgcagccctgttccttctgacccctgacctccgggaaaccggcgccccagcccctctccagctgacccctgacctctcggacctggacgccccagcctcactcctgctgacccctgacctctcaggccccgcgcccaagccccgtctctactgcccccagaccgccccgggaccctgacggatcaactccaacgtcccctgacgcccaggttaacctctgacttccccagcctcttcacctcccgccccgcccggtgggctttcctcaggagtcgaggagacccgggccacccgcgtcgggaccagagaggctcgctcctgccccattcgcgacgcggctgactgagccggagccggaccacgtgggcgaaggcggaagtggaacgaccgactgcacggcggccgagcgcggacaaaactaattcgggagaagaggcagggcggggacagagacggagggggtgatgggggcggagactagggggtgggggtggggtggggcggggattagggtgttgagggcggggcaccaggccctcctgcatccagcaccgcggccgcgcgactggtcgctccgccgccgcctcccgggtgctgtcgcccgcccagcggagcaggggaagcgctgagcccacgctggccccgctcctctccgttgccgggtccgctcccacgggctcggcccccagaccctcagtggcacccaccctgtgcggccctcgtgtggccccagccccgctccccgtccccgttccacagacgctggggcgcaggggcggctccgccctgcccttcacccgcacggtagaggggtcacggctcaccgcagcctccgcctccgggctccagcggtcctcgcaggcgcgccccaccacgctcagctaattttttcttattttttatagagatgcggtctcctgaaaagtagccactcttttttgttttgttttgttttgtttggggggcgggggacagagtcttgctctttcgccaggctggagtgcagtggcgcgatctcggctcggaatctccacctcccgggctcaagcgattctcccgtctcagcttccggagtagctgggactacaggcgcgcgccaccacgcccggttaatttttttgtattttagtagagacagggtttcaccatgttggccaggatggtctcgatatcctgacctcgtgatccgccttcctcggcctcccaaagtgctgggattacaagcgtgagccacgcgcccggcctttttttttttttttttttaagagaccggcccactatgttgcccaggcagatctcgaactgctgagctcaagcgatcctcccgcctcccctcccgaagtgctaggattccaggtgtggccaccgcgcccaccacttccttgcctcctctcccaagcttgccctcctgtctcctgctttcccttagacaaactcatatgatcctgggcccgcgcagataatctggcataatctcaaaatccttaatcccatctctggggccacaattcaaccaactacaagcttgaatttggggaatgagccatggaggtgttggggagagcgtgttcctggcagtgcaagagccaggaggcaggagacagccgtctgcagcagccccactcccgccctccaggggctgtgccttctcctacaggtgaggactcagtggggccggggcactgtgcccacctggagtatgcaggtagagaaaccacagggctgcgtgatgactggagggactgataggaaaagaggaccaaggggtccggggccaggttgtgtggggcctcgtgggccaccgaggacttggcattggctatgagtgagatgggagccccagggatccaatctgacaccccttcccaaggggcactcagtgggctgcgagtggcttgtgaggagctggtggccgaggcaggaaggggaggcaggagggagatgcaattgtccagctgggagggtggctcagctgtataagtgaccccccaggagggcacccctccaccagcccaggctccaggactgaggcgggggggtttggacaggcacccaggggggccacagttctgtggcagtgtgggcaccaaggcctggtccccctggcttggagccccgcccccacatggccagtgtgtgcagggatgaggtccttcctgtactgccatggcttcccctgggcccaccctcaccacctggctctggcacaaggacctttacagcagctttatttaccactgcccaaacgcagaaacaaccgatatgtcggcaggtgaatggaaaaactgtggtacctacagacaatggaatactatgcagctctaaaaagaaatgaggccaggcacagtggct

SEQ ID NO: 916733 - DNA, 4001 bp, Homo sapiens
ttaatacttccattccaaaaacttttagatattgtgaaggtccctaactcctgcttctataactagcccacaaaccagccagaatggtcttaaaaggtaaattaaatcatatcacaatccagtttaaaaccctctagtcacatttgcaataaaatccaaattactcaccctggcttccaaggacatctaagattagggaccctgcttattctccaaactcatttgtacctttaccccattacccactatactccagctactctggccttcttcaatagttttgtgctaactgttcctgttgtttaaattgttccctccccaatcatatagctgcatcttttaggattcatttcctcagagaagtttttcctgaccaataatctacaggaacctgcaagtgattctctttttttttgagacgaagtctcactctgtcgtccaggctggagtgcagtggcatgatctcggctcactgcaacctccgcctcccgagttcgagcgattctcctacttcagcctcccgagtagctgggaccacaggggcgcgccaccacgcccggctaattcttgtatttttttagtagagatggggtttcaccatattggccagggtggtcttgaactcctgacctcgtgatccacccgcctcggcctcccaaagtgctggggttacaggcgtgagccaccgtgcccagcaagtgattctctttcacaaaaccctatttaattttctgcatagcagttctaggtaaagtttttctttattatttattgtatatctcctccaaagagaatgttagttccacgtgaggagtaaccttgtctgccttatttactactgatgatcacacattttgaacagtgtcaagcacatggtaggtctgcaataaatactattgttaaataaatgaaataactagtacaaaataagagctgtaggaatgaagtggaagataattagaagaggcataatgcaagaagtggccatctaagtcctccatagttcaagagatagaaatgaggcagagacctcacaagtaatgtacaaacaaaacatgcaatgtgtgcaagaaaaacaagcagtccagatacagagcagtggggatgggaatgcagggagactacagtgctggaaaatgtagctgagttagtaccagattatggaagatgttgaatgccctgacaaggacttagaatctattgggtggtcaatggatggctactgttagtgtttgagtagaaaagtgacacaattccaaaacatgcttttggaattgtaagatgattctgatggaaatgagcaagatgtatccgatggagtaacagttagaggagttcaaaaacaaaacagcatggtcaagaacatagctgtagggattggccctgaaagaataatgatcttttctttctcccagaaaaaaggaggaagacagacattctaagcaagtgaaacaggtagggaaacttggggagaatgtaattccagcatcctggtagaagagtggaactgacctggaggacagcaaaggagcccacgtggcgttaagcctgaaggtgcagtattcccattcaacagagactgctgctgacagtgggcgggggagtagtttgcttggcccgtggttgaggaattcgttggcggaggagggatcctgagaaggtactagaaatactgaacccagtcctgcagaagctacttaacttcacagaaaactagggcgtcgttgccctccagcacgtccaaaggtgtccccgacaaggccagcagctctacctgtttcttctccctcctcttactctgcctgtccaaaggcacgacactagtccacgtcacctttctttgggcgcaaagggtatggatcctcaatgccaacctcgtcaccccccccccccacacacacacacacacacacacatacaagcccaccatcgcgcaagaaactcgaccccgtctacctcggttcagtggaaggcattcatttgcacaacgctgtgcgcatgcccggaagccttaagtgtttcagcctccgacaggggcgtaattaaaggggcaggcgcccacgtaaagacgcgccctacgcaatacgtggagtttctcactttgtggagccgcctggaggcgccaagatgaagcccatcggggaagtggggcggggccaacccggcaggccccgccccttcgcggcgcttcctagttcggctggttcttctgtcgccggcttcagcagcccgcgcccgggcaggtaaggcattccccgccttaatgcctcggtcaaacgtcgtccgaggtccgcttccaggcctcggcacctctgccccagggttgctggggtcggctgcggaacggaaatctctttatcatccgtgagaaaagttagagaggaagtgggttcctttgacagagcttactccagaagaaagacttgggtaggtccccggtaatcaagaagttcgtcggccctgaggaagagcctgaggcttggagggacgtcacccagctgttctggggcgcagtcggacctcaagtttctcacctctcaggccctggattccgtgaacccgactgcgaaatgaagtctcttttccccagaaccaggaagtcaggccagcacctgacagatgcctgtggcgccagcagctcgctgagcctccacacgattgtaattcgcttgtttctccggcctccaagcttccagggaattagaaagtggaggcggcttatgggatcagatgagtacattcgcagatgggggaaaaaagtgtacctgtcagcttggaagccagagggagacaaagggataaaagcaaaccctgtccaggtgcggtggctcatgcttgtaatcccagcactttgggaggcccaggcgggcggatcgcttgaggtcaggagttcgagaccagcctggccaacatggtgaaacccctgtctctactaagatacaaaatttagctggcatagtggcgggcgcccgtaatgccagctactccgggggctgaggcaggagaatcgcttgaacccaggaggcagaggttgcagtgagccgagatcgtgccactacactccagcctgggcaacagagggagactccgtctcaaaagaaaaaaaaaaaaaaaaaagcaaaccctgagaaagcgagaaagcactttgagcatttagaatgggaacaaacggcgctattagtgcttcaaaaacgtaactgcccaaggcccctggtaagcagaggatactaaaatctgccttttccctttcttggagtggtccttgaagagggctatcgggaagttcaaatttcttctgttttcctgcagagcgttcatttgaagtttgctttctacctctccaaactgagcttctgatattccaggccaaacttgctccttcctcagccttctctatctcagtaaatatcggtaaacttggttatgctgtcttctcactctccacatcagcccatagctttctattggctccacctcagaatcctaggacttctgcacttgctctgctacgaccctggtcccagcctgcagcacgtcccacctggcttattggtaggctctcctaaatgcttctttcttgcttctctgtccttactccaacatcctttattcccagcagccccagtatccttctaagacatgagtacagagcatgtctcttttctcaaaacttccagcatctacatctcacccagaggataaacaaagtcaatacaaaaactctaaggcccttgaagacctggcccctttacctttctgacctcatctgctacttgcctgttccctcctctgcagtctcaccatgtccttgctgttgcccagtgggcccagttccaacctttgcatttacatttcgttttgtccacaaacttttcccacagatagtccagtggctggctttctccttctttttgacctttaatcaaatggcaccttcttattgaggcttcctgtgactaccatatttataattacaaccttttctctatttcgttttgttc

SEQ ID NO: 916734 - DNA, 4001 bp, Homo sapiens
tttatcacaccaactttaatacttccattccaaaaacttttagatattgtgaaggtccctaactcctgcttctataactagcccacaaaccagccagaatggtcttaaaaggtaaattaaatcatatcacaatccagtttaaaaccctctagtcacatttgcaataaaatccaaattactcaccctggcttccaaggacatctaagattagggaccctgcttattctccaaactcatttgtacctttaccccattacccactatactccagctactctggccttcttcaatagttttgtgctaactgttcctgttgtttaaattgttccctccccaatcatatagctgcatcttttaggattcatttcctcagagaagtttttcctgaccaataatctacaggaacctgcaagtgattctctttttttttgagacgaagtctcactctgtcgtccaggctggagtgcagtggcatgatctcggctcactgcaacctccgcctcccgagttcgagcgattctcctacttcagcctcccgagtagctgggaccacaggggcgcgccaccacgcccggctaattcttgtatttttttagtagagatggggtttcaccatattggccagggtggtcttgaactcctgacctcgtgatccacccgcctcggcctcccaaagtgctggggttacaggcgtgagccaccgtgcccagcaagtgattctctttcacaaaaccctatttaattttctgcatagcagttctaggtaaagtttttctttattatttattgtatatctcctccaaagagaatgttagttccacgtgaggagtaaccttgtctgccttatttactactgatgatcacacattttgaacagtgtcaagcacatggtaggtctgcaataaatactattgttaaataaatgaaataactagtacaaaataagagctgtaggaatgaagtggaagataattagaagaggcataatgcaagaagtggccatctaagtcctccatagttcaagagatagaaatgaggcagagacctcacaagtaatgtacaaacaaaacatgcaatgtgtgcaagaaaaacaagcagtccagatacagagcagtggggatgggaatgcagggagactacagtgctggaaaatgtagctgagttagtaccagattatggaagatgttgaatgccctgacaaggacttagaatctattgggtggtcaatggatggctactgttagtgtttgagtagaaaagtgacacaattccaaaacatgcttttggaattgtaagatgattctgatggaaatgagcaagatgtatccgatggagtaacagttagaggagttcaaaaacaaaacagcatggtcaagaacatagctgtagggattggccctgaaagaataatgatcttttctttctcccagaaaaaaggaggaagacagacattctaagcaagtgaaacaggtagggaaacttggggagaatgtaattccagcatcctggtagaagagtggaactgacctggaggacagcaaaggagcccacgtggcgttaagcctgaaggtgcagtattcccattcaacagagactgctgctgacagtgggcgggggagtagtttgcttggcccgtggttgaggaattcgttggcggaggagggatcctgagaaggtactagaaatactgaacccagtcctgcagaagctacttaacttcacagaaaactagggcgtcgttgccctccagcacgtccaaaggtgtccccgacaaggccagcagctctacctgtttcttctccctcctcttactctgcctgtccaaaggcacgacactagtccacgtcacctttctttgggcgcaaagggtatggatcctcaatgccaacctcgtcaccccccccccccacacacacacacacacacacacatacaagcccaccatcgcgcaagaaactcgaccccgtctacctcggttcagtggaaggcattcatttgcacaacgctgtgcgcatgcccggaagccttaagtgtttcagcctccgacaggggcgtaattaaaggggcaggcgcccacgtaaagacgcgccctacgcaatacgtggagtttctcactttgtggagccgcctggaggcgccaagatgaagcccatcggggaagtggggcggggccaacccggcaggccccgccccttcgcggcgcttcctagttcggctggttcttctgtcgccggcttcagcagcccgcgcccgggcaggtaaggcattccccgccttaatgcctcggtcaaacgtcgtccgaggtccgcttccaggcctcggcacctctgccccagggttgctggggtcggctgcggaacggaaatctctttatcatccgtgagaaaagttagagaggaagtgggttcctttgacagagcttactccagaagaaagacttgggtaggtccccggtaatcaagaagttcgtcggccctgaggaagagcctgaggcttggagggacgtcacccagctgttctggggcgcagtcggacctcaagtttctcacctctcaggccctggattccgtgaacccgactgcgaaatgaagtctcttttccccagaaccaggaagtcaggccagcacctgacagatgcctgtggcgccagcagctcgctgagcctccacacgattgtaattcgcttgtttctccggcctccaagcttccagggaattagaaagtggaggcggcttatgggatcagatgagtacattcgcagatgggggaaaaaagtgtacctgtcagcttggaagccagagggagacaaagggataaaagcaaaccctgtccaggtgcggtggctcatgcttgtaatcccagcactttgggaggcccaggcgggcggatcgcttgaggtcaggagttcgagaccagcctggccaacatggtgaaacccctgtctctactaagatacaaaatttagctggcatagtggcgggcgcccgtaatgccagctactccgggggctgaggcaggagaatcgcttgaacccaggaggcagaggttgcagtgagccgagatcgtgccactacactccagcctgggcaacagagggagactccgtctcaaaagaaaaaaaaaaaaaaaaaagcaaaccctgagaaagcgagaaagcactttgagcatttagaatgggaacaaacggcgctattagtgcttcaaaaacgtaactgcccaaggcccctggtaagcagaggatactaaaatctgccttttccctttcttggagtggtccttgaagagggctatcgggaagttcaaatttcttctgttttcctgcagagcgttcatttgaagtttgctttctacctctccaaactgagcttctgatattccaggccaaacttgctccttcctcagccttctctatctcagtaaatatcggtaaacttggttatgctgtcttctcactctccacatcagcccatagctttctattggctccacctcagaatcctaggacttctgcacttgctctgctacgaccctggtcccagcctgcagcacgtcccacctggcttattggtaggctctcctaaatgcttctttcttgcttctctgtccttactccaacatcctttattcccagcagccccagtatccttctaagacatgagtacagagcatgtctcttttctcaaaacttccagcatctacatctcacccagaggataaacaaagtcaatacaaaaactctaaggcccttgaagacctggcccctttacctttctgacctcatctgctacttgcctgttccctcctctgcagtctcaccatgtccttgctgttgcccagtgggcccagttccaacctttgcatttacatttcgttttgtccacaaacttttcccacagatagtccagtggctggctttctccttctttttgacctttaatcaaatggcaccttcttattgaggcttcctgtgactaccatatttataattacaaccttttctc

SEQ ID NO: 916735 - DNA, 4001 bp, Homo sapiens
taactcctgcttctataactagcccacaaaccagccagaatggtcttaaaaggtaaattaaatcatatcacaatccagtttaaaaccctctagtcacatttgcaataaaatccaaattactcaccctggcttccaaggacatctaagattagggaccctgcttattctccaaactcatttgtacctttaccccattacccactatactccagctactctggccttcttcaatagttttgtgctaactgttcctgttgtttaaattgttccctccccaatcatatagctgcatcttttaggattcatttcctcagagaagtttttcctgaccaataatctacaggaacctgcaagtgattctctttttttttgagacgaagtctcactctgtcgtccaggctggagtgcagtggcatgatctcggctcactgcaacctccgcctcccgagttcgagcgattctcctacttcagcctcccgagtagctgggaccacaggggcgcgccaccacgcccggctaattcttgtatttttttagtagagatggggtttcaccatattggccagggtggtcttgaactcctgacctcgtgatccacccgcctcggcctcccaaagtgctggggttacaggcgtgagccaccgtgcccagcaagtgattctctttcacaaaaccctatttaattttctgcatagcagttctaggtaaagtttttctttattatttattgtatatctcctccaaagagaatgttagttccacgtgaggagtaaccttgtctgccttatttactactgatgatcacacattttgaacagtgtcaagcacatggtaggtctgcaataaatactattgttaaataaatgaaataactagtacaaaataagagctgtaggaatgaagtggaagataattagaagaggcataatgcaagaagtggccatctaagtcctccatagttcaagagatagaaatgaggcagagacctcacaagtaatgtacaaacaaaacatgcaatgtgtgcaagaaaaacaagcagtccagatacagagcagtggggatgggaatgcagggagactacagtgctggaaaatgtagctgagttagtaccagattatggaagatgttgaatgccctgacaaggacttagaatctattgggtggtcaatggatggctactgttagtgtttgagtagaaaagtgacacaattccaaaacatgcttttggaattgtaagatgattctgatggaaatgagcaagatgtatccgatggagtaacagttagaggagttcaaaaacaaaacagcatggtcaagaacatagctgtagggattggccctgaaagaataatgatcttttctttctcccagaaaaaaggaggaagacagacattctaagcaagtgaaacaggtagggaaacttggggagaatgtaattccagcatcctggtagaagagtggaactgacctggaggacagcaaaggagcccacgtggcgttaagcctgaaggtgcagtattcccattcaacagagactgctgctgacagtgggcgggggagtagtttgcttggcccgtggttgaggaattcgttggcggaggagggatcctgagaaggtactagaaatactgaacccagtcctgcagaagctacttaacttcacagaaaactagggcgtcgttgccctccagcacgtccaaaggtgtccccgacaaggccagcagctctacctgtttcttctccctcctcttactctgcctgtccaaaggcacgacactagtccacgtcacctttctttgggcgcaaagggtatggatcctcaatgccaacctcgtcaccccccccccccacacacacacacacacacacacatacaagcccaccatcgcgcaagaaactcgaccccgtctacctcggttcagtggaaggcattcatttgcacaacgctgtgcgcatgcccggaagccttaagtgtttcagcctccgacaggggcgtaattaaaggggcaggcgcccacgtaaagacgcgccctacgcaatacgtggagtttctcactttgtggagccgcctggaggcgccaagatgaagcccatcggggaagtggggcggggccaacccggcaggccccgccccttcgcggcgcttcctagttcggctggttcttctgtcgccggcttcagcagcccgcgcccgggcaggtaaggcattccccgccttaatgcctcggtcaaacgtcgtccgaggtccgcttccaggcctcggcacctctgccccagggttgctggggtcggctgcggaacggaaatctctttatcatccgtgagaaaagttagagaggaagtgggttcctttgacagagcttactccagaagaaagacttgggtaggtccccggtaatcaagaagttcgtcggccctgaggaagagcctgaggcttggagggacgtcacccagctgttctggggcgcagtcggacctcaagtttctcacctctcaggccctggattccgtgaacccgactgcgaaatgaagtctcttttccccagaaccaggaagtcaggccagcacctgacagatgcctgtggcgccagcagctcgctgagcctccacacgattgtaattcgcttgtttctccggcctccaagcttccagggaattagaaagtggaggcggcttatgggatcagatgagtacattcgcagatgggggaaaaaagtgtacctgtcagcttggaagccagagggagacaaagggataaaagcaaaccctgtccaggtgcggtggctcatgcttgtaatcccagcactttgggaggcccaggcgggcggatcgcttgaggtcaggagttcgagaccagcctggccaacatggtgaaacccctgtctctactaagatacaaaatttagctggcatagtggcgggcgcccgtaatgccagctactccgggggctgaggcaggagaatcgcttgaacccaggaggcagaggttgcagtgagccgagatcgtgccactacactccagcctgggcaacagagggagactccgtctcaaaagaaaaaaaaaaaaaaaaaagcaaaccctgagaaagcgagaaagcactttgagcatttagaatgggaacaaacggcgctattagtgcttcaaaaacgtaactgcccaaggcccctggtaagcagaggatactaaaatctgccttttccctttcttggagtggtccttgaagagggctatcgggaagttcaaatttcttctgttttcctgcagagcgttcatttgaagtttgctttctacctctccaaactgagcttctgatattccaggccaaacttgctccttcctcagccttctctatctcagtaaatatcggtaaacttggttatgctgtcttctcactctccacatcagcccatagctttctattggctccacctcagaatcctaggacttctgcacttgctctgctacgaccctggtcccagcctgcagcacgtcccacctggcttattggtaggctctcctaaatgcttctttcttgcttctctgtccttactccaacatcctttattcccagcagccccagtatccttctaagacatgagtacagagcatgtctcttttctcaaaacttccagcatctacatctcacccagaggataaacaaagtcaatacaaaaactctaaggcccttgaagacctggcccctttacctttctgacctcatctgctacttgcctgttccctcctctgcagtctcaccatgtccttgctgttgcccagtgggcccagttccaacctttgcatttacatttcgttttgtccacaaacttttcccacagatagtccagtggctggctttctccttctttttgacctttaatcaaatggcaccttcttattgaggcttcctgtgactaccatatttataattacaaccttttctctatttcgttttgttctttcatttcacttggcaccatctaacatactatagagtttattt

SEQ ID NO: 916736 - DNA, 4001 bp, Homo sapiens
atgatccacctgcctcgggctcccaaagtgctgggattacaggcgtgagccaccgtgcccggccttaattttaatttttaagagatgtggcatggtcacagctccctgcagctgtgaactcctgggctcatgcgatcctcccacctcagcttcctgaatgactaggattacaggcacgagccaccgcaactggcttgtccaatttctctcatttggtccaagttttcctttctaggatttcataaattcaatctctttttcctataaactcttcaaatagtggttcccagacttatctgtacatcagaatcacctagggaatcttaaataatttaggctacactacaggctaattacaacacaatacttgggagtgggacataaacatcagtattttttgaacctccccaagtgtgagattttcaatgtgtagattcatttggaaatcagtcttcaagtatttgaaaggctatatgtctctttttaataactgtttcctccaacaatttttatatgaaataattttctgtccctattctataaatgtaacaccgagtgcctaccatcaaccaaaccctggagaaacagtaaataaaacagtctgtgcccaggtggaatttacaactactgggactactccaatccgtcattcctgttaactccatgtccaagccaatcacattcctatcaccatcatcattatcttggtcaagtacattcaaatcaaccccttttactgtttggtagaacttaactcccactgacatactatatgtgcacatgtcgactccataaaggcagggtctttttctatttttttttttttttttttttttttttttttgagacggagtctcactctgttgcccgcccaggctggagtgcagctgtgcgatctcggctcactgcaagctccgcctcccgggttcacgccattctcctgcctcagcctcccgagtagctgggactacaggcatccaccaccacacccggctaattttttgtatttttagtagagacggggtttcaccgtgttagccaggatgctctcgatctcctgacctcgtgatccgcccgccttggcctcccaaagtgctgggattacaggcgtgagccaccgcgcccggcgggactttttctattttgttcatgcctatcccaggaccctgaacaatgcctggcctacagaaagcacttagtatccaatgaggaaattacttaagtaatcgtcacctctgctacagtctcagtctccaactcttgtaggtttttcatgtgttagacatttacctctcatcctccctgctaccatcaacatctcacttggattactgcaagaaattccctattcatctcccagcctcacgacatcttagcctccacaccagtttttctacaccacattcatcctcactccttcagacacggagcacaagagtggaaagtggagttttcatgctctcttcccagttatgcttgaaaatgcacttgggtgctagtgaagctagtggtgttgtcaaaaagccttttggggtattacccaccaaaaacagcagcccacccctttccggcccgctaagtccatgtgcgtgcgaatttgggagtggggttgggcttgagggtgggaacagtgagaaggcgcggcccttgactctccaggctcaggcgaaccagaccttctgaactgcagctctagtcgcgacaatccgggcaaagccgccctcaccccagccagtcgcaccagccaacgccccgagttccgggtccacgttcccccagctgggcggacccccagtgccgtaaagacgctgctccccttgtctcccagcgaccaggcctcaccttgtctggtgtctctttggccacgccgcagcggacccaggccacgcacgtcacctggcggctgcggttcatggtcctcaagtcaagggcgtgtcacgctagaaaccaggctgcatagggagggaccacgaccgcactgctgccacacgctcagggatctgcacagggccgctgccagggcagagcgcatgcgcaggctcctgtttgggcagcgtcggcgctcatttcagacgtcattctgaggcgccgaatgagaaataggaggggacaaaatggaagcggaagcagccgggcgaggaatccacgtgggctggtctgggctgtgtgaagtatagagaaaaggcttttcaggactgcatgtgacgatgcctgcgggctttgtaaaggccaagaaaatatttgggactgtaggggtcagtcagaagcaaagtttcaccaatctttattttgcttgcagttccgtagacttcaagctgacaaatggcagaggtttgtggtttgcgttttttaaaaagctttctccaaaatgaatttgtcgtttcacggagatcccaccattacatctcattacatccctaaatgttactttctcaccttaaaacatttagcaccaaaaaaaaaagtgagaaaaaaacatttagcaccaattatatactaactatgcagtagtgatttagtcttggcaaacacaaagggcttacttatgttgaaggcgctgttttgagtgccgtatcacgtgattacttacccctttgtgggaggtcttatttccgttttacacctgggaaaacagcgatccttccaaaggtcacactgctagtaagcggtgcagctgggatatgaacccgggcagtgtgactcccttgtatctatgtcatgcttctcagctaagatcagtcatctgttagaactcgtgagtggctggacgtttgtagaatggaaaatctcaaactagcatcccagaaaaatctgggttttgatctcttggctgtgtggccctgtcctggtcatttaccctcaatgcatctacctctgagagaggcaagcaaaagaaacaggaaggtggctgctatggggaaacagtggcaaggataaactggcagtacacatggtctttcccagtggcattgtcaaacggggggtgtccacctgtgggctctattcggggacctttttgcaacacatttatctttctatacagtattttacttggttctcacaacactttgttttaaagatgaagctagagtccccagtagtcaaatactttcctactcagatcacacacagaggagctgatacaactatgagttctgtcaccaactctactcagcctaatgcgcttggcaatctccctgcctgaggagagatcctcccagaagtaaattgctcattgtttgtgtaggcagattatttgtccattaagacttctccccctgctctgtttctgtaagatgattcttctgtggtttctttgcttttaacccattttagaaagaccatatggcagataatatttttcaaggatggctgcaacaatagagtccttcacacatgtttgtctgcaacgtgatcttgatattcctccatcaaagcacccccccccgcccccaccaacttgaatctgggtagttgtaggtctgctttggccaataaagtatgacagaaatgatgtttccaaggttaagtcataaataggatgcaggttttgcttccccaccaccacacccacttctccacttccacaccccccacccactcccccactgcccaccagtagaacactaatgtttggagccctgagccaccatataaagtttggctactgtggtagtctgttctcacactgctaataaagacatacccaagacatgataatttataaagaaaaagaggtttaatggactcacagtttcagttggctggggaagcctcacaatcactgcagaaggcaaaagagaagaaaggcatgtcttacatggcagcaggcaagaagagagcatgtgcaggggaactcccctttataaaactatcagatctcagctgggtgcagtggctcatgcctgtaatcccagcactttgggaggccgaggcagttggattacaaggtcaggagttctagacaagcctggccaacgtagtgaaaccccgtctctact

SEQ ID NO: 916737 - DNA, 4001 bp, Homo sapiens
tccaaaattcctagcacggacctagacaccttctcgatcagatccctggcgattcccttcacatctcctgcctcttgctcagggttcactttctccacacacagatcttccctccctcgggactgagtccaagctgcacctctctccgcctttctttaacgccggccttcccttcaaaacctaacagagacctttgccctgctgttccctgtgccaggagagcctctgctccacttctttacacagcctgttcaatgtcaccttctcaaaacaccttccctggccgtgtctccacccgcgccgtgcggacccgcgccccgcagactcgctcccttggccctgtctccacacgctccatgtggacccgctcccctggccctgtcttcacccgcaccacgcagacccgctcccttggccctgtctttacccgtgccccgcagacccgctcccctcgccctgtcttcacccgcgccccgcagacccgctcccttggccctgtcttcacccgcgccccgcagacccgctcccttggccctgtctccacccgcgccatgaggacccgctcccctggccctgtctttacccgcgcccccaagacccgctcccctggcgctgtcttcacccgcgccccgcagactcgctcccttggccctgtctccacacgctccatgaggacccgctcccctggccctgtcttcacccgtgccccgcagacccgctcccctggccctgtcttcacccgcgcccccaagacccgctcccctcgccctgtcttcacccgtgccccgcagacccgctcccctggccctgtcttcacccgcgcccccaagacccgctcccctcgccctgtcttcacccgtgccccgcagacccgctcccctggccctgtcttcacccgcgcccccaagacccgctcccctcgccctgtcttcacccgtgccccgcagacccgctcccctggccctgtcttcacccgcaccacgcagacccgctcccttggccctgtctttacccgtgccccgcagacccgctcccctcgccctgtcttcacccgcgccccgcagacccgctcccttggccctgtcttcacccgcgccccgcagacccgctcccttggccctgtctccacccgcgccatgaggacccgctcccctggccctgtctttacccgcgcccccaagacccgctcccctggcgctgtcttcacccgcgccccgcagactcgctcccttggccctgtctccacacgctccatgaggacccgctcccctggccctgtcttcacccgtgccccgcagacccgctcccctggccctgtcttcacccgcgccccgcagacccgctcccctcgccctgtcttcacccgcgcccccaagacccgctcccctcgccctgtcttcacccgcgccccgcagacccgctcccctcgccctgtcttcacccgcgccccgcagacccgctcccctcgccctgtcttcacccgcgcctgcggacccgctccccttgccgtggcttccccgggcgcgcggggcccctgttgggtccttgggtggaacctcagcgccgacccccgggtctgggcgggccctccacgcgctgggagggcgggatccgcaaggcgcctcacaatcgctgactgcggacgcgggtgtcgccgcgggaagttcagcgccgggtcggagggcgcccgctccgggggttctgacccgggcgcgcccccagcctggtcccggcccggcgctcccgtccaggccccgcgccgctgcggccgacctggggccggggcggcgtccgattcccgcgcccccgctcacctggtggccgccttggtgagcaccgggtagagccgcaggaagagcaggtactgggcgagcgcccgccgcggcagcgccccgagcccggcttcggcccgcagcctggacgcggccggcgccatcgcctccccagcgccgtgccgccgggggcaccgaccccacctcaggctggccgggcgcggagcccgaggcgccgagagcggagtggggaccgcctgacatttccggccccaccgcggcccgcagcgccgcccggtcccaaccccacggtgcgccgcgcgcgcctaccacacacttttccccggtccctgccggccacctcccccgccgggcgccggcgccaattggagcgcctcggggggcgggggaggggcggagcgcgcctcttgatggacggcggcatttccggctctcgcgagtctgggtgggagcgcgccaaatttctcccctgaagcagaggtggtagccaacggctccatgtctctgaggagcggcgggcggcggcgcgcggacccaggcgcggatggcgaggccagcaggtgaggggcgccctcctgaggctctcgggccggccctccggagggtgccatggggccgtcctcggctggcgccgccgaggcgggagggaggcccggttcccgcagccgcccgcactcgccgcgcctgactggggtagggcggcgcgccccgaccgccgacggaggggctcggggcgggcggaggcgctacgggcgcggcttctttgcggggaaacgaggcgggccgcgcggcctttccctgctcggctctttctgaggtttttcgggcctcgccttccgcgcagctgcgtttgggacctgccgcgcggcgggggcgatgagagcggcgggacccgggccaggccctgcggggtggacgcgcggctggggagggtgcggggaggggcggggccggggaccctgcctgggggcctagcgctgggggaggccgaggcgggcggatcgctggagcccaggatcctgttctagatcagcctgggctacagagagagacctcgtctcctctgttttatttttttgggcagggagtcccgctctgtcgcccaggctggagtgcagtggcgcgatctcggctcactgcaacctctgcttcccgggttcaagcgatcccgctgcctcagcctcccgagtagctggaattacaggcgcccgccaccaggcccggctagtttttgtatttttagtagagaccgggtttcaccatgttggccaggctggtctcgaactcctgacctcaggtgatccgcccgcctcggccttccaaagtgctgggattacagacgtgagactccgcgcccggcccttctcttgtaaaaacaagaaaaattagacaggctggtggtgcgcgcccgaggtcccagctattaatactcccgaatccgagccggaggttcacctgagcccggcaggtcaaggctgctgtgagccgggatcgcgccaccgcactccagcctgggcgacggagccagacccagtctcaaaaaaaatagagcaaggataagacgcggctgcttggtggccagagcaaacggtaaacatgaccggaggactggcctgccataagcagaaaacggatgaggcccggcgcggtggctcacacctgtaatcccagcactttgggaggccgaggcaggaggatcacctgaggtcaggagttcgagaccagcctgaccaacatggagaaatcccgtctccactaaaaaaatacaaaattagcggggcgtggtggcgcatgcctgtaatcccagctacgcaggaggctgaggcaggagaatcacttgaacgcggcaggcggaggttgcggtgaaccgagatcgcgccattgcactccaggctgggcaacaaagaatgaaactctgtctcaaaaaaaaaaaaatagaaaaaacgtgtgagaacgtgaagctttttacagacacttagctgaacaaaattcttcccagaggagaaaccaagtggtaaggatccctaactgctgttgtgctcatcgctgtctgtccatatcaggcaagccctagagaggcaggtacccttagggtctacatggtgtgttggaacttggagcttagagacggttactgactgccctgcttcaggacacaggactgcactcacgtgctccactccactgccctgccccaagctcagtgat

SEQ ID NO: 916738 - DNA, 4001 bp, Homo sapiens
ctttcagaactcagtttcctggccctaaatggaagactgtcagaagacaggaattccagatttcgatggcgagctctacaaagactttctcagtccttgaaacagcacggggactgccgagaagcaacagaactgcaccagcactttagaaactgtaactttgctcccagttcccactgggaaagcactcagactcttagatcctggttcaaagaacatcccccagcctccttccagctgagctatttttatgtgaaaaaaaaaaatacctgcctggaagccatgccaaccttgagcacactggaaaaatgggtgccaagcctgacccaaaggcagaaccacgcttggcagccatctcactctgcaaaacaggcaggaccctacaccaaccccagctccaggatctcaggggcaccctgatcccaaaaggaagctggagggaagcagtcaagtccagcacctacaaatagccagtcttaacttagtgcccggcgctgcttggtagaggtccatcagtcctgtctgctgaatctactcctcagagcctgggacagaggaagcatcagtggtcacacaagccacccacagtccagagaggaaagacaaggctcctgcagagaagaaacgttgcccccctcctcacctcccaagctcagggccctccagctacaggcgtgaaggggagggagagacagcgaatcctcccactcctgcgttcacgccacccaaggcattcctagaaccctggcaccaacccccttgggtttagagtcggcttccaggagatactttctttcccctaacaccagatcaagactggactgaaaagagtagccttggggctccaataacaggaaaacagtaaaactctgttctgggcatcctgtcctctttcacctgcgtggcttccagcagggcctgacgcagagagggtggaggggactctgctagccaggacacgttcagggatggtcataccttggggcccaccttccacctcattcccctggcatttcaccagaatctaggggtggggagagaatcaggactcccaaattaccgttctagacttagataccatggtagacggactggtctgtgaattgaggggctggtccacagagcggggaggtcagtgagagaaaatgagtgatgggtccttgaaacggggtgaccagatttgaagtggggggtcagaagagcaggcagactgggaaacttgtctttgaaatgggggtgtggtcatcacacgctcatctctagcttttgcatctgacttgtgaaatgaaaggggtgggctccgaggggttatccctgaaggggggtgctagtctgtgaagtggggggcggccctggagggacggggagcaggtcgaggaaatgagggagcagcccatgagatcgggcagctgctccccgagttgggcggtcgatctgtgaggtgggggtggggagaggtctgcgaggtgagggtcccgtagctgacgaggtggtctgccgcaggaagtctcgtccctgcagcggacggggtgggtccctgaggggcgggctggtccctggggcccttctgggagatggtgatgggtccccgaggtcgggggtccagaggtgaagccgtcccagacggggggtcgctgctgtgcggtcggtgccggggccggcctggcccgagactaaggcccggttagggatcccagccccgcggagccccggccggcagggacaggagctgaggccggggccgccgagggtgggatcccgcggcccctgccgctcgctggcgccctcctggccccaagctgcgcgcctctcgcctcctcctccctcggcctcccgctcactcaccgaggtcgtccatggccggaccacgggcgccggctcagggtcgcgctagctgcccgtcccggggccgctcgtctatgccccgcaacttttccgccgcgagcctcggcccggaacggaacgcgccgccgccgcgcgcgcccgcgcccgcgcccgccgcgcgccccgcccccggccgccccctgtgcacgcgcgccccgcccccggacacccccgcgagcttgctggccccgccccctgcgcacgctggtcccgcccccgccaagagcccgggcagtgggcgtcgctgggcggggcggtggcgccccctcgcggctaagcgggcaggtgggcggctcccaggcctccagccactcccatccatctttctgtccctctcaaagtcacttgcctgaccctgcggatgacaaatccgtccacagtcagccatgtgtctgtgcattcgtcagccactgggtcatcacatgcctgtccactggacagtcagttttgcccacctgtccgtctgtcacctgtaggtcaccacccaggaggaccataaatcagtaccaggcaaggcccggagcccgtggctgacctttcctggggtcgtcctctggatcaatggcagtgcagctcgcagttcaccctttctggcccaaacccaatacctgtgtggttccatctctcttaatattacttccacacagccaccctccctagacacttttccaaaactgcatggggcagaggggtccccagattagacattaaagggaaaactacaggaaagtcacacccagtgctcccacacactcggaaattgggtaataataacaactaccatttattgagtgtctgaatagacagacactatatagctattctctaaattaatcctcctagaggtacttccctacccgttgggatgggtgatggcagtttgtggattttatataaaactgctctgcaagtacagcttcgagttccccttgtccctcaagaatccaggccttctgggtcagatcaggtcctccagaaagcagatgagatgctgagataaagctaggggtaatgcccgtgacagagaaggggaaataagcagggttgggcaaggagactcagatctgacaaacaggtcaacccatcagggaattccaggacaaaaaaaatgagaagtctccttgggcagaagtatccgggttccaatgctcccaccatgttcagtcattttataaaggcagatccaagcagcttctgtggctgccacattctcctataataaattcaagaccaaagactgttcctcaaacactctattgcgtggttttccagcatcttgcacatacctctattttgttttagtttttgtgtttttgtttttgtttgagatggagtcccaatctgtcgcccaggttggagtgcagtggtgcaatctcagctcactgcaacctccgcctcccaggttcaagtgattctcctgcctcctgctgggattacaggcgcataccaccatgcctggctaatttttgtatttttagtagagatggggtttcaccatgttggccaggctggtcttgaactcctgatctcaggtgatctcctgcctcctggtgggattacaggcgtgtactaccatgcctggctaatttttgtatttttagtagagacagggtttcaccatgttggccaggctggtcttgaactcctgacttcaggtgatccgcccccctcagcctcccaaagtgctgggattacaggtgtgagccaccacgcccagcctgtttttgtgtttttaagacacagtcttgctttgttgcgtaggctgggatgatgaataagactaacatgatgtctaccttcttgaatctaaaggtgcacgcaaaagagcaaagtggttagcatgaaggatgagtagcctcgccccactcccagctgtgtggaacagcatgtgcaaaggtctgtagacaagacatttaatactgaccacaagcctaggagatgagcattgttagccccttttacagctggaagagttgagagtcagaggttgaattactccaggtcatacagctaataagtaaggaaactgagatttgaacctggggaggcttatgccaaggcctggttatgaaacggctaagtgaaactgctaacaacttagaccaaccccagggcat

SEQ ID NO: 916739 - DNA, 4001 bp, Homo sapiens
agaggtgaagagcaggaggacagagggctgccagactgctggtctggggaacatgagggaccccagcctttgctcacggtagaagagggggctggaggatggccacagagcaggaaatgctccctcctctgtccacagcccctagaccttccccagagggaagcacgccagctcacaccacacttctcctggggtcattttcagtccctgataaccctggataggggtcagtgttcaacagcccccactgccctcagcagacacctggttgactatgtttcctcaattactgcacccccaagcacaccatatacaatccacagatgactttcacacacacacacacacacacacacacacacacacacacacacacacaccagactgtcccctctcttccctcctccccagtggcaccgcgtggcatcaccctcattggcgagcaggaatcagaacagagtctacaatgtcagcaaagggctgtatgcgacagtcactgaatccaatcccagctccaccactaatcagcaactaacctcgggcaagttgctcacctctctgtgcttcagtgtcgtcagctagaatacctacttcagagggctgttgtgaggaaatgataagggaacgtaagggaggtatttagaacagtggctgccacagagtgagtaacactatattaatgctggcagttatggccaggtgcagtggttcacgtctgtaatcccaaaactttgggaggctgaggcgggtggatcacctgaggtcaggagtttgagaccagcctggccaacatggtgaaactccatctctactaaaaatacaaaacttagtcagatatggtgttgggcacctgtgatcccagatacgtgggaggctgaggcacgagaatcgcttgaacctgggaagcagaggttgcagtgagccaagattgcaccactgcactccagcctgggcgacagagcaagactctgtctcaaaataaataaataaataaataataaaataaaaatccacaaaaccccttttgtaattgtggtcttagatggaagctcaatatataaacagagaaaagtaagcagctctgactgaagaagatgacggccacaaactcccaagcataggaggaaatgacatcctaaggttccttccagctctggaagcaccagaggactctaagaaagaatggatcagtccagaagcacagagggggagtgcagactgataatacccaacaggccattaggagggaaaatctcagacagtcgaagcagggagaagaggaaggacagagcccaagccagtggtgcccaaaggagctgctaccagcaatgccctcaattgccagtgatcagccaatcaagcatcccccaggatggtgacaccccagcccccatgctttggccaaagtcaggcagataacagctgtctcctggtcactgttcctgctgctctagaggcacaaacaggatgtttagaagcagatgaccacaagtgaccacaggaagccatgacaaccgcctccaggtaacgatcttcttccccagcttctttccggcttggctgcctccaaagaccagacaaaaagacttcaagtgccaacttccaaagagagagaagggggaggagttcttggaaagttcaggacacagcagaagaggccatttgaggtggtgaggcagggaagaaatgagaccacccagctatcccaacagctacctcacctcaaagacgcattgtgcctgatgaagctaagcaggggtgaagaaactgcacatccactgcttgggacagaggaccttccaagacaggcagcatgtgaccaggcaggctcaggagggctgccaagtcgtgtctctgaggagtgactgcagtgttccaggcatcacgaccactcctccacacccaccccagaggagcccatcccactcagctgtcccagagcacatcagtgatgagaaactgccttagccggccagccgagccaggagtacacaggggaaatggcaaatccagaggaaaccaagtgcaggccattggacactcccatttccacctaaggaagaggaatgttcctggaaacagagggggcaaagctcggccaggactctctgagccacttcaaacctccaacagagcccagggtgggtcccacagatcaactacccctaaaggggtacagtcactgggccagcttcatgacacagctgtgtccactcagtgtacaaccaccaagttcacagtccagaaaaccaactctccttttttctactgctactaggagcctcaggggccagaccaccccatgaggctttctggatgcctagagtgctaggagaagcccagggctgatctgggagtggatctcagcacagctccctgtggcagctctcactaatattagtgttagatgagcgattagtataaaccaagccaccaagccacctcctcccccaccacttcctcatgaaagccaccaaagaggctcaggggaaattaaaagtcatataaccaaaacccaacttaacaccaccagcccaagggtgtggccatttcacctccacagcagagttccaaacattctccaacccatggcgccatgaagagtcctaaatcacattcttccagaaagtaactgaagtcagattcttcccccaggcctagctaagcaaccaaacagggccaattgcactaagtgcccaccaaggccacgggaaatgcagccaacctaaagatgaagtggaagcttaaattcgaagagtgggccaggtgcaatggctcacgtctgtaatcccaacactttgggaggccgaggtgagcagatcacttgaggccaggagttcaagaccagcctggccaacatggcgaaaccccatctctactaaaaatacaaaaaattagctgggtgtgatggcaggtgcctgtgatcccagctactcgggaggctgaggcaggagaatcacttgaacccaggaggtggaggttgcaatgagctgagatcacgccactgcactccagcctgggcaacggaacgagactctgtctcaaaaaaaatcaattaattaaaaaataaataaggcccggcatggtggctcacgcctgtaatcccagcactttgggaggccaaggcaggtggatcacttgaggtcaggagtttgagaccagcctggcgaacatggtgaaaccccacctctaccaaaactacaaaaaacagccagcatagtggcgcatgcctgtaatcccagctactcaggaggctgaggcaggagaatcacttgaacatgggaggtggaggctgcagtgagctgagatcacgcccctgcactccagcctggatgacaaagcaagactccatctcaataaataaataaacaaacaggccgctgcggtggctcactcctgtaatcccagcactttgggaggtgaggtgggcagatcatttgaggtcaggaattcaagaccagcctggccaacatggtgaaacgctgtctccactaaaaatacaaaaattagctgggcgtggtcgtgggcgcctgtaatcccagctatttgggaggctgaggcaggagaattgcttgaacccgggaggcagagactgcagtgagccaagattgtgccactgtactccagcctgggcaacagagcgagacttggtctcaaaaataaataaacaaacaaacaaataaatgccaagagaatgataccaaaagccaaaccctccaccccaggagttgtcaagattatcccaagaatgaacgataaccatcaccagttactgagcactttgaaagtatttcgggaaagtatgtcaggaaatgcacctatttcatggattaggagaccaaggctcagagtgtaaagtgatctgccagggtcacacaagtagtaggcaacagcattgatacagaaccaagtgtggctgatgtcagaggctgggttctatgccacctccccaccccaaacccagagagaactcaggttctccagaggaggaagtggtttgc

SEQ ID NO: 916740 - DNA, 4001 bp, Homo sapiens
atggagatgggatcttgccatgttgcccagtctggcttcaaactcctggactcatgcaatcctcccaccttggcctcccaaagttctaagattacaagtgtgagctatcgtgcccaacacccatgcgattcttctcagtctcattttatttgaactttctatatttgacaatatcattactctctccatctttctttcctctgtatattctgtaatttatatctctgctgtttccattgctagatgaggtcctcaaaacttctttatactactgaaatcaccttcgaattggctctccagtttcacgtataaaccagctgcctctgccacaaatacattgtaactaatcatctttcaagccttttcatatgatcaagttactccactgctcaaaaacatttgactacttgtaaattcttgttaagttctcagcatgctaagactccttatgatctatgctttaagctttactgctccctgatgatccatgcttttccactggagatgacattcttttcttgaatacttggtaaactttcactcattctttcataatgagattttaaaaataccttctttgattaaaaaaatttcctcttccctaattcactccctacatactccacaggcacctctaagataaccgttgatatctcttgcatagacatacaatattgtaatattgtctcttccagcaggctgtgagtccccagcatggtatataccatgctgttcatagttgaacactcagcccttaatacggtgcctgcatcatatatgtttacttagtgaataaacggaaaatacgcatccaacgatggaaacacttgagtttcttccactatttcttatgacttcagtgattgctcatgtttactttatatcaacaaaataatgtagaactttttggaatacacacatgtatctgaatatatatggtctggctattcagtataatcaagaaagcaagccctacatgcatttaatccttcgctgattattttacaaaactttactagaaataaagtttcttctatcttgggagttcgaagtatagaaaacttacatatgggattctttattaattagttaagatgcactaaagacttggcaactatctggaaactaaactcaatcacctacgataattaacaaagggggctgagggccgggtgctgtggctcaggcctgtaatgccagcacttcggtaggcggaagcgggcagactgcttgagcccaggagttcgagaccagcctggccaacatggtgaaagcccgtctctactaaaaatacaaacattagcggggcgtggtggctggcgcctgtaatcccagctacaggctgacgcaacagaagaatcgcttgaacccgggaggcaaagcttgcattaagccaagatcgcaccactgccctccagtctgggcgacagagtgagactccgtctcaaagaaaaagaaaaaaaaataaaaagaaagggggctgaattttttgtctaaatacaaagtcctcatgtctgctctgacattacaaggatctgagcacggatcagccagctttggtttctcggctataatttgcctcccactcctccctgcgcctaagagaaagctagtgaggtcatctgaggaccaccaagcagtttctaaaatctgggagcaataagtgcggaaaagggcgcagcaaaaaaggaacccggaagaagaaaaagggagggggtgggaggaaggcctccagtgctatcccctttggggtcggggaaagaggcggaaccgcctgagcaccgccctacctgctccgcacaagtgacgcccgcgatgccgccgccgaccaccacgaacttccctgccgtcgggggagggcgcgctgcctccatgctgccggactcccagtggtttactgaatatcgcggcggagcaacgggactctggactccaggagaggaagcagccgcgaggcggtcacttccggtgccttaccagataatccgacctacgggtgctcgggagctcacactactcatctcgagtacctgctgccggctgcgtttcggaagcaacgaattgtctcgtggtgttcagagctttgcgttactattactacacctgaatgtagttattccatgaaaatttgacaaagagaaaaccaaaaaattaaaaataaaaaagtaaagaagatgggttgcccaaagaagtttgataaattacatatctaaagatagaccagtgttctcacgggacaaaacattcatataataaatgaattggtgtgaagttctcattatttgtttctgcgagaaattagaggcacagattttatgctcttatgagtagaaggagccttcgggaacatcctgaccccactcctgtcatttttgtagatgaagaaacttgagtcttctgaaaaccacttgattgccaccgttcacctaacaatccaagatttttgtttgtggaagcacaaaaattcttcatgacaaggcaaaacaatactactgaattgttctctaaaaaatcatccttttcatttacaactttgacctcagctaaagtttccaggaagaatgtacagttgctttccattttgtcaaaacaaatgaacatttcttaaatttccagtcaatagcagcatgtgtgagggttgaatgaaatattcccagtctcggttttactgtgaatttttttcgtggtcaattgtttttaagaaattgctaaatcatttttaactgtttttactatattattcactattcatattattttactatttactattacctttgctgtctcatataactttccctaggagttgttttgtaatggtaaggtattatctctcaaatggttcactctaaaactggtaattacccgagtccctttaattctttaaacactgagaataaccattatatattaacaggaaagcctaccacgtatctaattacaggcatttactgatacctgtaaaaatcattgttctttgatttaccaagttaaatggtaagcggtttaataaacgtgtctaattcctgttactagtatagcaaccaaacaaagcattcatttctaggaggaggaaatacattccttaagcccatttagatctcatcttgcttcagcttattttcacattatctcactcacactgtgttccattcaggccacactacacttccagatcccaggatatgccattttctttctgagcatttgcacatatctttttcccaactacttttccctggctaactcatcaacctttggtttcatcaagccattgcttcccctttaagatactttatctaacatcctcaagacagctaggtgtcctctccgtgtgttcttatagcactttgtcatcctctaaatttagacttatcccactttattgtaaattcttactgcctgaccccaccaccaccataaactgcttacataatctcagggattatttttgtctccctttgtatctccaatgtttagtagggagtatgtattcaacaaaaatgtgctcaacgaaataggaagttggtggagcatgaaactcccctgaagtccttctaaagatttttagattcattgtccagggtcaggatcctcttgtatattgtgacaggggtttcctctttatggaagtcggaaggaagaatggagtggaatttaagctcccaggggaaacggaaggagatcatcgtctgtgggaggggaagcaaagtagtaggaggctcctcaaatgtaaaggggtaatgactccacactctccttttttcttccccttgtgaaggctggcttttttgtcaaaggtgatgtagggataagacctagctgcctgccacactggcatgaatatccaacttttagaaatgtctaagggttaaagaactttcagtgcatctcaccttaatgttgattaaattagatacatatactggatgtaaagtgggttaaaagtaagatgtaggtaacttgaaacatgttatccacagggagggcagcaataggta

SEQ ID NO: 916741 - DNA, 4001 bp, Homo sapiens
agttaatatttttttaacagatattgaaatcagaacaaatccaggttgacaaacttgcccaagatgtcattggtagtgagctgctaaaatgttttaatatatgtttactcaatcatgaatgtttgcattttaaatatttgcctctttagcagggactaaatgtagcaaatattaaagtgataacttttaattttctctttttcattttattcccctgaaaccttcatctttctgaagcttactgccccaaggcaggggagaatggctattggttctcttttgtagtctctcacatttatcacatcaagggttaattctggagggatgaagttaagttttctccttataaagggagaaaacaccccttctgcttgtgacaactagggcatgaggcttgttgttctttgttcagtggcagacacaacgtaaaaggatggtttcaatggcagcatggtccaatgtagtgtaggaatgcatccagaaccacaaattgcttaatgtttctgacccaatacacgctactcgctttatccattcagtctgctctcagaaagcaaaatagcctccacatattcccatatgctttctggatggagagcagctggaagtagtagagcccactgctgtagatgaggtagagggatagtgggggagaaatgtacccctaccggttgccaggaaattgtgcaaggaaaaagcctgaggaaagcaggagacttactggattgaactccttatttctgctttctgcgctttggcctgaagaaggctatttgtgttagatggataagggtaacacacagagcagagggaccccttatccctttcccgatttgggactctgaagacttccctgtatcagtctggaatacaggagacacgataggcatctagaagtgcagtgtgggtatgcaagagagaggtagaagtttaacctctccaggacacctcagtgcctatgtgctattattggacccaagagttctcaccattctctggaagaaatgtaaaggcagctgggttaaggccagggaccttaaatggcctggactgcaaaggggcaaggtgaccctgcatcacaggctgtgttgaaacaatagccatagtatttgaggcaggatgcaaaggtaggagttctatgggatatgaaacagctgaagtgagacagtcagttagagaggactgttgggtcctgaacacacaagagaaaccagatggctaaacttcaacagtgcatgccagcaagtaaggagaagtcagactgacagtagccaagaaggacggagaactttgagaccaaggactctgacagttttctctattaggagttaatggagaccacagttctctagacactatagaggagaggaactggggagaggtggaaaagaagtcttacaattattgagttgtaccaacttacaactggatagggttaaaattattttccctgctttggtcccccactgggggctgttggtgaagacttgatacatgattgaaaaataaaggagctatactttctgtatatatatatatggcctacaatacatgttaagttgcacttcactatatatttcgaatatctctatattcagtgccttccatccaaaagaactgttctgtgaagttgggatctagtgttttatttaatcatgcttcctagtgactaatcgtatttatgactctgattggcccagtgtagaaaaaatgatttcaagaatagaggataaatgaaagacaaacaagggattaactggaataatttcttatatttggaaggtattgtaatgagtggaaaggtggcatttacaaaggaaggcaaagcgaagacacaagggagagactgaaacgcactctggaggaaggggtcttgagtgagacttacggttctgtagagtttgagtcactggcagaaagcaggataagaagtagcacaagacataaatgaagaagtctgtctttccgcattgtgagggataaatctcagggttgtgtccaactctctgccctcagcctcgccctggagaccagctgagtttaccaggctttatgtggccactatgtacaaacaagccccaccccaaggcctctgaatagagttcagaattgagcacagattccctaaaagggtcattactctcagtggttgcctcatttttctcaaggctaaattctgataggtactgaggcatgtctggaagataaaatttgtattccatttagaatgagctttgacagcaaacctcctgataaggaaccttcaacctacctttctccatctctttcaaaatccttacaagcaggtgacaaaggatgctgacaaagaatgtcagggacatgttaccatgatagtagctcatgcattgcagattcatttctgggactgagtgagttataactatagactttagggtttttgggttttcttttttagcagttgattgagtacatggtcctggaagaaagtgatataaaataaggatttcaagagtagaggatcaatgaaagataaaagagataaaagatcaaagagattttagaaaggagttatcaaagatcacacttgtctatttcacagcattgacctgatcagattcttagttgatcctatctgtccttgttactgtctgagcactctaacgtttgagtcccttaaaccatgtcattgactttatctgagattttttttttgagccatactgtgtgctaagtgctattctggtgatgaaaatacaatattgaacaggatattcagtatccatgctctcatagaacttgtagtacaatgatgatcacatataaaccaccagcagatttaatgccatccttagactgcagacattggtgtctgtttacatactgtattgcttgaaactttttaaatcaactttctttctctttctccatatttcagcctaatcatcccttctttggagagcaaattcctggccacactgctgaaagtggattccttcctattagtttttatttcacatctttgtttcttttgtcacattatcatagaatgaaataatttcttttaaattatgaaatgttatatatatatatactcacaaatatagagagcaagataaaagacactcgtaccttacatgcacccaactttaataaaattaaacacttgccaagtttgtttaaggtcatttcttcttaagaaatgaaagatggcaatggtagtgctcttttaaaatttgtctagaagcttttccagtttttaccagatccaccaacccaaaaaaagaaataaatcaagacaaatatggttggagtttcctttgtaattctctccaatctcatttcccttccaatgttgtgggattaggaagttgatatgtattcttcaagatgtgtttatgtttttaatccatatttatgtaaataatatatagcataattttgtgttttgtattttatatgtataagtggtatgcacatattgtaaaatatgtcatcactattatggttttaagacttattagcattgataatgaggataaaatttattaattttaatgaccatctatacgacattctattgtatgaatgtggccgaacctgttactctattcccctagtgctgaattttggattcttcatagttttcaacattacaaataatactgctacaaatacggtatgtctacttaagcatatttgcaagactttctctagggtatatagcagagattgggttataggctatatatgtatgtacatcttgaaatctatcagattggtaaattgctcttcagagtattacatggatttgaatacccatctgcaacagtggatattttcagtttattatatatttaccatcgttttactctgctaggcattttactttttatcaatctgatgagtgaagcagtatcttgccttaattttcattattaatgactttacacatcttttcatatgtttatggaccatttgaattctaccatcagtttgatatctcaacacaatatgtaaag

SEQ ID NO: 916742 - DNA, 4001 bp, Homo sapiens
cacctgaggtcaggagttcaagaccagcctggccaacatggtgaaaccccgcctctactaaaaatacaaaaaattagccgggtgtcgtggcgggcgcctgtaatcccaactactcgggaggctgaggcaggagaatcgcttgaacccgggaggcggaggttgcagtgggccaagattgtgccatcgcactccagcttgtgcaacaagagtgaaactcagcctcaaaaaataaaaaaaaactatagatgtcccttcttttctgcctagcttcaagaagtacacaaaacaggaattcagaacaccatttataattatctcctaagaatagaataacttagacccaaaaggtcatttaattattatctttcatgtaacatgacagcacataatgaaacattcatcacttatctgtcctgaatatttaaaattcattatttgtatcagtggaggctggaagtacagctggaacagtggcagattgtctccacaagctctggaagaatgggcagggaatgacaactaacatgtaataatggaaagaaaaacagccagggcagagactggtgaattgtaagacgaaaaacagtagaaaagcaggcagctagagaacaaaatatctcagagagctgtctaattttaattcattcctttatattattgctgttttaatctttaaagaagacaaaccttatgtgaattgaattgtctagaaaaattatgcttcaagtttccagaccctctaaaatgttgttgttccggtgttttaatctaacttcttgctagtgttaattgtctgtctcttgacttataataaaaccagttttcacccctgggcatgaaggaaaggatttgttgggcttgggtaacagaagaaaccagcagtgaccacagaataagggctctaacaggtagatgagaggaggctcagagtttgggctggccaggcagaaaccaaagaagaaccccacaaggaagtttggctaactatctactaccatcatttctgtactacagtacgaatttggatgaaaaacatggcaaacaaagagtgaaattccttttactcacatttaccaagtggcaagttcagaggctatttctgacccagaaaaatgctgactgctttaacacaaccaggatatgaatttaacactgtgtgtaaagccaggaagctcaagttttaagagtttattatatgagtcattttatgacttattaaatatgcgtttgtgtacagtttattttttggtaataaaaaaagtcaaaatgcagcaagaaccagtgaactcaggcccaaatagattagggattttactctgtcctttttagacttcattgtggactatatgacaaaaagggaagatttcttttgagagttgaagctggagtttttaaagagaatcaagtgtttctaaaagtgactgattcttacacatctccacttttattcaggtataaagaatgttggccgggcacagtggctcacacctataatcccagcattttgagaggcaaagacaggagaatcatttgaggccaggagtttgagaccagcctgggcaacatagaccctgtctctacaaaaaaatttttttatattagctggatgtggttgcacatgcctgtagtcccagctacttgggaggctgacgtgggaggatctcttgatgcaggagtttgagggtgcagtgggccctaattgtgccactgcactccaggttgggtaacagacagagctgggtaaccctgtctctaaaggaaaaaaaaaaagtgtgcatacaatgcatttccaatcgttacctgtgtctcctgacgcaaactggtatcttcacattctttctcaatttcttccttacttggagtcttagatataaacttgtttttgtttacagattcttccaccagttttttttctgattctttcattatttccagggtctcttgagtagtgttactgttagacatgttcttcaatagaatacagtggcctctatggactcctaaagaaacatcaaatgcattaagcaggaggtatgtatccatacttaacaaatacacaagactcgtatttcacacgggtacattttttccagcagccttcctttaacccagaaaagagttatttaataaatgctgtccctgggttcatttctttaaaaaaaaaaaactttattgaggtaaaattgacataaactgcatgtatttaaaatgtataattttatattatgacacatgcattcacctgtgaaaccatcaccccaatcaaaacagtgagcgcattcaccatgccccaaaggttcctcatgtccctttgtaatctcttcctcccttcacactaaccccagccaactactgatctgttctgtcactacagattagtctgtattttctagaattttatataaatggaatcaatcatacactgtctggactcttttactcagcataattattttgagattcaccaggattcagttctaaagtagcatgagccctcttgacactttattttctccccttgttccctacagaaatttgcgcacatttctggctcaatcacttcacccattagatcctctccagaaagaagaaaattataaagctccattgactactagaaaggagtatgctcctttcccaaggaagaactttcacagctaccacaaacccacaacactgttaaccaacttcaagctactctcccttcaaaaagaagtaaaatcagacaaagcttaaatggttatagaatctataaaatcttatatatatatatatattttgagatggagtctcgctctgtcacccaggctggagtgcagtgacatgatctcggctcactgtaagctctgcctcctgggttcacatcattctcctgcctcagcctcctgagtagctgggactacaggtgcccgccaccacgctcagctaattttttctattttttagtacagacagggtttcactgtgttagccaggatggtcttgatctcctgatctcgtgatccgcccgcctcagcctcccaaagtgctgggattacagtcgtgagccaccacgcccagcctgcccggctaatttttaagattttttttgtagagatggagtcttggtatattgcccaaactggtcttgaactcctggacttaagtgatcctcccacctcagcctcccaaagtgttgggattagaggtgtgagccatcgcacccagccttaaattctttcctttatcttaagcaagctgaaaaaacaagaagagaactttgtagacatctgtccttcagaaagattgggtccctccctggaggaggaatctttactttgctatacactatttgggttcagtcaatctactgtctcccagtgatggagtatctatactgcagggatggctgcttctttatcacttactatcactacctgggaaatcctgtaatgaagcctacacagttctccaaccacaaactaagaatcagaagttgatactctacacacagattcatgtcctcaattgccgaagtcaaacatgtttagctacaacaatagtttgcagaggtttctccttatacaggttactgactgtacttcaaccctgaagacttctttccctcctttactggaaactctcccagatgtcacatctattcccagtgtagccctagaaatggaattaaataaacagacaaatggatagcaatgcttcaagaaaattgtcacaacagatattttcctctccttcaaatcagtttaaagggtaagaagggtaagacccagaagtctttcaagaagcaaagttagcctcatcctgacataagttagatggtctgccaggctactgctttgtgattttttttttttttttttttgagacaggatctcactctgtcacccaggctggagtgcagtgatgcgatcatagctcactgcagcctcaaactcctgcgttcagggagtggtggcatgtgcctgtagttctagctactcagaaggctgtggttagagtac

SEQ ID NO: 916743 - DNA, 4001 bp, Homo sapiens
actatccacttcatagggtgttataagaattaaagcaagcagacagaaagcaagcaaaataatcagcacagtaagaactcactaaatgttagctattgttactactttacctaagtaaatctctaaacttccaaatgatcctaggtatttgtccagtgaattttcttgatctaaaacaccaggctctcactaatgacactgaacaataacaattcattattaaaattttgtcagtgttctggtacaaggattttttaaaaatgcagtttcctggcactcactttttcagatatgctttacatacgagtaaaatcagaggagtaaaaatagaacatggaatcagagccagagcgtcttgtaaattctagactcagtagtttaataatagcatcaaacatccaatgtcacaacaattaggagattacgcattctattaagtagtgtcgatgttctcacatactacacatttactaattaagacctattgtgcaagttggggcggtaattaaaggcagacaacttacactggaccaggtcatcagtgctttttctgtatatttatcctgacaaccctatgagctagatactactattatggccattttaacagaagaaacaggcacagacaggttaagtaacttacccagtatgacacagctagttaaatggatggaggtgagacatgaacctggacaatcaggctcaaaagtccactagactttactgcctttgaccaaattggtaagtcaaattagtaggataaatttctcctaataacatcaaaactgatttctctgggagaggtggggtgagtacaactccctcaaaggcctggcttcactctcaatcaatgataacattttaacacctttccaatgtacctgtggaagaaagccgaccttttattttacaggtaaagaaactgagtaacagcagcggcttttagtctggggaccaattgttggccagtattcacttgatgtttcagcgtgggtcaatcgacctcgcagaatatgagtgacccgcaagtcagacccacgcaggctgcaatgaaactgcgtaacacgcctaggcaagcggtcatttcaaaaaacctccagagatggctcttttgccattcctgttactcaggacaaaatggaacttgcataaacacttagtcatcagtaagcgctgaagttacaaatcacctaattcgcaaaatcaaatacgcagctaagttcctaattctgaaagaaagaaaaggagctaacatttggagactgcaacactgacacctgggacccaggaactgcagtaaatgggaaaaaacagcccacggacggagaccacaacgtgcgcagccaccacggggaacactggggacttttcagggcccttccacttccctcccaacagcctgtcctcgcgtctacaggctgccccgacctggtgattccccagggcgaattcggaaaggtaaaccgaaggcggagatgacaggcctgagatttgccagcctacatccaggggaccagggcggcaaagtttccccagccccggaggggtaggggccctgaggcgccccctcccgctccccgaggtccgcacctgcagagtggtgatgtgcttgtcgttaaacttgttctcgcagtagcgcagcaccagcgacgtcttccccacgcagccttcccccagcagcaccaccttgaacgagtaggctcggcccgccgccgccgccccgccgccgccgccgccggccgcagccatcccgtcgcttcccggccgcccgagcccgagtgtcgcgccgccctcccgacagccgcggcagcgccttcacagccacggccggctcagcccccaccgccccggccccgccgacccgggcgctgtccccacgccctcctcgggcgaggcctggaagggctgagggaaagtccgagaatgaagggccccagcccaccacgtcaggcaccggaggaaaagcgaagaacgatccctctctgcctccctctaatggcgtctccttcctcctacgtcacacctcgggtcacgtgagcgccggtgccggggcggcccctgcgactagccccagaagaacgtgcctggacgtgggcggggcttctggggcatctcccggggtggagctggatgtgagtcgagcgcctactggcaatctagggcagagccccgccgcttgcgagccacctctgcttttcagttggtgggagccagcgggaataaggaaccaggaatttgaggcgagcccagctctggtgaaatgaagggcagaacttcatcgtttttgcatgttcacaatgctaatgatctgtcacaccagaggtcactgtaaaccatatctgccaaggtgcccttgaatctctctctgtgggatcccgaatcatagcgcttccaagttcctctgaccgcctggtcaactactccatcatctttcaagtctcagcttaaaccgcgtccctgaccacccaatccttcccccatccttccattcccccacctcacaaaattaggtatttcttaccaccagtatacctcctttactagggctttacacactccatggatattattaatactttgctaagtgtttatcgactctcattagactataggtttgttgagggcaaggtctgtataagagctgcccacctttgaattcctaaccccaagtgctcttcagtttttctgactttcatgaagcctctgacgttccatggtactccaccttgaggtggcttgttcgatgattgcttgttttttctcatctgcatccccattcttttttgtttgtttgtattgttagttttgagatggagtatcgctctgtcgcccagactggagtgcagtggcgtgatctcagctcactgcagtctctgcctcctggttcaagtgattctcctgcctcagcctcccgagaagctgggaccataggcgcccaccaccgcgccccgctactttttgtatttttagtggagacagggtttcaccatgttggccaggctggtcttgaactctgacctcaagtgatccacctgcctcggcctcccaaagtgctgggattataggtgtgagccaccacgcccggcctgcctccaagaaaccatactcctccaagaaatcatactaatatttctgaaaatttactggaaacctggtgtcaggtaaacatttttttaaaaatcaaacttctttcacacttcaaaccaggttaaaaaaaaaaaaagaggccgggcgtggtggctcatgcctgtaatcccagcactttgggaggccgaggcgggcggatcacaaggtcaggagatcgagaccatcctggccaacatggtgaaaccccatctctactaaaatacaaaaaattagctgggcatggtggcacaagcctataatcccagctactcgggagactgaggcaggggaagcgcttgaacccgggaggcagaggtggcagtgagccgagatcgcgccactgcactctagcctggcgacagaggaagactccgtctcaaaaaaaaaaaaaaaaaaaaagagagtcggttaattcattcaacaaatatttaaatgtgcccaccatatgccaggcactgtgatcaacaagataaaatgtctctgtcctcacagagcttacattttatcagggaagacagacatactcaattgtacaataaatgctttcatcttgatgaaacagttcagagtatcttgcaagcatatatgagaacccaactgatttagcatgctagagaagctttccctggagaaagttatctttgggtaagagtaacctagtcaggaaggacaggagagctctgcaaacagagataacagcatgttcaatggctttagataggaaggagcatctaaagttgagcaactgtaaatgtgactagaatttagggaggaaaaaaaaactccagaagagaccatgaggaagttggggatcaatactgaaagggtctttaagcaaatgaaggattttcgtaagatgactgacataatcagat

SEQ ID NO: 916744 - DNA, 4001 bp, Homo sapiens
ctgttggatatcaacgcagaggtccagatgtcttgcagagggataaaggctcctgaccacggcgggctgtcactccaaaaagagagaaatggccccagtgccagtccctcagaacccaggccagggctgcaaggaaatcatgtaaaggaagaagcctcaagaccctgaagaataccaaaggccatctccaagagaacactccagagcttgcctggtttcccttcattcaaaccataaccagtcagtactccacctttctacctccttccccaacctcagttactcttccatctccctggttagcccccagctttcccccttacctctcccctcctccagcaaccacggaaacctcagccatccttcacctgatccaaaccaccaaccacatctccatccagctttaaaagggaggccaaaaccacccacttccctgacctagctctgacatcgctacccaacactcctacatcccaagtcataccgctcacttgatttgatcccctttccttaacagtccatgggctctaccaccagcctggcctctgcctccaatcataagacatccctccccacactcagctcaggtctggtctacaaactgagcatgctcccaagactctttcatgaacatcatataaccccagcacctcagtttcgctcccataaaccttctggggcctgccttcctgacctcttggtcactccataaacctgctcacctgccacactccaaacagctctaaaaccctccaccttttcccagaaaccagtctaccttttcgaaggacacttaatattcattaattccttctgcaaatatgtcttaagcatgtactgggtgccaggcactgttctaggcactggagctagagcagtgatcagagctaggagccctcaagcagtgtgtgtgtgtggccaaagcacttttataattttggctgtcccatccccaggacccctctgtatatagtagtgtaacagcaaacagtgacaactcactatgtgccaggagctgtgagcaacactgcagaatctcacttaatactcacatcaaccccataaggcagatccaactatcattccatcttacagatgaggaaactgaaccacgcagggatataataattcagcaggaatatgccagaccctgtgcaaagccctttatccgacttacctcatttaaacctcacggcaatcccatgaggcaggttctgagaacgtcctcattttagatgggaagaaactgacgcttataaaggatactgatgataatgacaatagtgaacatttacttcgagcttactttaccgggtagggcgctacgcacttttcctactttatcccatcgaatcctcacaccacccagcaaggcacatccccacttctcagatgagggaactgaggctcaggacggcgaagcaacttgcccaaggtcagcgcgaggcaggtggtagtcctgagactcgaacccacgtctctccaactccagagatcgcgcgacttgaccaaggtcacacgtgaggcaggaacaggcgcgatgactggacccggcgcgcttggcccctccgccccgcgccccaacctcccctcggcgcggtccggagcccctcggcgcacccctggggcccagaccgccgggctgccccgcccgcccgccccgcacgggccggcacctccccgcccgcctgccgccccgaggcccccgcgggccgcgcccggcagggcccgcgccgcctccggccgctgcggccctcaccgctgtcgccgatgatgagcagcttgaagaggtggtcgtagtcccgggccatggcgggcgggggcggtgcgcgcgggcgggcggggtcggtactggcctcgcgatccgcagctcccttcgggctgctccggcagcggcggatccacttcccgaacaaacagccggaactgacagaaacacctccctccgctccccctcctcctcctcagcagccgccgccgctaccaccgcctccctccttcccgccccgccccaccactgcgcaggcgcagcgtctggcaccgccttgcgcagccgcagcctgagccggccgcgcccgggtcgcgcacgcgccctgacggagtcccagcaagcgcgggcccgtcttcctcgcgtctcctcggggagcgtcgtcgccgccaccctgggcgctgagagcttgcggagccgagccgctgtcgagtcccagcggaaagaagcccaaggtgccggagaagcccggtcgtggacgttgttgctccctcatcttcgagacccgcacgccctgcggagaggaaatgacaggcacgccgcgaccgtggggcggggctcgcacgagctccgggtttccagaggcaggggccggggccgtagaaggcagagtcgcgcggggaaggcccggtaccccgccccttccgcaccgacccctcccccgcggagctggccccggccccgggcctgtggagtggacgccgagggcggcgggcggcttccgagttggacagaacgggagctgccggcgggagcagagctgcgaggaggtggcctttgagggcagcgcggggtcgaaatcccatcccagcgctgtgacctcttggagcccacattgcctctttggtggaggggagggagtggtccagctccgagccgagcctgggagctgaatgacccagtgtgcaaggcgcacctcggagaccgaaagcaaccgctcccccggcttcaatttcacaccacctgcagatacacgtctcagaatctgcggctaggaagacctgggccgccagaagctaaacgtgtgcattttgtcatcagccccggtttctcgttttagagtgagttcccacctgccctacctaaactgacctgaaacggaaagttgtatgcccccacgaccatcctcactgcagaactgcagagggttttaagctccttattacctgtttcttataatcctgtccctttccaggcgagtatttatcggatagttctacttgttttatcaaacttccttttcttttgactttataaaaagcaatgccgggaggctgaggcgggagaatcgcttgaacccgggaggcggaggttgcagtgagctgagatctcgccattgcactccattctgggcaacaagagcgaaactccgtctcaaaaaaaaaaaacaatgttcgtccttaaaattatgtgcagaagtttactgaaaagtacaagttactatttttccttctgaagcactcctcacaggtaacccctgttagtttcacaggtaaccttaaaatgcttaacacatatttgttgaatgaataagtgccccccagtgaatttcctttgcctgtacaaacatatatgtacataccttgctttttctatttaacagtacacttttatcatttaacatctgcgtggtatggtactccatccgataaccatcggatgtactattatttaaccactccgctattaatagacattcatgctgtttatattttttggttataataaacattgttgcaggcgggatcattgaacaacacatggagtgtctgactcaagccttgagttgtttttccgggagctgagaatcagtgtggtgatatcgaaataacatgagcttggaatctgaaggtactggctagggagaagagctgctcatgtgctcccgatagaaagtcccccttggtcgggaaggttagggccatcctctgactcagcagttttaggaaatagagggggagaaggaaggtatgtaccttccttccaccagggaggcacgcccagccctaaccagccagcgaggcagtaggtcctcctagctcatcttcacaacctgggctggtgtcgggaagactttcgttccaatgctagctttggaatcctggcctccatcccttaaaagctttgtgatcttaggtaagtcacatcacactatctcaaagcccccgtttcctcacagaatggttgttttagagttatgtttgtaaattacctggcacatgtaggcatgtga

SEQ ID NO: 916745 - DNA, 4001 bp, Homo sapiens
ggaaaagggaagagacagtttagtattgtttatggcaggaaacaaaggtagtatataaagaacttttaagatatataaatgcatttgattaaaaataacaaaacaaaaatcaaaccttccaaaatactaattaaaaaaaaaaaagatttaggaggaatcaagcacactagtgcctaggcagcaagcttcatctgcccactgacattggtcttggcagcagacctgaaagttaccctgtaaattggctccaacccttctgctacccagccatgggcccagtttattactgcttgcacaaggacccagaagaagatttacccatatcccacaacccaggaatgatttgtctgtctgagcctccttgaaggacctgtcagcctttgtcccaaagcaggtcctaaaggatcccactctctactctagcctctctcactacagtcagggaaatgccccacctgtgcagggagcttctaggggaagcttgcctgcctgggctaccctggtgggtttgccagcctctgtcccacagcagtgaaggggcccagactcggctccagcccctctccctgcagttggtaaactgtcccatccatgcaggaaattactgggaagcatggatgtaggccactggtgcaagctcaccagcctccatcctacagcagagtgtaaggggtcccagtctcagctccagttccttttgctacagttggggaactatcccatctgtgcagggaattgcggggaaacatgcatctgtctaagcaaatgggacaggcttccaggttcgggtcgttggccaacttcctcacagtcagggtacccctaccttgagtcatcattaggtatatcctggctggagcaccatgtcatcttcgtggtaaaaatgggcttaaggcgccctctaccgctgaaatggctgcagcagtcacaggcttgacaacagccagtcttagatctctagataggcccactgaaggatgggcacaaagtcacactgcaaagacttgaataaataactaattcgttaataagcagacatcagtgtacatccacaagcattcagaacaatcagggaactatgacctcaccaaagagacaaaataaggtaccaataacagaccctaaaaagatggagatgtgtgatctgtcagaataaaaatcaaactagctgtgttaaggatcatcagtgaacttcaagaaaatacagataaacaattcagaaatttatcagaaaaatttaagagagacgctggaaaaaaaaaaaaaaattccctagctagaatgtgcagtgaaagcagtgaaaaatgcaatagagcttcaacaacagaattaaccaagcgaagaaacgatgagtgagctcaaaggcaggataagtgaaaaatatacaggtagagaagaaaaaaaaaaagactaaagaggaatgaagaaagcttacaagatctatgggatagcatcaaaagagaaaatgttcgagtaattggagttcaagagggaataaagaaagacaaatgggaggaggagccaagatggccgaataggaacagctccggtctacagctaccagcgtgagcgacgcagaagacgggtgatttctgcatttccatctgaggtaccgggttcatctcactagggagtgccagacagtgggcgcaggccagtgtgtgtgcgcaccgtgcgcgagccgaagcagggcgaggcattgcctcacctgggaagcgcaaggggtcagggagttccctttccgagtcaaagaaaggggtgacggacgcacctggaaaatcgggtcactcccatccgaatattgcgcttttcagaccggcttaagaaacggcgcaccacgagactatatcccacacctggctcagagggtcctacgcccacggaatctcgctgattgctagcacagcagtctgagatcaaactgcaaggcggcaacgaggctgggggagggacgcccgccattgcccaggcttgcttaggtaaacaaagcagccgggaagctcgaactgggtggagcccaccacagctcaaggaggcctgcctgcctctgtaggctccacctctgggggcagggcacagacaaacaaaaagacagcagtaacctctgcagacttaagtgtccctgtctgacagctttgaagagagcagtggttctcccagcacgcagctggagatctgagaacgggcagactgcctcctcaagtgggtccctgacccctgacccccgagcagcctaactgggaggcaccccccagcaggggcacactgacacctcacacggcagggtattccaacagacctgcagctgagggtcctgtctgttagaaggaaaactaacaaacagaaaggacatctacaccgaaaacccatctgtacatcaccatcatcaaagaccaaaagtagataaaaccacaaagatggggaaaaaacagtacagaaaaactggaaactctaaaaatcagagcgcctctcctcctccaaaggaacgcagttcctcaccagcaacagaacaaagctggatggagaatgattttgacgagctgagagaagaaggcttcagacgatcaaattactctgagctacgggaggacattcaaaccaaaggcaaagaagttgaaaactttgaaaaaaatttagaagaatgtataactagaataaccaatacagagaagtgcttaaaggagctgatggagctgaaaaccaaggctcgagaactacgtgaagaatgcagaagcctcaggagccgatgcgatcaactggaagaaagggtatcagcaatggaagatgaaatgaatgaaatgaagggagaagggaagtttagagaaaaaagaataaaaagaaatgagcaaagcctccaagaaatatgggactatgtgaaaagaccaaatctacgtctgattggtgtacctgaaagtgatgtggagaatggaaccaagttggaaaacactctgcaggatattatccaggagaacttccccaatctagcaaggcaggccaacgttcagattcaggaaatacagagaacgccacaaagatactcctcgagaagagcaactccaagacacataattgtcagattcaccaaagttgaaatgaaggaaaaaatgttaagggcagccagagagaaaggtcgggttaccctcaaaggaaagcccatcagactaacagcggatctctcggcagaaaccctacaagccagaagagagtgggggccaatattcaacattcttaaagaaaagaattttcaacccagaatttcatatccagccaaactaagcttcataagtgaaggagaaataaaatactttatagacaagcaaatgctgagagattttgtcaccaccaggcctgccctaaaagagctcctgaaggaagcgctaaacatggaaaggaacaaccggtaccagccgctgcaaaatcatgccaaaatgtaaagaccatcgagactaggaagaaactgcatcaactaatgagcaaaatcaccagctaacatcataatgacaggatcaaattcacacataacaatattaactttaaatataaatggactaaattctgcaattaaaagacacagactggcaagttggataaagagtcaagacccatcagtgtgctgtattcaggaaacccatctcacgtgcagagacacacataggctcaaaataaaaggatggaggaagatctaccaagccaatggaaaacaaaaaaaggcaggggttgcaatcctagtctctgataaaacagactttaaaccaacaaagatcaaaagagacaaagaaggccattacataatggtaaagggatcaattcaacaagaggagctaactatcctaaatatttatgcacccaatacaggagcacccagattcataaagcaagtcctcagtgacctacaaagagacttagactcccacacattaataatgggagactttaacaccccactgtcaacattagacagatcaacgagacagaaagtcaacaaggatacccaggaattg

SEQ ID NO: 916746 - DNA, 4001 bp, Homo sapiens
atatggataactgcactaattcaaaaagtacaataggatctattcagaaatcccacaaagcagctaaacattaaatggccatcctggtgaaagattacaagtattcagtaccacagatgagttgtttaccaaacacagaaggaagagttgtatcaaacactttggttcacaaaggtatacattaatatgtaacattactgtaatggaaaaaaatgcaatggcttttcatttaatagttaaaaaatggactacttaattgtataactgtttatttctataaattccacaagggctttaggattagatcacataagccgcatctggaatacactgtctgtccaaacatgaaaagtcctatcaaaatgcacagtactagtaaataaataacaaatgataacagaacaaggccccataaaactggtgaaatatttaacagtatcaaatatttactacgattggtctacaaccctattctgcctcttttctccttgatttgtcattcagcactggaagaaaaaaaaaccttcatgaacaacaaaatgagaaaaaggataatgaacaagaactgggtctttcaactgatttacaatggaacagttttgttgtaatcctcttatgggcccctcctccaattatgcaatcattccactgcaagagattacaaggcttttaacccgacactgaacggaaggagttggggtgaaacaggagagtgtataacaggtagcctccgaacaggcaacatttccatgaaactaaattgcctctcagtaatcagtactaactaactcagcgctcgtgtctttcaagaccttaccctttcatcttttttaatcccataacaaccggcaactcttcacatgctgcgacttccacccagcatcatcacttctggagccagtaagctcgcgcttcctgggcggtcggggcgagttgtcaacgctgggagggcagagccatgcaatcccacccgtgcagttcgtctcaactcccccgaacacaagtctggcggcacggagctgcctacttgggcgcgactccgggcgcctgcccggaatttcccaccaggtttcaccgaaacctcccgagggtgacctctacgcctcagcacggtgcctcgcgcgtagtttcctaagactgggacacgaaaccaccccaggtccacagccctgccgcgcggcgtccggtgttgtgagctgcttccgacttgttcgggaactctctcttcatcctcttcgcgaccgcggccctccgctcccggccgcgcccgcccgccgccaggtaacccgctggactcgggctccctgccccgggcgcgcgggaccgcgcagttaatgtgtaacgcgcccgtgcccgggggaggagccgccgcccgacgcccaccagcagcccagggggcggccggctgacccgggtcgccaaagtcccccccacacgccgcccccaagggcccggagcccaagtgcccaggcggagagcgagctcaccgggcctgggcatccccccgaacccccgcgtgccgcgccctgcacggcgccagcacctgcacctgccgcggccgcccctcctggccgactcgccagaggcgggcgcgcgggcgccgaggggggcggtgctctacgctccgggcctctccctcccgcggccgcactcacctgaagaacccaccgcggccgctgccggcgctcaggggcgctcacagagccgcagagagcgcgtcccgaagcagcgagaaacggaggaggacggcgagccctttccgctacactccacggcggcgggctcactacgccggcagccgccgagggaacgcgggactgcgcctgcgccggaagcggggccgggggccgggagccgggagcggccggtcctcacggagggagggcggggtaggggggtgtggccggcaggggcggggcgagcccggcatggggcctgggggcggacgcgcttccgcgccccctggcgccaggcggggctcgtcgcaggtgtcacggccctggcccgaggttcctccgcgggcggtttccctgggaaccagcgcgagccggagctgcgctctgtttcgtcgggcccgcgctctgtttcgtcgggcccgcgctctgtttcgccgggcccgagaggcggcctcaggttaacttcaagcatgttgggctctccaggagggagaagaggcacctttgccgtgggttgaggactcctagaaccaacctgagactccgcggccatatacaccttacgacgtgtgtgtgtgtggcgggagatgggaggggaggaatcctgtagaacccagatcccatcattccagcaactgccagagcgttcgagaatgtcatgtctgtacctgtcttctctcatcttttgtgccaactgttttatcaaacttctaccccactttaggtcttccaggtaggaaaaatacagaaagagccaagatcccaaaaatcaaaaaaaaataataataatagaggtagtcatagtatgtgtctctatgtttagcaaaagagaaacgtgcatttgtgtgatacacttattgaataggaccatcattctgggtattaatctcatctattagaggcagtaaagaaaagtagactatatgtatggttgttggagtcagaattactgggcttgagcctgccacctgctagctgagtgaccttaggcaaatgaatctctctagccccaattttctcatcagtgaatgagtatacagaacctgcctcactgagtcattaagagtttaaatggcttaattcatgtaaacactttgcgtacttcatgacacagagtgcctaataaatattagctattgttattataccattataactattatcatgcatctgtaatccagaaacctagaaagccagtgtttcttattttataccccatcgccaatatatcaccaagtcttattcatcctaatttctaaataattcttaaatctatcttatctgatattcattgccactagaaatgacctttctcattaatggattcctattctcccttacacctcatagctggtcatttattcatcagacattttattgcactccatctgtgtgcctcctgttagacatagggacagagaaaccattacaaagtccccaccatccacggactcaaacatatatagggagacaagtatgtcaatagtagctacgtgaaatgaataaattaaatatacagcaaaccacttaggctccccagtcttgccgtactcacatacaaccctgtatttccatatgctgtttatttttatgtcttgatctcctaccttttccttgccttgctaattatttgttattcattatttagcctagacatcaattccactgtgaacccttccctattgttggccactcagccctatcccagccactccagtatgggctaagtgcccctaccagggcttccataacaccgtatctctttgtaacacttatcacatagagttataattgtatctgtatttctccattttcctggactgcgagcttcttgagaacaggcacaaggtctgacatgcagtaggactgactcagtaaatgcagaatgagtgaatggcatgcatgcagagtgcagtcttggtatgtgaatgtttagaggacaagtcctatgatatattctacataagacctaagacatcatgatctataggaaatagtaagcagtaaccatatatgcctgagtcctgcgttggtccatttacaaatcacctaccatccatgaggctttttgaaatatactgaaagatgttcctcttgaatacttaacctgttagcgctgtttgagaagagtgatatagattgttacctataataatacttcagtgttcttgcagcacagagaccaagatacattacagaatattagacactcagaatctcagcctacaaagtatgtaaagggctgtgagcatcttaagtttgatagcttacccatatataaaaaggacagctatttcacaaaatttaaaaatgtgaaagatttgg

SEQ ID NO: 916747 - DNA, 4001 bp, Homo sapiens
tccattttgggcagtcggatacagtttttaataccggctctgtcactggccagctgtacgaccacctacaactaagtaaccatagacaaattatcgcaactttctaagcctccatttcctgacttgtaaaatttgataaaccacctatatcccgggaatgtccagaggactgaggagtcaaggtatcgaaaacaagcacacacagtgccttgcacacaatcaagctcacactggttccttctccccttccccacatctctaatggagtatgttattaaatcctcatcttaccattatgaagttcatattaggttgaaacataaaaaacagcagaatattagcaatttcaacctaatagtatttccactgacaaatggagaaaataagctcaaacaggttaaatgttttactcaaggttttatgcacagtaagtgatggagctgaacattaaataatttttcattcagccagctcactaatttgttcactgactcctgttgaggaggaaaaaagtatagtaactactataatgcatataaaactactgtaatctacaaagtattttttcgtgccatatttaaaaaatgagggggtgaaacatttctaagaacctttccattttaaaaattatttgtagaggatgtgtgtgttgggggaggatgagagtttagacaaaatcaaaggtaaagaatattaaaggaaacatatggataactgcactaattcaaaaagtacaataggatctattcagaaatcccacaaagcagctaaacattaaatggccatcctggtgaaagattacaagtattcagtaccacagatgagttgtttaccaaacacagaaggaagagttgtatcaaacactttggttcacaaaggtatacattaatatgtaacattactgtaatggaaaaaaatgcaatggcttttcatttaatagttaaaaaatggactacttaattgtataactgtttatttctataaattccacaagggctttaggattagatcacataagccgcatctggaatacactgtctgtccaaacatgaaaagtcctatcaaaatgcacagtactagtaaataaataacaaatgataacagaacaaggccccataaaactggtgaaatatttaacagtatcaaatatttactacgattggtctacaaccctattctgcctcttttctccttgatttgtcattcagcactggaagaaaaaaaaaccttcatgaacaacaaaatgagaaaaaggataatgaacaagaactgggtctttcaactgatttacaatggaacagttttgttgtaatcctcttatgggcccctcctccaattatgcaatcattccactgcaagagattacaaggcttttaacccgacactgaacggaaggagttggggtgaaacaggagagtgtataacaggtagcctccgaacaggcaacatttccatgaaactaaattgcctctcagtaatcagtactaactaactcagcgctcgtgtctttcaagaccttaccctttcatcttttttaatcccataacaaccggcaactcttcacatgctgcgacttccacccagcatcatcacttctggagccagtaagctcgcgcttcctgggcggtcggggcgagttgtcaacgctgggagggcagagccatgcaatcccacccgtgcagttcgtctcaactcccccgaacacaagtctggcggcacggagctgcctacttgggcgcgactccgggcgcctgcccggaatttcccaccaggtttcaccgaaacctcccgagggtgacctctacgcctcagcacggtgcctcgcgcgtagtttcctaagactgggacacgaaaccaccccaggtccacagccctgccgcgcggcgtccggtgttgtgagctgcttccgacttgttcgggaactctctcttcatcctcttcgcgaccgcggccctccgctcccggccgcgcccgcccgccgccaggtaacccgctggactcgggctccctgccccgggcgcgcgggaccgcgcagttaatgtgtaacgcgcccgtgcccgggggaggagccgccgcccgacgcccaccagcagcccagggggcggccggctgacccgggtcgccaaagtcccccccacacgccgcccccaagggcccggagcccaagtgcccaggcggagagcgagctcaccgggcctgggcatccccccgaacccccgcgtgccgcgccctgcacggcgccagcacctgcacctgccgcggccgcccctcctggccgactcgccagaggcgggcgcgcgggcgccgaggggggcggtgctctacgctccgggcctctccctcccgcggccgcactcacctgaagaacccaccgcggccgctgccggcgctcaggggcgctcacagagccgcagagagcgcgtcccgaagcagcgagaaacggaggaggacggcgagccctttccgctacactccacggcggcgggctcactacgccggcagccgccgagggaacgcgggactgcgcctgcgccggaagcggggccgggggccgggagccgggagcggccggtcctcacggagggagggcggggtaggggggtgtggccggcaggggcggggcgagcccggcatggggcctgggggcggacgcgcttccgcgccccctggcgccaggcggggctcgtcgcaggtgtcacggccctggcccgaggttcctccgcgggcggtttccctgggaaccagcgcgagccggagctgcgctctgtttcgtcgggcccgcgctctgtttcgtcgggcccgcgctctgtttcgccgggcccgagaggcggcctcaggttaacttcaagcatgttgggctctccaggagggagaagaggcacctttgccgtgggttgaggactcctagaaccaacctgagactccgcggccatatacaccttacgacgtgtgtgtgtgtggcgggagatgggaggggaggaatcctgtagaacccagatcccatcattccagcaactgccagagcgttcgagaatgtcatgtctgtacctgtcttctctcatcttttgtgccaactgttttatcaaacttctaccccactttaggtcttccaggtaggaaaaatacagaaagagccaagatcccaaaaatcaaaaaaaaataataataatagaggtagtcatagtatgtgtctctatgtttagcaaaagagaaacgtgcatttgtgtgatacacttattgaataggaccatcattctgggtattaatctcatctattagaggcagtaaagaaaagtagactatatgtatggttgttggagtcagaattactgggcttgagcctgccacctgctagctgagtgaccttaggcaaatgaatctctctagccccaattttctcatcagtgaatgagtatacagaacctgcctcactgagtcattaagagtttaaatggcttaattcatgtaaacactttgcgtacttcatgacacagagtgcctaataaatattagctattgttattataccattataactattatcatgcatctgtaatccagaaacctagaaagccagtgtttcttattttataccccatcgccaatatatcaccaagtcttattcatcctaatttctaaataattcttaaatctatcttatctgatattcattgccactagaaatgacctttctcattaatggattcctattctcccttacacctcatagctggtcatttattcatcagacattttattgcactccatctgtgtgcctcctgttagacatagggacagagaaaccattacaaagtccccaccatccacggactcaaacatatatagggagacaagtatgtcaatagtagctacgtgaaatgaataaattaaatatacagcaaaccacttaggctccccagtcttgccgtactcacatacaaccctgtatttccatatgctgtttatttttatgtcttgatctcctaccttttccttgcctt

SEQ ID NO: 916748 - DNA, 4001 bp, Homo sapiens
tgggcgtggtggcgcacgcctgtagtcccagctacttgggaggctgaggcaggagaatctcttgaacctgggaggtggaggttgcagtgagactccgtctcaaaaaaaaaaaaaaaaaaaaaagaaatgtagtgataaaatatattggtagagacgcagaaaaggaggaagtacagtaagggaaaatccaataggctccaatctatgagggactaagaaggctagcagaccattaaaaatatgtggggaggagggtactccactcctctgctttggcaatctttgtcttttttttttttggagacagggtctcattctgttgcccaggctggagtgcagtgggaagatcatggctcactgcaccctcgaactcccgggctcaagtgatcctcctgtctcagcctcccaaagtgctgggattacaggcgtgggctactgcacctctgtatctttttctctactcaccatcttccccagatacttcatagtttgacccaactttctaacagcacagaaatctgggcttttgaagtagacaaagaacaaggggtgatgccaagcttttgaaatggaatttctcactcttccccaaatctcttcctcagtgatatcaccgcatagtttcggacctgttaactccattacctgcctgggaaatacccaagtcaagtctaagtcccacaaaagtttcaccaactatgatcagaagatctcctgatggctgaggatctctaagcccctttcccatgtagataatgaaatagatatgaaatagattctcagttctaggagacatggtatttgctatagaccacattattaagtgggaaagaagtggacaaaacatgcccccaatccaacttcttagctctttcataggacatgaaacagtaagttaagaaacagactgcagtatagaccagctatgaggccaacagaaagtgtaggggctgagtttggagcagccaacagtcatggaaaaaaaaaaattactttgatcttcatccctaccctgggagttttaaaaagcttcaaattaccacatctaaacactaaagggaacaaaagagtgtgtactcccaagacccagagcccccagcccacccttcagcattcccagaagttcccataactgataccaggccctgcttccattacttcaactaccttagtcttctagattaatacagccttcttcattttccccagttctccctcactgaacccaaatctctctcagctcaacaccatagcaccctcagttctttttacaataggcactttccctgaaaagaacgcttcttacccaactaagaacccttctcaggcccttccaatgaacctctctgcagggacccagccccagtcacccccggggctcgggcgacaggtctgaccctcctcacctcccggcaaatgggcttacctcacccgctgccctgttcctttccccagctcctccctcttcagcgctgcttaatgaggcctgcccctgccctcactcaagctccaggcctccagcccccggccctcggcctggccgccgccacagcccagccgccttcccgactcaccaacttcggggtcccaggccgcccagtcccctcctcagcgacccccattaggcctgccggggcccggcccccttctcccctctccggtgggccactctaacccctcgcttaggaccagacccgcctccgctctcaggccaggctgctctcatctcccgggcgcttccgcccctgccctttgggctccatcagctcggtacctggggctccgtctcccccgtcggccccaagcctgtgtcgaacagacaaacagctgcagctcaaccaaaccctcctgcccctccttctcctcctcgccctggggcggggctccagccaatagctcgattacccgcctaccttcgagggtgggctatatgtgcactcatccaccaatcctctggagaaaggcgagtctctttgggcgctgtcaccaacaagtacgagcaagggacgcgacaggcggggccacaagccaatagcgagggagaaacctcgaagatggacgaggtaaggagccattaaagagcaagctcctgaagacagggggcggtacactgccgacaggcgtatgtatccaccaataaaatctcgacaccccatgaccccgccttttgactcataaacatctaatcaggtgagtgatggaggcgggtcaaagtgaaactttaaccagtactgcgaaaatacggtacttgactggcaggcaaggaggggttgaaggaagccttaggaaggccgctactgaccttcgcccctccccctggacttggctggggctggctctagtgccctgccttctatgacaaattcgcgggcgtaaagggaaatacctcttctagggatccggagcctgggaatttaagtaaccctgacatcagcgcttcctccttttagtgaggcttcagtggacaggcgtatttggggtggccgcgggcggtctgagatgttttttggtggaatgagacaatggcaactacaagaagtggtagcttggagacgctttttcagaatcgtatgtaaatgtaaataaaagaatctttggaaaacttttctgtctgtgatatgaaacagaaaggaaaaacggcgggcttactgggaaatgcagtgtcgaaaggcaaattccccgggagccctcttcctgccgctatgtatgtgcatgggtgtgtgtatgtatggggtgtgtgtgcatatatggtgtgtatgtggtgtgtgtgtatttggtatatgtatacgtggtgtgtgtggtatatgtgtgtatatgatgtgtgtgtggtgtgtgtatgtgatgtgtgtgtggtgtggtgtgtgtgtggtatgttggctgggggaaaggaggtttgctggtgtgtggagaaagtgaagtaggaagtatataggcttcagtttccccagccataaatagggatgataataaccactttgttcaccgtcagcactagccaaaatggggtggggtgggcagccatgcacagagagattaggaaaaggggtctgaaatcaatgatcacatacacacattcatattctgtctcccaccattctttcagtaaataagaggaggaaagagatgaactataaaactaggcacatttttttaatgagctacaaactaaattacaaataacgttaatagcaagagcactcaaggacaagggtgacagagacaaatcataaaaaaaaaatgctttttttttttagcactgtcattacaaaaccccaaggtgcacatggcaacaaatccacccactatgaccaaaaaaaaaaaaaaaaagccaactctactattggatataacctgaaatataaatataattgttcatccttcttttaaagaaatatttttacccatgccctcactcaatcacagccctgaaaaagtgtcagcattctcaaaatgatgcctaaaccctaacttctaactcctatggggtaggaggtggacgtcagaggaaaatgggatcagggatccttggcaactgaacaactaagaatactaaaaggaagagaaaaattcaaacatctctcacctgcctcataaggccatggtgaagcaatagattggaatgaagcacaatccctgtctcagggcctcccagattcctcatgcctgtagaagggacaaacaaggggactggggccaatcatttttctgcagccccacccgggctgagtcttcagtctcccagcctattaggtgaggcaaaacactaactagggtataaactgattggatctattttttcaaccgaattctttaaaatagactcctcccagtggttttgttttacttggttctcaaaagcaccaacttagcccccgctatcatttggcctttataaacattgtggcagcaggaggcttgggatcctggtcatcccaaacactggaaataataattatggggcattcagagattggtacggcaaatctaacgtgtaggaaggc

SEQ ID NO: 916749 - DNA, 4001 bp, Homo sapiens
ttgggaggccgaggtgggcggatcatgaggtcaagagattgagaccatcctggccaacatggtaaaaccctgtctctactaaaaatacaaaaattagctgggcgtggtggcgcacgcctgtagtcccagctacttgggaggctgaggcaggagaatctcttgaacctgggaggtggaggttgcagtgagactccgtctcaaaaaaaaaaaaaaaaaaaaaagaaatgtagtgataaaatatattggtagagacgcagaaaaggaggaagtacagtaagggaaaatccaataggctccaatctatgagggactaagaaggctagcagaccattaaaaatatgtggggaggagggtactccactcctctgctttggcaatctttgtcttttttttttttggagacagggtctcattctgttgcccaggctggagtgcagtgggaagatcatggctcactgcaccctcgaactcccgggctcaagtgatcctcctgtctcagcctcccaaagtgctgggattacaggcgtgggctactgcacctctgtatctttttctctactcaccatcttccccagatacttcatagtttgacccaactttctaacagcacagaaatctgggcttttgaagtagacaaagaacaaggggtgatgccaagcttttgaaatggaatttctcactcttccccaaatctcttcctcagtgatatcaccgcatagtttcggacctgttaactccattacctgcctgggaaatacccaagtcaagtctaagtcccacaaaagtttcaccaactatgatcagaagatctcctgatggctgaggatctctaagcccctttcccatgtagataatgaaatagatatgaaatagattctcagttctaggagacatggtatttgctatagaccacattattaagtgggaaagaagtggacaaaacatgcccccaatccaacttcttagctctttcataggacatgaaacagtaagttaagaaacagactgcagtatagaccagctatgaggccaacagaaagtgtaggggctgagtttggagcagccaacagtcatggaaaaaaaaaaattactttgatcttcatccctaccctgggagttttaaaaagcttcaaattaccacatctaaacactaaagggaacaaaagagtgtgtactcccaagacccagagcccccagcccacccttcagcattcccagaagttcccataactgataccaggccctgcttccattacttcaactaccttagtcttctagattaatacagccttcttcattttccccagttctccctcactgaacccaaatctctctcagctcaacaccatagcaccctcagttctttttacaataggcactttccctgaaaagaacgcttcttacccaactaagaacccttctcaggcccttccaatgaacctctctgcagggacccagccccagtcacccccggggctcgggcgacaggtctgaccctcctcacctcccggcaaatgggcttacctcacccgctgccctgttcctttccccagctcctccctcttcagcgctgcttaatgaggcctgcccctgccctcactcaagctccaggcctccagcccccggccctcggcctggccgccgccacagcccagccgccttcccgactcaccaacttcggggtcccaggccgcccagtcccctcctcagcgacccccattaggcctgccggggcccggcccccttctcccctctccggtgggccactctaacccctcgcttaggaccagacccgcctccgctctcaggccaggctgctctcatctcccgggcgcttccgcccctgccctttgggctccatcagctcggtacctggggctccgtctcccccgtcggccccaagcctgtgtcgaacagacaaacagctgcagctcaaccaaaccctcctgcccctccttctcctcctcgccctggggcggggctccagccaatagctcgattacccgcctaccttcgagggtgggctatatgtgcactcatccaccaatcctctggagaaaggcgagtctctttgggcgctgtcaccaacaagtacgagcaagggacgcgacaggcggggccacaagccaatagcgagggagaaacctcgaagatggacgaggtaaggagccattaaagagcaagctcctgaagacagggggcggtacactgccgacaggcgtatgtatccaccaataaaatctcgacaccccatgaccccgccttttgactcataaacatctaatcaggtgagtgatggaggcgggtcaaagtgaaactttaaccagtactgcgaaaatacggtacttgactggcaggcaaggaggggttgaaggaagccttaggaaggccgctactgaccttcgcccctccccctggacttggctggggctggctctagtgccctgccttctatgacaaattcgcgggcgtaaagggaaatacctcttctagggatccggagcctgggaatttaagtaaccctgacatcagcgcttcctccttttagtgaggcttcagtggacaggcgtatttggggtggccgcgggcggtctgagatgttttttggtggaatgagacaatggcaactacaagaagtggtagcttggagacgctttttcagaatcgtatgtaaatgtaaataaaagaatctttggaaaacttttctgtctgtgatatgaaacagaaaggaaaaacggcgggcttactgggaaatgcagtgtcgaaaggcaaattccccgggagccctcttcctgccgctatgtatgtgcatgggtgtgtgtatgtatggggtgtgtgtgcatatatggtgtgtatgtggtgtgtgtgtatttggtatatgtatacgtggtgtgtgtggtatatgtgtgtatatgatgtgtgtgtggtgtgtgtatgtgatgtgtgtgtggtgtggtgtgtgtgtggtatgttggctgggggaaaggaggtttgctggtgtgtggagaaagtgaagtaggaagtatataggcttcagtttccccagccataaatagggatgataataaccactttgttcaccgtcagcactagccaaaatggggtggggtgggcagccatgcacagagagattaggaaaaggggtctgaaatcaatgatcacatacacacattcatattctgtctcccaccattctttcagtaaataagaggaggaaagagatgaactataaaactaggcacatttttttaatgagctacaaactaaattacaaataacgttaatagcaagagcactcaaggacaagggtgacagagacaaatcataaaaaaaaaatgctttttttttttagcactgtcattacaaaaccccaaggtgcacatggcaacaaatccacccactatgaccaaaaaaaaaaaaaaaaagccaactctactattggatataacctgaaatataaatataattgttcatccttcttttaaagaaatatttttacccatgccctcactcaatcacagccctgaaaaagtgtcagcattctcaaaatgatgcctaaaccctaacttctaactcctatggggtaggaggtggacgtcagaggaaaatgggatcagggatccttggcaactgaacaactaagaatactaaaaggaagagaaaaattcaaacatctctcacctgcctcataaggccatggtgaagcaatagattggaatgaagcacaatccctgtctcagggcctcccagattcctcatgcctgtagaagggacaaacaaggggactggggccaatcatttttctgcagccccacccgggctgagtcttcagtctcccagcctattaggtgaggcaaaacactaactagggtataaactgattggatctattttttcaaccgaattctttaaaatagactcctcccagtggttttgttttacttggttctcaaaagcaccaacttagcccccgctatcatttggcctttataaacattgtg

SEQ ID NO: 916750 - DNA, 4001 bp, Homo sapiens
gaagttcaagaccagcctggccaacatggtgaaaccgtatctctattaaaaataaaaaattagccaggcatggtggtgcacacctgtaattccagctactccggaggctgaggcagaagaatcatttgaacccgggaggcagagtttgcagtgagccaagatcgcaccactgcacttcagcctggaccacagagcaagactccttctcaaaaaagaaaaagaaaaagaaaaaaaaagtaaactagtacaacctttatggaaaacagtatggagacttctcaaagaactaaaaatggaactaccattcaatccagcaatcccactaatgggtataagggtaagaaatcagtatatcggccgggcgtggtggctcatgcctgtaatcccagcactttgggaggccgaggtgggcagatcaggaggtcagtagatcaagaccatcctggctaaaacggtgaaaccccgtctctactaaaaatacaaaaaattagccgggcgtggtgacgggcccctatagtcccagctactcgggaggctgaggcaggagaatggcgtgaatccgggaggcggagcttgcagtgagccgagatcgcgccactgcactccagcctgggcgacacagcgagactccgtctcaaaaaaaaaaaagaaatcagtatatcaaaaagacccctgcattgatatatttatcacagcagaatttacagtagcaaagatacggtatcaacctaagtgttcatcaacgaaggattggataaagaaaatgtaatatatagacagacatacaccacagaatactactcagccataaaaaagaatgaaatcacgtcttttgcagcaacatggatagaactggaggccattatcctcagtgaaataactcagaatgtcaaataccgcatgttctcacttataagtgaaagctaatcaatgggtacacagacatacagagtggaataatacacactggagaatacaaaagatgggaaggtggagggggctgagggttgaaaaactacgtattgggtacaatgttcactatttgagtgatggggacactaagagaccagacctcaccacgacgcgatatatgcatgtaagaaatctgcacttgtaccccctaaatatacaaaaatttttttaagtcccctccaaaagataaatacttattgaatgattaagctacaggaaaggcgccttctctaaacacctacaataactcggaaagcttatttacccgacacattagaaagataatgctttcttaaaaaaaaaaagggcttatctacccacctacccccactttccgacacacacctctcggcctacggatgaaatcctgtgaagagaaatgtacgtgaaagtgtacaagtaaggcctcgttgttactgagggtaagaatcaggatgagaaggacaagatgtcattgccttgccttgcctccctagacatacgagacccacgaagtagaggggctccactgcaggccgcccgggcctctcaaacaccagggctcttcccttcgaaaacgatggggtgtcactccaaccactcttaaactcgtatctgactgagagactcttgtttaggatgactcctgccctggtccagccaccacctcaaaaagacgcccccggctttccacaaaacccggcgccaagacagaagcccccgaccctcccaggccgcgtccattcgacctgccacgacccccaccccagaaaagcccgagtggagaggctgtggctgccagcctgtcccgctgtcccgctgtcccggacccccgcggcggccacggctcaccacacgaacactctgcttcctatcacaatccagcggcagacgcacctggtctggcacccccactactcacttcagtcagcctggccccacctgggccacccttcacttcgctccgcgcctcacccaacggcagagcagcgccgcgcccacagctccggtttgaaaaccttcaccaaccaatcacagagaaatttattcctcccgcgccgtccctctacggtgtgacgtacgcgtcagggccacgcggaggtgacgggaacgggaatgagcatgcgcattctgacaaagcgaagccaaaggtggccattttgactaatgtcaacggtttttcggttttttttgtttttttttgcggtgccctttccggaagtcattcaggatgccatattgactaagggcaagtggtacttcctgaatgcgaattattcttggtctcactgtctgcgggactagggcccttggaaacgattaactgaacaatgtcagctctcacagtagaatcagaagaataccaggagttagaacagcagttagtttcaagcacattcactgagctatattatcccttccattgatgtatccattcagacttttatttgacacacattgaatgagcccacatcatcacaagcactccactgggaatcggaaaaataaagatggtatggtctctactgtccagtagctacgaatggaggcgatagctctagaaaacaaaaataaatacaaaatgaaaataaaatactataattccatttaataaacgttatttagaacttggcattgtgctagcacaggagctttcatgctttttaaaaactctggacccacagtgagaaatacattttacgttgcaaccgggtaatgaaaactctgctcatccttactacatgcaaagtacccagaactcactactcaacaacgcatggctacccgcaatttggaaaaatactggctggagcatacaagaagcgctgtggtttaaaggaaagatcacttactgtcacattggtccttaatttaaaaaaaaaaaaagaaaagaaagatcacagatttgggggagggagattagggagatgttggtcaagagatataaaatttcagttagaggaaaatttagatctattgtacaacacagtgactgtagttaataacaaagtataatgcatttgaaaattgctaagagtagatcttaaatgctctcaccacacacctcaataaagtatgtgaggtaatggatatattaattcgcttgatttagtcattccacagtgtatacatacatcaaaacatcaccataaatatataaaattgtattttatccaaaaatcacatcacaaattttgtaacccgaaaatttgactccacttttattttagagacagggtcttactctgtcacgcaggctggagtgcagtggcacaattatagctcactgcaaatatgaactcctacactcaagggatcctccctcatacctaggactacaggcacatgatcaaggtaattcttttgcttgtttgtttatcttttgtagagaagggtctcactatgttgtccaggctagtcttgaactcctggccttaggtgatcctcccacctgagcctcccaaagcactgggattacagacagtagcactccacctggccttgaacaatagcaggcgttcggctgacccacccatattatcactttttaatacttctgtacttcacttcctccaagtataatgtagaaataataatcccatctctatctcacaggtttattcccagatcgactgagacacagtgtggtacactatcaaagtttatacttggtaaactgcaatacagattattattaatattattaagaaagggatgaagaaagaaaatatgaactgtgcatttgttatcccatttaatcctcctaacaacctttcaaggtcaggagcattcattgattgcattagcctgtgcctgcttagatacctataataaaatgaaataagtagtaggacaaagacatgtataaagtactttaggagcacagacaaggaagcaattaatcctatctggggagtgggagtgttaaaaaagcctgcagagactgatctgagctgggtcttgtgtgaataggaatttacaggagagaagggaatggaaaattactggcaataggaagatcatgtgacctctgaagaatgaggcaagca

SEQ ID NO: 916751 - DNA, 4001 bp, Homo sapiens
aactattaaaaagtgcactcatattactctcttactcttcagagttaaagaagttagagctgaataaaatgtgaaaacccctttataaattctgaacttgaataatagtaaaataaaatcaatagcctatttttaattagtatacttaagggttaagctatgatgaatataataatttccactacttcatcaagcatattcttaactgaaatgatttttttttttttttttacttttaagagtatggcagtaaacattgcaaagactagtagtacaatttagtgccactgccttaattgttctgaggtgccagcagttttatcggggtcactgcagtgcaaatgacaaagcagcgaaaaaggcaaatcatatcttagtattgttatgaaaggagttttgacctcatagacctctagagaagtttccagggacccacagaggtctgtagaccatactttaacaactgctgttccttacaaagggattatgactccactgcctggatgcttaaaacccatttcaaattcagcatgttcgaaacagaaatcttgatccctcacacctcctaaccttccttttcctagtcttccctatcttaatacaaagatcatccatcctgtagctcagaccaaaactattgtggagtcatctctgattctttctttcccttacctgtacatctacttcatcagcaagttctgtccacagtgcctccgaaatacatcccaaattcatctgttccattccatgcccactaataataccctatcccaaaccgctctccaatgatataatacctgattttcctgctcccgttctggtcaccctatccatcatttattctccaccaacagccagtgacctttataaaagcaaacttagattcctctcccctacttaaaaccctccactgacttcccattgacttaaaataaaacctaaactcctttctaagacttacaagaccctatctgttctggcacctgcctatttctctggcctaatccccctacgattctccccactgcttgttaatcctatagcattagactgtccctaaaatatggtcaagtatggggccttggctcctattccctctaccctgattcatgactcagtgcatgcattatcgcctcagagtcacatattaactactatatttaaagtagtgctttcctctttcgcactctcatatttcgaggcttattttcggccccctaacctcacctcccactggaatgtaacctccagcacctcgtacactaaagaagtgaatatattcaataactttattaaatgaatggctaactataggcttccatggcactcaactgtgtaaatagaagaatcgtttctaataccacgatggaaagcacagaggatcttgagtgagatgacttaggtttgagtattgccctgccacttactgggctgtatgactcagataacttaccctctatacgtagaaatgttaaatcaatacaacaggaatgcttactctttctatatcaaataactacagtgataaacaaataaaataacacataattgggcgctcggtgaaatgtaaagcgctgttcaaacgctaacaaggtcttggtaaaagaaacggcgacggttgtgaagggaggcaaagagaaggaaaaagctacgatgctaggatacttctgagcaacgggtggctctcactggagactgggttcttgataaccgtccatcctaaccccaccatcgctgccctccggtcttactcgatcctttccccttagtctcatgtcttttcccttagttttcctcccacccccgacgaatgtcaggaactacccacctcacaggccgcaccatggtccctttcaaggcttggtatttacagttctcaaattcttgttggcttcagcggcggtttcaattcccgcccaaaaccagacttcggagccctccgccccctgttaccagtcgtccaatcatcaccagccatgcttgcggcggcgcacgcgctgtggggaaagcgaatttgctcccgccctccccaaggcaccgcttttccgtatccggtccaccagagccgagtttgtgctttgtccctgcactttcgtcacaacggcggatttgccctgtctctgaaatacagaataacaatagaaatacaccttattgcacctttcaaattgttaaattgaaacaggttgggacataggggcacttggactgagaaattttctacaagatgccaggaaatagaaaaggatgtggcgaatctacgttcgcggatccgcggtgtggaaaaagtatgtcggcaagtcagctggtttcccagtgcaggacgcgctgacagctcgagtgagcggactgcccaggacttcggaactagacgaggtgagcccagaaccgagtgaggatgccctttcagactgacaaccgttacagagggattagtcccctcacccggctgaagtttctcagctcgaccgtctgtcttccttttccctgattaatgtgagcctcagagcctccgctctgttggctgtgtgtgttcggtccagaccttccatcccattttcttatgggaaaccttcctggatttcacggttgctaaaactgaacccaggcttcaggatagaccattagtctaaaaaaagagcgagaggagaaagaactaaagttatcagtttcttgaaacacaagtctaaatgttgaaccagagcttttgtgtctgccttctcttttttttttcaacattcctgattcattcatatttttgcatttatcagtggttgattcttttttattgctgtgtagtatttatctcataaaataaacaagtttactattctcctactaatacgcattttggttgtttccagtttggggtattataaataaaacttatatgagcattcttctgggtgtactttagcgaacatatgcgtgtgtgtgtatttggatatatacttaggaatgaaatttctacatcatagaatatacctttatgtagttttggtagttttctaacattataaaaatttgtattgctttacgtttaattttaattctttctgagtaaaacaaataccctatctctttgcattatggtgaaatagacgaagatttttgtgtatagcctacatacagatttgaaaatatagtctggataattcaacttagccccgccccacgacatgtacaaaagtcctttgagttttttttatatttcaggtgatatctttttaaataaccgtatgaataattttttgttctttatttttccagtgagcaccataaaataaaaacgccatacaatccaacaattatttattagttcttgccattcgcaacatcctgcctaatacatggaatacaagacagtattccttccacttcaagaagactgttttctagccaagagtaagaaatagagcgtgataagtgccatgattcaaataagtctaggctaatatgagagcctgtcgggacccaatccagttttagggagttggataagtcttcctagaggcttaactgagacctgaagaattagcaattgttatccaatgaaattaagatcagtaagagtgctctaggcaaaggaaaaggcattcaaaaagattcggcatggaaggagaagtttggtgttgacagaagttcagaatggctggaaaataaaatttgtgaatttgtgtattaggaaggagaggtgcagtttctgagagaagagtggaaatataagcaggggtgttgtaaactgggataaagagtttgcattttatcctgagagcaatggaatgtcatagaaagtttttaagcggatgaacaacatgatcagataagtatattccttttttaaaaaggaagattactataacttcagtgtagaaaataatgtaagaactgatttgatgggagaaagcctagccataggaagtccagttacaaggctgatgaataaataaatctttaattgatgttgattcttactgcctttaactagattttcttcttcc

SEQ ID NO: 916752 - DNA, 4001 bp, Homo sapiens
ggctcactgctccgttgacctcccaggatgaggtaatacttacacctcagcctcctgaatagctaggaacacaggtgcgcatcaccatacctggctaagttttaaaacatttttaaagagatggggtctcattatgttgcccaggcttcttctattttctttaaaagttcagtgactttatctttcaatattttaattgaatttataatttggcaatttattttaaatttcaagatctatttttaaaccttggattgttacttcatctgagtatcctagtatactaattaggttttcctttctaaattctctgaagtttctgtttatctgcccccacagtccatgttggagacttttcttaaatacctaataacacttagttgtctgttcatacgtatgaggcagttggaatgctgatggggagtcttgtgaacttgggaggtgtcttagtctattttatgttgctataaaggcatgcctgcagctgggtaatttataaagaaaacgggtttgtttagctcacaattctgcaggctgtacaggaagcaaggcactagcatctgctcagttctggtgagggtttttgtgctgcatcaagacatggcggagaaggtcaaggaaaagtgtctgtgcacatgcaaagagaaatcaaacccgaggtgagtcctggctttacaacaaaccactctccaaggaacaaatccattctcctgataaccaacatagtttcgcaagtgtgagaactcactactgtaagaatgacaccacgtccttcatgaagaatctgcccccatgacccaaacacctcccatcaggacccacctcccaatactatcacactgggaatcaaatttcaacatgagatttggtagagacaaaaaaaccatatccaaaccatagcaggaagttcctgccaacttgcccaactacactttaaagtgggtgggtaggaaaccagctattgtgctagaataaagaatactttactcttaggcccttcaatactcagttaacccaaatctccccagattatcagagtgcttaattttagcctggataaatgcctagatattgtatctgagatatagggagggttctgctcttccttatatagacctttatttagtctccctggtctcaactctgcttctcactcttgctctgtctggtagttatctccaaatctccgtctccctaaagcacttctgggctgacaggtccccttcctttctacagcaccctctacacccattctacattatgcttttctccattttattttgtcagaccacacttactttttgcatgtcaaataaaaaaaaattatcttccgatgtcccccttctcattttctattttgtatcacttttatttatcatcattttatggggtctcaggaagaagagacagtaaatacatgtgctcggttagctagctttaatcaaaaatcctaaacgtaggttttaaaaaagataactggagcagggcaggaaataatattttttgccagtgtggtggcaaaaaataaaaaacaaaaatctgaatctgtgttaggacagtatttccgtgtataacatagcgcttagcaacttaattctccagatccacatattttaaggacatgatgtatctcagacacctacttcaaacctcactttacagttaagtaagaccacaagtagaatgaattgcctgaggccacacaagtagacagtgggagaatgagaacagaaatatctattgactcctagttgaattttctcttaccttaccacactgctagggagtaacaagatgggcagatcacgagtcagatgagaaaggtcatgaaaaatagtcaaaggatgacttttcctgggtaaatagccggatgtccaagaaatgaaaggctggtctggcagcagcacatcgtctaacagttggtagtcatatgtgggaagtactgaagggggagatgacagcaggcccagaaactgcaatgatccaagtgcatgtcgatcctgggagggaacagttaagagtccgggcaggatgaaacagtagaaactggtgagtgaatgaatgtgaaggctgaggagcgactgcaatttgttaatgggattatgaggcagtataaagtggttaattacggtggcggaggtaagcaggagtaaaatgatggcttttaactcctctcaaggacaccgaaaattattttaataaacactggaaggctgggaataaatataattcacaccattcttactttcttggtttagagatagcttatctacatccttaaattaatggctgtagctaccctctgcatggctccaaaaaaaaaacaaaaaacaaaaaacaaaaccaaagccggctgcgagtctgcacgagaaaatcgggttgcaccaggccccagccgcccgccgattcgcttagctgtcggaggctaaataaacagctcccgaagcagcgtttggcacagcgcagggtcggaacgtggacactaatttccgcccacgctccccgcgtcctggcgggatcaccacagacacgacgtccattgctggggtcctcggcgatgcccgtgtgcgcagccccgcgagtctcaggtcagaagaccactaatttcgcggccgcgttccacgaagctaaggggcaaaaaaccagctttcttgggacaaagcgtccccccagcagccagggtcgatcccggcgctgctcccgcggcgcttggctgccccgggcgtaacgggccacgagaagtagggggtggggcgccgcttaggtttgggaagacacgaagcggctcctcgggcttccagcgtccacttcctacggcaagcaggaggagacaagcgccaccctgcgctcgcggagccgaccccggctctcccctcccgtggccgcaggggtcgtgtgtgtgtgtgtgtgagtgtgtgtgtgtgtgcagggacgctccgcgcccatcactctgtttcggtgctaatcgaccgccgtggcgccgatttcccccgcttcccagttcctcacccgcgtgccccggaaggcgcccggaggcccccgggccgccgcgtcacgctcccgggaggctgagggaaagggaggcagccgagccgggagcccggggaggcgcgctgcgccccgcggcggggctgggggcggggctaggtgtctcgcgcagggggcggggcgcggtgacgtcgcgggcgcctgggccgtgctgtggcggcggcggcggcggtagtggcggcggcggcggtgcctgggcggcagcagcagcagtagcggcagccctgaggacggtgagacggccgcggcggcggcgacagcgcggaagtcgcgcgggacccagagcttcccccctgtcgctagtgctgaggctttcgcctttcctacccagcttcttgctcacggcccgggctgggctgggcagggcaacgcgcccccggggaggggcggagctgtaggtgaggcttcgcgaccccctccccctcctcggcagcccggggggtggggaggggcgggccccacccagaccaccggcgcccacccgcgggctccacccagccgggctccgggatcgggcgggagccgaggcggtagatgtggggatcctggggcgggaggtgggggagtggggactggggctctgggcacttggggagcggagggggggaggcttaggactagtgaagccgcggacgaggtagtggggagacggagaaattggggagccatgaggttggggtgcggtcagggtggatctttgggttaggtgagtgatgtaaaatgctgaagatgattcttttcttttcgatgaaatggtgagataaaagatgaagtgtatttcaaaaggacgatgagctgtgcatgttgcctttgaggcagttgcagaacctattttattgcactagatctcacgtttctactttagggttcgattctttttcttctggcggggtgggtggggggtcggagagggaagagaatccccttactttggctcaggtaaattgtgagcg

SEQ ID NO: 916753 - DNA, 4001 bp, Homo sapiens
atcccctcccaggggcactgggagacctccaggaacagttaacagcagacttccgaatccctgaggacccagagagggaactggcaagaccatcggagtctgcggtatggatgcctgctttccaggcacatgaattctcctaccttctggcctccgccagccatgcggctacttatgtattctgggcccagcctctgcctcagggccttctggatggcctggtactcttctgctgtgtactggcactgcaaccccaaaaaagaaaattaaattcacacttccaccattcctcacatcattgagtctccatcctttatggagactttatactcttaaaaagaccccccagaacctttgtttatgtgggttctatgtatcctattaggaatcaaaactgagaaacttttaaggcatgcatgccattaggcatcatagcagtgacatcaccacatatcatgcactctctgaaaactctaccattcactcatgagacaatgagtgtgaaagaggcaaatagtattattatgaagataattttgaccttctggactctgaaagatcttcagaaaccccagggtttttgagaactgcattttgagaactgctgccttagctgctgctaccatccttataaatgtttctgaagcttaggaagctaaaatgttctgcctccagatctgtaaatgacgtcagcacaggaagcaagtacggaaagagcacgggggtaggaagccttgcttccatttgtcctttccagagattgacgccttctccaatacaacaatttcccatcctgcacaaacagaaacacactactgcttgctgatttgggttttgtcccccttgccctgctcagatgagatgaatactcacaactctctgctaaagacaaagatggagtttgggtggacaaagcaagaaactcttttctgtgcacacaatgtccctacaaggaataggacccccagtaactttccatgcctccaagaaagacaactggagccaggcgcggtggctcatgcctgtaattccagcatttaggaggccgaggcaggcagatcacgaggtcaggagttcaagactaccctggccaacatggtgaaaccacatctctactaaaaatacaaaaaaattaagcccgggcgtggtggctcacgcctgtaatccaaacactttgggaggccgaggcaggcggatcacctgaggtcaggagttcgagaccagcctggccaacatggttaaaccccatctctactaaaaatataaaaattagctggccatggtggtgcatgcctgttatcccagctacttgggaggctgaggcaggagaattgcttgaatccagagggtggaagttgcagtgagctgagatcgcaccactgcactgcagcctgggtgacaaagcaagactcagtctcgaaaaaaaaaagaaatagaactgggtggcatgcacacaggggcaataggaaatagggagattttcacagtttcattttgaatttgatgtcatacaaatatgttatctatccccccccacaaaaaatttaaaatctaaatctaatccccagtactatcagtcttttgatagctaacattccaaaatgccctccagagttcacaagactcccaaaaaatgcatctaaaggaaaaaccaataacaaatagctcacacatgtactatgtaaacgtactaggtactgcccccgcacgcaccgcgtcaacgtactaggtactgctcacacacgtactaggtaaacgtactaggtactgctcacacacgtactaggtaaacgtactaggtactgctcacacatgtactacgatgctctacaaactgccttgccctaactttactcacttcacctcattctttcccggcatgaaggaaccacagttacctgtccaaagcataacactgagccgccgccagcagcaggatggctgtcacgtcctccaagaattgcttcctcagtcccagacatcttgattctggttgacctctatataaataaaaagcggaaaaaaaaaacaaccctcaaagaatgtttaaagtaaaaggcaagagcctctactgaaaaatcacataaagaatccttatgcggccaggcacagtggctcatgcctgtaatcccagcactttgggaggccgaggtgggtggatcacaaggtcaggagatggagaccatcctggctaacatggtgaaaccccctctctactaaaaatccaaaaaaattagctgggcatggtggcaggcgcctgtaatcccagctactcgggaggctgaggcaaagaattgcttgaacccaggaggcggaggttgcagtgatctgagatcacaccctgcactccagcctgggcgacagagcgagactccatttcaggaaaaaaaaaaaaaaagaatccctatgcaataccctaagagttatttataagcttctaagcactgctccaatccagaacagagttcctcagtggttagctgtggtctctcaagctgctgaagattctttaaggtctacttctacctttctgttaacatgtttgctattctggcggtgctattaaaggtgatttttacaataagaatatattacatttagaactataaaatcaaaattacaaaaaattctttatgggaaagcaaacaaaaaatgtactataggtggaacattgctaatccaaaaatccaaaattcaaaatgctccaaaatccaaaacgttttgagtgccaacatgatgtgttatagtcaaaacacaggtaatggccaggcatggtggctcaaacctataatcctaccaccttgggaggccaaggcagaaggactgcttgagcccaggagtttgagactagcctagacaacaaaaccccatcactacaaaaaatttaaaaattagccaggcgtggtgctatgctacttaggaggctgatgtgggaggatcgcttgagctcaggagtttgaggctgcagtgagctatgaccaccccatcgcactccagcctgggtgacagagtgtctgactctgtctcaaaaaaaaaaaaaaacaaaaaaaaaggcaggcacacaacacacagtttattcagcttctccaagagaaaaattcaattatcagccagacgcagtcactgacacctataatcccagcactttgggaggctgaggcgggcggatcacctgaggtcaggagtttgagaccagcctggccaacatggtgaaatgtctttataaaaatacaaaaattagccgggtgtggtagtgcgagcctgtaattccagctacttgggaggctgaggtaggagaatcgcttgaacctgggaggcagaggttgcagtgagctgagattgtgccacggcactccagcctgggcgagagtgagactccatctcaaaaaaaaaaaaaaaaaaaaatcatctttaggctctgaaaacaaatgaatttcatgtttagacttgggtccccttcccaagatatctgattatatatattcaaatattccaaaatctgaagtccaaaacacttctggtcccaaagcatttcagagaagcaatacccaacctgtactagctaagagggtaactgggaggtggtggatatgtgaattaccttgactgtggtaatcatttcacagtgcattcacatatcaaatcatcacattgtacaccctaaatatatacaatttttgtcagtcatacctcaaaaaagctggggggtagggaagaaaaatcaagtgaatctgttttaaagtttaaaaaaaccggccaggtgtggtggctcacacctgtaaccctaacactttgggaggccaaagcaggcggatcacctgaggtcaggagttcgagatcagcctgaccaacatagtgaaaccccatctgtactaaaaatacaaaaaaattagccggatgtggtggcaggcgcctgtagtcccagctactcgggaggctgaggcaggagaatcacttgaacttgggaggcagaggttgcagtgaactgagattgtgccact

SEQ ID NO: 916754 - DNA, 4001 bp, Homo sapiens
ctaaaaataccaaaaattagccgggcatagtggcatgcgcctgtaagcccagttaccgaggaggctgagataggagaagcgcttgaacccaggaggtgaggttgcagtgagcccagatacgccattgcactccaccctgggcaacaagagtgaaacttcatctcaaaaaaaaaaaaaaaacaaaaaaaaaactgccctaaacgataccagacctgaggccactgaattacctgacccaacccaagagttaaatgctagtttccaaaaacttaagttttaaatgtctgtgcctcagactgcgagttctgtggaggactagacctagaaagcctagaaaatcaccagtatccatcaaaaatggagaaacaaaatgtggtatatccacacaataaataattcagttatttaaaaaatgaagttgatacatgctacatacaacatagatggactttgaatcatgaagtgaaataaaccaaacacaaaagaacaaatattgtataatacagtactgagaatgggtaaattcatagattagtgctgctgggagtaggaggaaataatgggtgtctgctaatggttttaaggtttcttttagggatgataaaaatgttctggaattagataatagtggtgattgcacaaccttgtgaatatattaaaaccactgaattgcacactttaaaagggtgaatttagactgggtgtggtggctcacacctgtaatccctgaactttggaagggcgaggagttcgagaccagcctaaccaacatggtgaaaaatacaaagtagctgggtgtggtggtatgcgcctgtaattccagctacttgagaggctgaagcaaagaatcgcttgaacccaggaggcggacgttgcagtgagccgagacggcgccactgtactccagcctgggcaacagagcgagactatgtctccacttttttttaaaaaagggagtgaatttaattgtacgtgaattataacttttttttttttggatggattctcgctctgtcccccaggctggagtgcagtggtgcgatgtcggcttaccggcacacctgcctactgggttcaagcgattctcatgcctccgcctcccgagtagcggggattacaggcgcccgccaccaggcctgcctagttttgtatttttagtagagacggggtttcgctatgttagccaggctggcgtagaactcctggcctcaagcgatcctcccgcatcggccttccaaagttctgggattacaggtgtgagacgccgcgccagacctctatctcaatgttataacaaggctcaatactcagctaaagtgagcgtcaaatttttatttttattttttcccccgtgacagggtctcgctctgtcgcccgggacggagtgtcgtggtacgggtgcgatctcggctcactgcaggcttgacctccagggaacatgggggcatgccgccaccatgcccggcgtcaaattccttttaaatcaatcatttcttcccagcgtcccccgctccctgcaactcaacttcgtttagctattaacacaaacttcagattccccacgcctgtctgcaggcagcatctccaaggaagcgccaccacggacacctggctgtccgcaccgcggtggggtcccggcgcgttggtgccaagtttcctgtaccccgccttcctacccacctctcgggaggcccggatactgagcccctcactgcactggtgaactagaacaggcctctggactcagcatctctacgctgagacctcaggatcaggtccaccgcagccccaggttctcgacccggaagctgagccttcccacgctccacacccacggctagaaccaccccgggggaagccgctctcctcccccacttacgcgcctcgggcagcgcgcggtgcacacagggagctcgatctaggctatggacaaggggaagagatcttagatggaggccgcgcagaggagaatgggaagggtgcgcgagcgtctctgggaagaaggtccgaacccacgcccagcgccggagggggaaaaaaaaaaacacagaccagagaaggaaccgtaaatcaagtcggaggggaaaagagccgcaaagccttctgcggcagccgtaaagcaacctggaggcgcggtgctggcttttacgttctgagccgctcgccctgccgcttccctgcgcgccctctgcctcctacttcccgccagcttccctcggtccgcggccgtcggatctctgctgccccctggtgggcctggcggtttcgtcaggccttcagcggctagttaggcccgggtggttcacacttcacatgcccagtgcccattaggatgcggggcccgcccacccatgcacaattgggaaaatctgaggatgaatggttgtcagagaccttcccagattccgcccgggccgaggcagcggtggacctggtggttctcgcggcctctcaccaccgccgcgcacatccagtcgtcaccggatggcgccttcggttagcgacgaccgcagggaaatggagaagtgcggcttggggggcgaagtcccctctagaatgtcccctggggccgggcgtggtggctcaggcctgtaatcccaccactttgggacgccgaggcgggctgatcacgaggtcaggagttcgagaccagcctgggcaacatggcgaaaccctgtctctactaaaaatacaaaaaattagccgggcgtggtggcgggcgcctgtagtcccagctactcgggaggctgaggtaggagaatggcgtgaaccccgggggacggagcctgcagtgagccgagatcgccccactgcactccagcctgggcgacagagcgaggctccgtctcaaaaaaaaaaaaaaaagtttttgtagcgacagggtcttgctatgttgcccaggctggtcttgaactcctcgcctcaagtgatcctcttgcctcagcctcccaaagtgctaggattacaggtatgagccactgcacctagcccacttatcattctttttgtggcgagatattttcaacttactctcttagaaattttgaaatatacaataaattattattaactatagtcactatgctgtgcaataaatctcaaaattgtattcctcctgtttaactgttaactttgtaccctgagaccaacatcttcatctccccattatctcccccagccccttattccccagcctctggggaatttttagtagagacagggtttctccatgttggtcaggctggtctcgaactcccaacctcaggtgatctgctcacctcagcctcccaaagtgctgggattacaggtgtgagccactgtgcccagccaatattgagcatttttatgaacctgttgatcatttgtatgtcatcttttgataaatgattttttttttaaagagtcagggtctcaagctatcaagctgttgcccagactgtactgcagtgctgcaatcatggctcactgcaacctctaactcctgggctcaagtgatcctcccacctcagcttcccaggtagctgggactacaagcatatgtcaccacacctggctaatctaaaatttttttgtagagacaaggtctttctatgttgtccaggcttttcacaactcctggcctcaagcaattctcctgtctcagccttccaaagcactgggattacaggtgtaaaccagtgcacctggtgccctttgccccctttttagtcgtgtgatctgattttgctatgagttgtttgctttcttcacatatttagaataggatagtaaccccttattggatatatggtttgcaaatattttctctcactctgttgttttctttgttgtgtcctttcatttctgattttggtaatttgtgtcctctccttttttcactagtccagctagatgtttattaattttacctgtcttttcaaagaaccagctcatggttttattaattactacaattgtttttccatttgtttgtttcactgattttcattgttatcttcatc

SEQ ID NO: 916755 - DNA, 4001 bp, Homo sapiens
catcgcgcccggcctcaatttttaaatgttggaaattatttcaaattaaaaaaaaaaaaaaacagtgcaggccaacaaacattcctgcagaccgtagctagtctcttaactaccagtttgtgacttccagtttaaatcaatcaagcttatctgcatattttcaactttaccatgctctaagtgtattcagatatgtaaaataaagataaacagtgaaagggataattacaatttctggatttcctagttaacattcaatctggactgggatctttaaacatctcctcttgccttgatacgtgatctgttaactttcttacttacaccttttttagatgggtctagccagaactcgtcactaattcgtgatagagcttgaactgctttcccaaatactatggagaaaaagaaaggtgatgcttatattctttccctctaacaataaaaacaaatcacaagactagttcagcattcagaggactcaagagaaattcaaaaataacagtatcttacagactaatgctacattactttaatacagtataatacccttggcaaaatgccagacacatagtcagggctcaataaatttgtagtgtgtgaaatgataaaattgaccgaaatttgtccttctatatgtttacagtgttgcatggagctactgtgcaaaccaatttccatactaatgtattttacaacttgatttagataaatgtatttgaccccccaaaaactgtgaaaacagtgcatggagaagataatctgaagtggttttaatagcttgatagccaagtcacaacaagtcatgagagagaaattaggggtatccaacatacatctctgatgtttgagggcagccagatttccccaccacagaacacatttagggctggaaaacacactagtctgatcccgtacgacattgttaatgttctttttattttttattttttttgagacagagtctcactctgacactcaggctggagtgcagtggcacgagctcaactcactgcagcctcaacctcccgggctcaatcgatcctctcgcctcagccttccaagtagcttgggattacaggcgcccaccactaagcccggctaatttttgtatgtttagtagagacggggtttcatcatgttggtcagggtggtctcgaactcccgacctaaggtgatccacccgccttggcctcccaaagtgctaggattacaggcgtgagccactgcacccggcctaacttccattttgaaagcgccgtttacaacactaatagttcttgtacattccatctattactgggctctttacacgcatttccatttcattgcctccaaacaaactctgtgacgaaggtgctgtcattacccctgtttccgttttagaaactgagccccaaagagatttagtgacttttccaagttcatacatttttaaaaatggtagaatctggggaaaaaaaaaaccaggttaatgctgttctcttggcacaaaaatacttttactgtccaagcattatttttttctctcaactcttccccatgcagtcctcagcatcccgagtttgtggcccgatggtacaactctatttcccggataccacccatattacatctgcctctaagtcacacgagatgggtcctcatcctcccctcagaagttaacagggacttgagtgggtggggctgtggccagggcgtgcgtcctcagtcattgcgcaaaaaggcaaagaggaaaaattagacaatggtagggacgacctattaacgtctgcttttctctctgctaaatgggaagacaacaaaggccgctccacctttcacctgactgccgctcatcacgcacttcagcatggctgccatccgccctaaaaagcaggctcggaaggcgcgcctcagctcgacggcccaggtgcccggatgttgcccgcgcttttcaaagcttcgcgatctcgtctctgcactctaccaccccgcctccacaagttcccaaacggctttacggcggagaagggtccgtgcgggcctccgtacggcaatttctgtctccctctgctctcattggttgcggttaagtgggcgggtcgccgaggagcctgaggaagagggcggcgacggtggtggtgactgagcggagcccggtgacaggatggtgagggctgcagttgcggcgaccaaggcctggctctcgggtggggtgctgcgttgttgggagccgtggggaggccgagggcgaggaattgggaaatcccggaggcctcggcgtcagggcccaggcgctggcctgggaaaggcccagaagaggtctagggaaggaagggagcggccacctctgggtgcggctggcctaggtctcgtatcccggccccaaggggccagaggccatccaaggggtaaaaaggcccctctagcagcccgacctgtcacgagacacgcacgcccgagccagggaaggcctttggtcctatacctcgaatgttccggggataggggcacggtcctccgtttccagacggttcctactcgtttcccgcaaaaagcacctcccgctggttggggtgtagtggtggaagctggcctctcgaatgcagaacaggaagtagcgagcagaatttcgtacccgtttaactttgccatctagggaaagggaataaaccaccctcctcgctcctgaaataacatctagctgccattgagatgagcaggtgtgctctcagagggcgggatttggcgcttgcaattgctggaactgtttctttccacgggttgctacgcctctttagggtaggattccttaatgatgtgtgaactcattgaaactgttgggaaatttttgtgaatatacacatttttctggggagagtgccggtgttggagacttacctagtctcccccagccaccttcaagcaatcaccccttcacccccagtagtttggtgcccctcagaccttcctacataaaaactgggggcctctactagagaggactcagagctgtaatcatattttctttctttctttttgagatggagtctcgctctgtcgcccaggctggagtgcaatgccgcgatctcggctcactgcaatgccgcccgggttcaagcctcagctcctgcctcagcctcccgagtagctgggattacaggcgcccgccaccaagcccgtctaaatttttgtatttttagtagagacggggtttcaccatgttggtcaggctggtctctacctcccgacctcagatgatccacccgcctcggcctcccaaagtgctggggttacaggcgtgagccaccgcgcccggcctgtaatcatattttcaaaggtgcctttgactcttaaaaagtcaattgtttggggcaacccactcgggtccccttccaccctgtgtaagctttgttctttcgctcttcacaataaatcttgctgctgctcaaaaaaaaaaaaaaaatcaattgtttgaaatggagctgtgattatcttcatatttgtgttgatggaggttggctgtaaagggacgtctacctctgacaggcatttattgcattcttttttatttttacaaggaaaccaaagaagctatgcatttttaagattattactattgcatgacaaacagccttttcaagagggggacttacagacatggcagccagagatttatggtgcatgcttctttaaaatctttaatctcacttttaatttttgcttctaaacagactccaatttaaagtaatccgtttacagtaatttcgagacacctatccatgggagaagacataattacttgccatggtttcaaaatattaatgtttctcaagttgtttgagaagtgatccctcttatttagggtagttgtactggaacatcatttttcatatgaaatagaactgggaaaaatttagcattagccagttctttcatgattaaaagcattttatttggcaaaggatacagacgttcaacactcagtacagtgtccagagtctgtgggcagcaaattc

SEQ ID NO: 916756 - DNA, 4001 bp, Homo sapiens
gtgcccaccaccatgccaggctaatttttatatttttagtagagaaggagtttcaccatgtggaccaggctagtctcgaactcctgacctcaggtgatccacccacctcggcctcccaaagtgctgggattacaggcgtgagccatcgcgcccggcctcaatttttaaatgttggaaattatttcaaattaaaaaaaaaaaaaaacagtgcaggccaacaaacattcctgcagaccgtagctagtctcttaactaccagtttgtgacttccagtttaaatcaatcaagcttatctgcatattttcaactttaccatgctctaagtgtattcagatatgtaaaataaagataaacagtgaaagggataattacaatttctggatttcctagttaacattcaatctggactgggatctttaaacatctcctcttgccttgatacgtgatctgttaactttcttacttacaccttttttagatgggtctagccagaactcgtcactaattcgtgatagagcttgaactgctttcccaaatactatggagaaaaagaaaggtgatgcttatattctttccctctaacaataaaaacaaatcacaagactagttcagcattcagaggactcaagagaaattcaaaaataacagtatcttacagactaatgctacattactttaatacagtataatacccttggcaaaatgccagacacatagtcagggctcaataaatttgtagtgtgtgaaatgataaaattgaccgaaatttgtccttctatatgtttacagtgttgcatggagctactgtgcaaaccaatttccatactaatgtattttacaacttgatttagataaatgtatttgaccccccaaaaactgtgaaaacagtgcatggagaagataatctgaagtggttttaatagcttgatagccaagtcacaacaagtcatgagagagaaattaggggtatccaacatacatctctgatgtttgagggcagccagatttccccaccacagaacacatttagggctggaaaacacactagtctgatcccgtacgacattgttaatgttctttttattttttattttttttgagacagagtctcactctgacactcaggctggagtgcagtggcacgagctcaactcactgcagcctcaacctcccgggctcaatcgatcctctcgcctcagccttccaagtagcttgggattacaggcgcccaccactaagcccggctaatttttgtatgtttagtagagacggggtttcatcatgttggtcagggtggtctcgaactcccgacctaaggtgatccacccgccttggcctcccaaagtgctaggattacaggcgtgagccactgcacccggcctaacttccattttgaaagcgccgtttacaacactaatagttcttgtacattccatctattactgggctctttacacgcatttccatttcattgcctccaaacaaactctgtgacgaaggtgctgtcattacccctgtttccgttttagaaactgagccccaaagagatttagtgacttttccaagttcatacatttttaaaaatggtagaatctggggaaaaaaaaaaccaggttaatgctgttctcttggcacaaaaatacttttactgtccaagcattatttttttctctcaactcttccccatgcagtcctcagcatcccgagtttgtggcccgatggtacaactctatttcccggataccacccatattacatctgcctctaagtcacacgagatgggtcctcatcctcccctcagaagttaacagggacttgagtgggtggggctgtggccagggcgtgcgtcctcagtcattgcgcaaaaaggcaaagaggaaaaattagacaatggtagggacgacctattaacgtctgcttttctctctgctaaatgggaagacaacaaaggccgctccacctttcacctgactgccgctcatcacgcacttcagcatggctgccatccgccctaaaaagcaggctcggaaggcgcgcctcagctcgacggcccaggtgcccggatgttgcccgcgcttttcaaagcttcgcgatctcgtctctgcactctaccaccccgcctccacaagttcccaaacggctttacggcggagaagggtccgtgcgggcctccgtacggcaatttctgtctccctctgctctcattggttgcggttaagtgggcgggtcgccgaggagcctgaggaagagggcggcgacggtggtggtgactgagcggagcccggtgacaggatggtgagggctgcagttgcggcgaccaaggcctggctctcgggtggggtgctgcgttgttgggagccgtggggaggccgagggcgaggaattgggaaatcccggaggcctcggcgtcagggcccaggcgctggcctgggaaaggcccagaagaggtctagggaaggaagggagcggccacctctgggtgcggctggcctaggtctcgtatcccggccccaaggggccagaggccatccaaggggtaaaaaggcccctctagcagcccgacctgtcacgagacacgcacgcccgagccagggaaggcctttggtcctatacctcgaatgttccggggataggggcacggtcctccgtttccagacggttcctactcgtttcccgcaaaaagcacctcccgctggttggggtgtagtggtggaagctggcctctcgaatgcagaacaggaagtagcgagcagaatttcgtacccgtttaactttgccatctagggaaagggaataaaccaccctcctcgctcctgaaataacatctagctgccattgagatgagcaggtgtgctctcagagggcgggatttggcgcttgcaattgctggaactgtttctttccacgggttgctacgcctctttagggtaggattccttaatgatgtgtgaactcattgaaactgttgggaaatttttgtgaatatacacatttttctggggagagtgccggtgttggagacttacctagtctcccccagccaccttcaagcaatcaccccttcacccccagtagtttggtgcccctcagaccttcctacataaaaactgggggcctctactagagaggactcagagctgtaatcatattttctttctttctttttgagatggagtctcgctctgtcgcccaggctggagtgcaatgccgcgatctcggctcactgcaatgccgcccgggttcaagcctcagctcctgcctcagcctcccgagtagctgggattacaggcgcccgccaccaagcccgtctaaatttttgtatttttagtagagacggggtttcaccatgttggtcaggctggtctctacctcccgacctcagatgatccacccgcctcggcctcccaaagtgctggggttacaggcgtgagccaccgcgcccggcctgtaatcatattttcaaaggtgcctttgactcttaaaaagtcaattgtttggggcaacccactcgggtccccttccaccctgtgtaagctttgttctttcgctcttcacaataaatcttgctgctgctcaaaaaaaaaaaaaaaatcaattgtttgaaatggagctgtgattatcttcatatttgtgttgatggaggttggctgtaaagggacgtctacctctgacaggcatttattgcattcttttttatttttacaaggaaaccaaagaagctatgcatttttaagattattactattgcatgacaaacagccttttcaagagggggacttacagacatggcagccagagatttatggtgcatgcttctttaaaatctttaatctcacttttaatttttgcttctaaacagactccaatttaaagtaatccgtttacagtaatttcgagacacctatccatgggagaagacataattacttgccatggtttcaaaatattaatgtttctcaagttgtttgagaagtgatccctcttatttagggtagttgtac

SEQ ID NO: 916757 - DNA, 4001 bp, Homo sapiens
gtgcctatagtccaagctactcaggatgctgaggtaagaggatggcttgagcttaggaggcggaagctgcactccaggttgggcaacagagcgaaaccctgtctcaaaaaaaaattaaataaataaataacccagataaagcctatatattcacctgcaggaataactatggtacagttagcaaggcaagaaaccacaactttttggttaaaggattcttttgggggaaattcttgtgtttatttgtacatgctcaaggaaagcaaaaggcatggaatgattccagataatgtgttatcggcaacgtgaggttccaagagagatgagtattttcttgattcctctttttggtacaatgaacattttccttgcaatttttaaatcaaactatttgagaaaaatactctgcacaacttagtacaaacaatttaacaagaaatcagctagtcttgtataacacttgttaagatctcctatctcctctggtctagtatctggtgtttattgttttctaatacagtaaaaacattcattgatcaccacaccaaaatacatacatgaacctaagtttccaaatactgaaactgctgttaacagcctattattgttttaaatatgacttataagtcccagtgtaagtcatagttttttctaaagcatgcctagcatgacacagcatgcaaatgacacaactttaataaaattttctctgccaccaaaatggtggtcaactccccgaagtccacttgtctttttttaacccaaaaatgacactatttgttggaacagacctgattttctataaccttgaagactgaagtacacaaaacctctcaaaaaccgttcagcaagttacaaatgcctaccttggatataatagccatctctcagtccaccgaatttctcctggccggctgtgtcccatacattgaacttaataggtcctctgttggtgtggaacactaggggatgaacctcaacacccaaggtggctgaaacggaaacgatgcgattgagtggatgaacttacccatttctcacatatttccacaagcaaggttttccagcacatacctacatacttcttctcaaattcaccagtcaaatgacgtttcacgaaggtcgtttttccagtaccaccatcaccaaccaatacaagctgttgaaaaacacattttggaagtaaaccctaaacacttcacctctcaagatcccagagtcacggaactttaaccaccacaggctcacttaaaacaaagaatgtggatgcggggccccattacagccatcgtggccccaggaggagggacccgcgagtcgcacgcggtcgggctcggccgcctcccgccccgcagggttacctactttgaactggacctggggctctccctgcgcagccatcgcggcgttcctgcggaggcagaggacggaggcgagcgctcgcgcggccccgcagcccatggcggccccgctcccgcgcccccagcgccccacgtgcccgccccacaaaggcctcccgcccgcggcgccatggcggccaggcctgggagcgggaaggcggcgggcggggccggcatccggggcggcggggcccggggaacggcggccggaggtgtagggatgggaacgggactgggaccgggacggggatgagagcggaggatgaaacgggggttcgcgggggctagcgccgaccccacgcccgtctcctgccccggcccggccgggcccgcaccacccacctactcagccgcccgctgcccctgggtccgccacccgccccggccctggccccggctccgacccctatcccgccgccgccacccctgtccccgcccggccgtgccgggcccgccgggtcgcgataccttccagaagcgtctccgcgcccgtccgactgaggctggaaagatggcggaagcgcaattcaaacgccggagacgcagccgacgccggcgcgagagcaggggcggggccggcgcggggcggggttgcaaggggcggggcaacggcgcggcgcccgcccacgtggcccgcgcgtgcgcgcacgcacgcaacgcggttcggtcggccgctcgggcggtcgctgcgcttagggtggggcgggaggcgcggtggaccgcgtgggagggcgagccgggagcgcgtacgcaagccggccggtggggaccgcgtgcgccgacgccccgggcgggctcccgggcgcgcatgcgctgaaagcgaggcggcgcgcccctgagcgggagacgttgggcgcggcccgacggtcgcggctctcctgcctcccgggtgggaggcggtactcgctcgggcagacgtggtcaggcacgcggcttccaggcgctggccagcctgtccttgtctgtgccccgtggggtgggggttcttgaggtcctggggcttagggtggctcgcgtgcgcgcaggacgggtgggtgacagaacgaatgaatgaatgaatggggtctaggcccgtcctccagaggcagcccgctgttctgtctctccagatcgtagccttcacgcccccaggaccagggccagttggagagcgaggaaccagagagggatgcacccacccagaaaaacggctacttattttttttaagagacggagtctcgctacgttgcccaggctggtctcgaactctcaggctcgggcgatcctcccgcctcagcctcccgagtagctgggactacaggcgcgcaccacatcaggggtaattttttaaaaatttttttgagagacagaatctaactatgtctcccaggctggcctcaggggatccacccgcctcggcctcccaaagcgtccggcttctcaaagcgtttcataggttggcagctttggccgctgcatgctacagacaaaatgatgaaatactgtttgcagtctggacgcgtctaccagccctagttaccaacggggacggaatgagtaagtgctcagcttcccagccccctgttggcctgaagctgtaagagcccaaacaagcttgagctagagggacccgacttcctgggcgcccctgccgacatgcagacagataaaggcccaaatcagcgcagtcaagcgcctcagaagagtccaccatggggagagagccgcagtgaccgaagagtcctccctgcagtcctgagcacacttgcaggcgagtccgctaggaaccccagtgacgcaaattaggcacaaagcaggcgacaaccggcctgctgggaacgcaagtccgagctcccccagaaccctcaggggaaccccaagcacctctcagacgctgctggcgggagagcagaatctaacagtaaaacgggaatgcccattgcttgtgaccccggatttccatttctagggagaggccccagagttaaactcatgcctcacgcatgtgcacaacatttaatactgtataacatttaaaaggaatgacggtcatctgtttcaacagggttagatagatgtcaaaaggatagtgttgagaaaagaagaaagaggtgataacagctttataaagtctaggccacctgtaatcccagcactttgggagtccgaggtaggaggatcccttaaacccaggagttacaggctgcaatgggcaatgatctcaccattgcactccagcctgggagacagagcaagaccctgttttcaaaaattaatacataaaacctaacactatatgtaactttatctagagggattatatatatagtataatgtcatttatgtatattttttacaaatacacataaaacaaaagcatattggctattggatatatgtattttgttgttttttttaattgactgcaaggatctatataccatatcctgatggttattgcttcaagaaagggtagaaaggagtgtgatggaactgagaagaggagtcaaagaagactttaactttacctgcaatgttctatttccttttttttttttttttgagacagcctcactctcgctcaggctggagtgcagtggtgcgatctcggctcattgcaa

SEQ ID NO: 916758 - DNA, 4001 bp, Homo sapiens
agctcaaataagactaaaggaaatgcaagtgaaaacacctaacgtagtacacattaaaagcacagatgagctcaaataagactatcattcaggctctgtgtgcttaaagttatttaatctgagtatcagtttcctcacctaaaacctgaggatgaaactactcaagtggttttttctcctatttgactaaggtacccactttttaaaagtgcgatatgggaagaatattctttgtaagatgataattcactataaaaacgttgtatttctttctccatgttgtctcttacggatagactactgtcctaaaggtcagtggacccactaactggttatcttatctaggcctcagtttcctcctccataaaatgacagggtgggactggatgatctaaatagtcccttccggcccttaaaaagtcccatgactccactatgactcaataaatactatttcaagagtcagcttttaagaataatatgggcttgaagttaaatgaatgtctcccttttctataagttactttttgttaagataaggtcttgttgagcaagtccaaacagtattctaattacgaaaaaagagagctgaaaaataaatttacaagtcagagctttaaattgttaagtactcgacatatatgagatgctgcctgcaaaaccaaaatccaattagacggaattaattttaaaatactaaaatcacaatcttcatttagtgtcaactttctaccccgtaaaaatgtgatttccccttactgcaacacagaactgcttctattcataccaatcagaagttacagggccaaaatgtttttctaaactattaaagagagtgggagaggggggaaagcgaaggggaaggaaaccatctgctttaacttgcaaaaatgatcttttctccaaaagacatcagtgtttttcagaagaaaaatccggagagcccggttcactgggcgtagttttaaataaaattcatggcgctgatagttttaggattagacacctcgagatggcgaaaaagagaagaggacaaacttcctggattttctctccctctaagagaaagagatttcctcttgctgacgaagggaaaggcccctttaacagtttttctctacacggtggctgctgccagactaagtggggctctctccgctgccttcctcctgccacttcccgcaacaaatggagcaagcaagccccgtttcaggcaaactttttcgctgtcaggctcaagcccgcggggcgcctgggagtggtttcccccgaaggctcctcgccctagctcggggctgggagaagctaggtcttcgcaaaggacaactttctggtttccgttctaacttccacccataccacggagggaacccaggcgacaagcgagggggctcggggcggggagcgagtcttcgggggagccggcggggaaaggagggcggcgggagaagctgcggcggacgcgggctgaagagagcgggcgggtgggggggtcctcgggctctcacttcctccgccatatttcagacatttgaccccttccgcaaagcgcgctgttctcccgcggcggcggcggctgctcctcctcgccggcccgcaaggcagcgcgctcgcgggcccggcgcctggccctcgcgccacctgccgcgcgccgaggggctgccgccgccggggcccctgaccgccgcgcccggcccgcgcctcgccgcaccccacccgctcccctcagccggcgcccggccccgcgcggccgccgccgcggcttccctcagcggccacgcactcactctgcgaacctctcacgctgtcaccgggtccctgcagccagcgtcgccccgcgctccccccgggtcgctactctaggcgccacggcggtcctgccgctgccgcgccgctccggctggtttacacgcctgaatctgggcgaggtttggcgatgtcgccttgacgtcaggcgttcagcctcgctccagcttccgcccgcgggcggggcgcgcgggtgcgcggcccgggaaggggcgggcctagggggcggggcgaggggagccgagggggcggggccgccgcgcgccgggtcctcggcgccggcctctagccggcctgcatcgcagccggagcgcaggccctgcccacgggccccttagctgcctctgggcggcatgtctgccgaggttcttctctctagctgcgccgcgccttcaggctcgcttccccaggctgtctggtgggcggaatccgcgcgtcggtgttcctgaccctcgtgggttccagtggaaccctccgaaacccaaaaggcgccgcctcttaatgcaaactgtagtcaccgactcgtccagtctgttggtattcgcgtcgtcctttgtgctgggcaaagtaaccgagaagtaacggagagcgcgcattttctacacctagagctccccgagggagcctgggccagcaagtctttccattcttgagatgccttttctcctggattgacaagtgttttatccattggtgtcttaacccgggcgaactctttccaaattcccatgccaaacgcagttaacaaatcgatgatttctaaataagtttgtaccctgcacctaaaccaacgccatttatataactaaaataaattgcgtatttaaatgcatgtcctggacgctttattcacttcacaggattacccataggcaagtaggtttatcgtgtgacttcagggcaccagaaaacactttctgttccaaaatgcctcgttccaaaaagggcgggaacttaacacgggaatttaccattcttacttacccttagtacaagaaatttatcagaactttttcttgaagcagttttgatgggcgaggagattaagagagcaaagtgcagggaaaagggattgaggggtcatttaagactaactttcttggttcataatttaattaggccctgtacaaattattcttgaaataaatcttaataaacgttgataaatttggaagataaatggaatgtgactaatttcactccgtttaagaatatgtagtgattgaaaactaagctaacctaagttaaatgaatagatgagaatgaattataacagttctctgtgttttataatgttttacaatttaggttaattgagtagattacctatttcgataatttctatttccttagaaaaatatctttttaaaaattgtttattgtctgcatttattgtgtatacaacatgatcgtttgaagtaatgtatacattgttacattacctcacagagttacctttttttttgagagtcttgctctgtcacccaggctagagtgcagtggcatgatctcggctcactggaatttctgcttctcaggttcaagagattctcctgtctcagcctcccgagtagctgggatgacgggcgcgtgccaccacgcccagctaatttttagtagaaaggggatttcgccatgttggccaggctggtctcgaattcctgacctcaggtgatgcgctcgcctgggccccccaaagtgctgggattacaggcgtgactcaccgcgccggctgagttagcattttttttttcttttttgagacagagtttcgctcttgttgcccaggctggaaggcaatggcgtgatctcggctcactgcaacctccgcccccacctcccaccctcgggttcaagcgattctcctgcctcagcctcccgactagctgggattacaggcatgcgccaccacgcccggctaattttgtatttttagtagagacggggtttctccatgttggtcaggctggtctggaactcccgacctcaggtgatccgcccgcctgggcctcccgaagtgctgggattacatgcgtgagccaccgcgcctggccttgagttagcatttttttatgagaacacttaacatccattctttagaaaacctttttaaataaaagtttcaaaggcaaatttcagagcagtccgttggaattactgtaacttctcaatgaatgagtgaattacaaataaat

SEQ ID NO: 916759 - DNA, 4001 bp, Homo sapiens
aacatagcgaaacctgggtggacacacgcagtggagacataactgaatctcaagctaagctactctatttagtctggatggttggggatagcttctctgctgatttggatagtacagccattatcttgcctcccaaatcccaccattctttcccctccctgctctctccttcattctttcaggtccagagatgtttctcactagcaaagggcactttggtgatctcagattctccaaatgtctcagaatccttccctgagccccccaaaggcaggtaccaagcagtgtccacatgatcacctcaccctaagaccaaaacgcagaattagcacagttcagtaactcactaaaggagaatgttgccacggtgatgcacccagaactgtaaccaagcttacctcactccaacccattgacccggcccccatacctcccacctccacctggaaagaacacacaagtacctaactcaatgccggctcactgaggtgacagataaacaacaaatccctttccccttccccccatgcccaaacagagacatttgggcagaacacacacacagacacacacacgttgcagctgtgtgagccacccacgcacactgcagacaagcttcctgacccagtgtccacggcagctgtaccactgtacacccccagagcaagctgggccaccagcagcatgccaagccatgatctaggcccccctctagctctggtactggccctggcacctgggcaggtgaaaggtactcacccagcgcagcccctggatgcagctcggacgctggtgctccagcagcagctggtaggagcagcttcggggccggtgcatccttctcaacaccatgttgagtagtgtcccctccggcaccacgtcagggagggctcccacccgcggtgctcccagagctgggctatcctccacagccaggcccacctgccagcagctctcacctggccagcccacctgtgacacggggaggaaagtggacagccatgggacacgactggggcggctgggccacagtacaactgccccaggcagaactacttccttagagtcctctggactggtcaggcggaggtgctgcaaccctgccaggagctggggggaggaacaggaagaccttcactggggcctgccggtctggcgcacttaggggtctccagctggctcttggaaaagatcaggcccttcttagtcctctttggaattctgtcccatctcactgcccatgcccctgcagggatctccactacctcccagtatgaagctatagattcactaggtctcccagaaatgcagcttcggcttaaacccttctcctctcctcctcagccctgactaaccctccctctcccacccaaactccccaccgtgtcagcttcctctcccgccctctcctgctcctcctcaaccctgaccccaccttacccaccttcatgtttcttttcaagctcgcacagccgtgcaggctctagcaaaaggctggggggtccccagcgacccccatcagctttgataaggggatccggagggtgccagtgggtaagtccaggtacagtgaactgggccagtgcctagctggactggctgccagggcagcaggatgcagggctcggtggagaggctcctcttgggtgagtagaggggtgggggcgtggtggggggacgccacccagccaccggcgacagggagccccgagcctgcgccttcgtctcagacgaaggagccagctggcaccgggcgctgaagcaaggctgcgctggcaccggtccgggcgggagctgtcacaccccctgcgctgcccgcccccttcccctccccaggactggcggagggggcggggtggaggcgccctgccttacggtagaggaatgcgtaggggaagggggccggcactggcaggctttggagtccgcacccgggggtaccagagtggacatccgcctgagcccagagtatccccagggggcaggagcggccccgaagtgtgtggaggaggccgcaacggccggggtgtcagggatccggcggtgagtggctgcactggccgccacgtggccgggaggagaaatgcaaacaaggaaaccggggagagcggggagggggtgagtcactgcggcctcacccgggagggaaatccgggctggggccgcttcccggctgggggtgtctgcctcctgtttcggttcagggtctccagccgcccgggggagggaataggcggctttcccgcggggaatcccgctgccttgcctcccacagttccgttcccagacccacgccccactgccccctgccccagcacacacacaccgggagcagttgaggaaactgaggctggagaggaaggactgctctccagaacgggtaggggccctaagaggagattggggttgtggcagagcttccaggggagcagaaggtgttcgagtaccacgccccctaccgcgcgctccctggtggccgggtaggttgaggcggagaccgggcattccagcgccctgctaggcaggcttgctaccgaggctccacgcctccctgggcctcagtttccaccactgtgcaaatggcccagcgcgggcctcttcgccccactcctgagagggtggagagacagtggccggggacagcgacccgtaattcaggacgataatgagggtttggaaggaggtgaacgccccacccccagctttttaggactttttgccccttctcttcccttttccctttgctgttgagccagcccagactgggaagaagtatctctaaaaagcctataccccaattttgggatgccaagcccgcatcctccaccatgattattttcttgaaagtgaggagaagactgggaagaggtagctctaagaagcctatactcccaattttgggatgccaagcccccatcctccaccaattattattttcttgaaagtggggagagaaattttaattgtgattaaaatcccatttttaatgtatacatgtataaaaaatgtttcccagaagcttactaaaatgcaggctccgtccccagcaattcatattcaatcctattggcatgaaatggaaaatctgtatttggaacaaacaccccaggtcatctgctgtgtccacacattaagaaacgctggtggagttttaaatgcctctccggggaaggaggaaagcctgagaatgaatctgacctcagacccaaatccattcaacggagttctggtaatttggaagaaggaagagcaacctggaaactgacaggaaaggatgacaagttgggagtcacaggtatgcatggggaagagttagggggatggagtcatgagtttcgggttgctggggccagtgccctggcctagaagttcttgcaggaaggcttcctgagactggcagttgggtcacaaaggggtcccctatttcctattcttgctgcccttactctgggcaggtggaagatgctggggagtgaggcaggacacttgtatacatttcagcagagctacaaaatctaatcatgtgcgggcactctttcaagtgctttccatgtgtttaatccctgccacgatcctgtgaggtatgtacttctgttatcctcacgtcacagatggggaaactgaggctcagggatattaaggaaattgccaaagtcacacagctagtaaatggtggagctggggcatgaatccaggttgtctgtctccacgtactcaccatggtatactgcgtatactctgtatgtattctattcttctaatgtagactagactgcctaggagagtctactcaaaaaaggaaaattgaggccgggtgcgatggctcacgcctgtaatcccaacaccttgggaggctgaggtgggggtgaatcatgaggtcaggagttcaagactagcctgaccaacatggtgaaaccctgtctctactaaaaatacaaaaattagccaggcgtggtggcgtgcgcctggaatcccagctactcaggaggctgaggcaggag

SEQ ID NO: 916760 - DNA, 4001 bp, Homo sapiens
aatagctacagccagtgacccggagagcggagagccggagagccagaggggtagcggaggaggacccaggctcatgataaggaagaccctagtagagaacagctctaccaggactgacatgtggactctcctctcaattctgattgcaaagaggagcccctcatcttggtaggtctcagttttttcaactcagcctcactgtaaatggcagttgggcaaggtagggggaaggagggagagggtggtggttattccactcaaaaggacttgccaataagaagtgaactctcggctaggcgcaatggctcatgcttgtaatcccagtgctttgggagggcgaggtgggcagatcacgaggtcaagcgatcaagaccatcctggccaatatggtgaaaccccatctctactaaaaatacaaaaattagctgggcgtggtggcgcacacctgtagccccagctactcaggaagctgaggcaggagaatcacttgaacctgggaggcagaggctgtagtgagccaagattgcttcactgcactccagcctggtgacagaggaagactctggttaaaaaaaaaaaaaagaaagaaaagaaaaaagaaatgaactctcccggccaagcgcagtgggtcacgcctgtaataccagcactttgggaggccaaggcaggtggattgcttgggcctaggagttcaagacctacctaggcaacatagcgaaacctgggtggacacacgcagtggagacataactgaatctcaagctaagctactctatttagtctggatggttggggatagcttctctgctgatttggatagtacagccattatcttgcctcccaaatcccaccattctttcccctccctgctctctccttcattctttcaggtccagagatgtttctcactagcaaagggcactttggtgatctcagattctccaaatgtctcagaatccttccctgagccccccaaaggcaggtaccaagcagtgtccacatgatcacctcaccctaagaccaaaacgcagaattagcacagttcagtaactcactaaaggagaatgttgccacggtgatgcacccagaactgtaaccaagcttacctcactccaacccattgacccggcccccatacctcccacctccacctggaaagaacacacaagtacctaactcaatgccggctcactgaggtgacagataaacaacaaatccctttccccttccccccatgcccaaacagagacatttgggcagaacacacacacagacacacacacgttgcagctgtgtgagccacccacgcacactgcagacaagcttcctgacccagtgtccacggcagctgtaccactgtacacccccagagcaagctgggccaccagcagcatgccaagccatgatctaggcccccctctagctctggtactggccctggcacctgggcaggtgaaaggtactcacccagcgcagcccctggatgcagctcggacgctggtgctccagcagcagctggtaggagcagcttcggggccggtgcatccttctcaacaccatgttgagtagtgtcccctccggcaccacgtcagggagggctcccacccgcggtgctcccagagctgggctatcctccacagccaggcccacctgccagcagctctcacctggccagcccacctgtgacacggggaggaaagtggacagccatgggacacgactggggcggctgggccacagtacaactgccccaggcagaactacttccttagagtcctctggactggtcaggcggaggtgctgcaaccctgccaggagctggggggaggaacaggaagaccttcactggggcctgccggtctggcgcacttaggggtctccagctggctcttggaaaagatcaggcccttcttagtcctctttggaattctgtcccatctcactgcccatgcccctgcagggatctccactacctcccagtatgaagctatagattcactaggtctcccagaaatgcagcttcggcttaaacccttctcctctcctcctcagccctgactaaccctccctctcccacccaaactccccaccgtgtcagcttcctctcccgccctctcctgctcctcctcaaccctgaccccaccttacccaccttcatgtttcttttcaagctcgcacagccgtgcaggctctagcaaaaggctggggggtccccagcgacccccatcagctttgataaggggatccggagggtgccagtgggtaagtccaggtacagtgaactgggccagtgcctagctggactggctgccagggcagcaggatgcagggctcggtggagaggctcctcttgggtgagtagaggggtgggggcgtggtggggggacgccacccagccaccggcgacagggagccccgagcctgcgccttcgtctcagacgaaggagccagctggcaccgggcgctgaagcaaggctgcgctggcaccggtccgggcgggagctgtcacaccccctgcgctgcccgcccccttcccctccccaggactggcggagggggcggggtggaggcgccctgccttacggtagaggaatgcgtaggggaagggggccggcactggcaggctttggagtccgcacccgggggtaccagagtggacatccgcctgagcccagagtatccccagggggcaggagcggccccgaagtgtgtggaggaggccgcaacggccggggtgtcagggatccggcggtgagtggctgcactggccgccacgtggccgggaggagaaatgcaaacaaggaaaccggggagagcggggagggggtgagtcactgcggcctcacccgggagggaaatccgggctggggccgcttcccggctgggggtgtctgcctcctgtttcggttcagggtctccagccgcccgggggagggaataggcggctttcccgcggggaatcccgctgccttgcctcccacagttccgttcccagacccacgccccactgccccctgccccagcacacacacaccgggagcagttgaggaaactgaggctggagaggaaggactgctctccagaacgggtaggggccctaagaggagattggggttgtggcagagcttccaggggagcagaaggtgttcgagtaccacgccccctaccgcgcgctccctggtggccgggtaggttgaggcggagaccgggcattccagcgccctgctaggcaggcttgctaccgaggctccacgcctccctgggcctcagtttccaccactgtgcaaatggcccagcgcgggcctcttcgccccactcctgagagggtggagagacagtggccggggacagcgacccgtaattcaggacgataatgagggtttggaaggaggtgaacgccccacccccagctttttaggactttttgccccttctcttcccttttccctttgctgttgagccagcccagactgggaagaagtatctctaaaaagcctataccccaattttgggatgccaagcccgcatcctccaccatgattattttcttgaaagtgaggagaagactgggaagaggtagctctaagaagcctatactcccaattttgggatgccaagcccccatcctccaccaattattattttcttgaaagtggggagagaaattttaattgtgattaaaatcccatttttaatgtatacatgtataaaaaatgtttcccagaagcttactaaaatgcaggctccgtccccagcaattcatattcaatcctattggcatgaaatggaaaatctgtatttggaacaaacaccccaggtcatctgctgtgtccacacattaagaaacgctggtggagttttaaatgcctctccggggaaggaggaaagcctgagaatgaatctgacctcagacccaaatccattcaacggagttctggtaatttggaagaaggaagagcaacctggaaactgacaggaaaggatgacaagttgggagtcac

SEQ ID NO: 916761 - DNA, 4001 bp, Homo sapiens
acccaggctcatgataaggaagaccctagtagagaacagctctaccaggactgacatgtggactctcctctcaattctgattgcaaagaggagcccctcatcttggtaggtctcagttttttcaactcagcctcactgtaaatggcagttgggcaaggtagggggaaggagggagagggtggtggttattccactcaaaaggacttgccaataagaagtgaactctcggctaggcgcaatggctcatgcttgtaatcccagtgctttgggagggcgaggtgggcagatcacgaggtcaagcgatcaagaccatcctggccaatatggtgaaaccccatctctactaaaaatacaaaaattagctgggcgtggtggcgcacacctgtagccccagctactcaggaagctgaggcaggagaatcacttgaacctgggaggcagaggctgtagtgagccaagattgcttcactgcactccagcctggtgacagaggaagactctggttaaaaaaaaaaaaaagaaagaaaagaaaaaagaaatgaactctcccggccaagcgcagtgggtcacgcctgtaataccagcactttgggaggccaaggcaggtggattgcttgggcctaggagttcaagacctacctaggcaacatagcgaaacctgggtggacacacgcagtggagacataactgaatctcaagctaagctactctatttagtctggatggttggggatagcttctctgctgatttggatagtacagccattatcttgcctcccaaatcccaccattctttcccctccctgctctctccttcattctttcaggtccagagatgtttctcactagcaaagggcactttggtgatctcagattctccaaatgtctcagaatccttccctgagccccccaaaggcaggtaccaagcagtgtccacatgatcacctcaccctaagaccaaaacgcagaattagcacagttcagtaactcactaaaggagaatgttgccacggtgatgcacccagaactgtaaccaagcttacctcactccaacccattgacccggcccccatacctcccacctccacctggaaagaacacacaagtacctaactcaatgccggctcactgaggtgacagataaacaacaaatccctttccccttccccccatgcccaaacagagacatttgggcagaacacacacacagacacacacacgttgcagctgtgtgagccacccacgcacactgcagacaagcttcctgacccagtgtccacggcagctgtaccactgtacacccccagagcaagctgggccaccagcagcatgccaagccatgatctaggcccccctctagctctggtactggccctggcacctgggcaggtgaaaggtactcacccagcgcagcccctggatgcagctcggacgctggtgctccagcagcagctggtaggagcagcttcggggccggtgcatccttctcaacaccatgttgagtagtgtcccctccggcaccacgtcagggagggctcccacccgcggtgctcccagagctgggctatcctccacagccaggcccacctgccagcagctctcacctggccagcccacctgtgacacggggaggaaagtggacagccatgggacacgactggggcggctgggccacagtacaactgccccaggcagaactacttccttagagtcctctggactggtcaggcggaggtgctgcaaccctgccaggagctggggggaggaacaggaagaccttcactggggcctgccggtctggcgcacttaggggtctccagctggctcttggaaaagatcaggcccttcttagtcctctttggaattctgtcccatctcactgcccatgcccctgcagggatctccactacctcccagtatgaagctatagattcactaggtctcccagaaatgcagcttcggcttaaacccttctcctctcctcctcagccctgactaaccctccctctcccacccaaactccccaccgtgtcagcttcctctcccgccctctcctgctcctcctcaaccctgaccccaccttacccaccttcatgtttcttttcaagctcgcacagccgtgcaggctctagcaaaaggctggggggtccccagcgacccccatcagctttgataaggggatccggagggtgccagtgggtaagtccaggtacagtgaactgggccagtgcctagctggactggctgccagggcagcaggatgcagggctcggtggagaggctcctcttgggtgagtagaggggtgggggcgtggtggggggacgccacccagccaccggcgacagggagccccgagcctgcgccttcgtctcagacgaaggagccagctggcaccgggcgctgaagcaaggctgcgctggcaccggtccgggcgggagctgtcacaccccctgcgctgcccgcccccttcccctccccaggactggcggagggggcggggtggaggcgccctgccttacggtagaggaatgcgtaggggaagggggccggcactggcaggctttggagtccgcacccgggggtaccagagtggacatccgcctgagcccagagtatccccagggggcaggagcggccccgaagtgtgtggaggaggccgcaacggccggggtgtcagggatccggcggtgagtggctgcactggccgccacgtggccgggaggagaaatgcaaacaaggaaaccggggagagcggggagggggtgagtcactgcggcctcacccgggagggaaatccgggctggggccgcttcccggctgggggtgtctgcctcctgtttcggttcagggtctccagccgcccgggggagggaataggcggctttcccgcggggaatcccgctgccttgcctcccacagttccgttcccagacccacgccccactgccccctgccccagcacacacacaccgggagcagttgaggaaactgaggctggagaggaaggactgctctccagaacgggtaggggccctaagaggagattggggttgtggcagagcttccaggggagcagaaggtgttcgagtaccacgccccctaccgcgcgctccctggtggccgggtaggttgaggcggagaccgggcattccagcgccctgctaggcaggcttgctaccgaggctccacgcctccctgggcctcagtttccaccactgtgcaaatggcccagcgcgggcctcttcgccccactcctgagagggtggagagacagtggccggggacagcgacccgtaattcaggacgataatgagggtttggaaggaggtgaacgccccacccccagctttttaggactttttgccccttctcttcccttttccctttgctgttgagccagcccagactgggaagaagtatctctaaaaagcctataccccaattttgggatgccaagcccgcatcctccaccatgattattttcttgaaagtgaggagaagactgggaagaggtagctctaagaagcctatactcccaattttgggatgccaagcccccatcctccaccaattattattttcttgaaagtggggagagaaattttaattgtgattaaaatcccatttttaatgtatacatgtataaaaaatgtttcccagaagcttactaaaatgcaggctccgtccccagcaattcatattcaatcctattggcatgaaatggaaaatctgtatttggaacaaacaccccaggtcatctgctgtgtccacacattaagaaacgctggtggagttttaaatgcctctccggggaaggaggaaagcctgagaatgaatctgacctcagacccaaatccattcaacggagttctggtaatttggaagaaggaagagcaacctggaaactgacaggaaaggatgacaagttgggagtcacaggtatgcatggggaagagttagggggatggagtcatgagtttcgggttgctggggccagtgc

SEQ ID NO: 916762 - DNA, 4001 bp, Homo sapiens
aggggctcttacaaagctgcttctcttagagctgaggtggagttgaggggagggcatggatgaagggggctgccggatggaggggggtgtgtttccctgtcgccctgcccgctccagagcctggaacaaagctgctcttgtcggccactctccacccgctgcccccctcccctctgtataaacacgaccacctttttccatgaccccatctccagcctgggcagagaacccaggcatcctctgctctagcctgggcccccagcctgctccccaggaggcagcagtgggccaggcttccttggcattgtgccatccctgggggagtccagacccttgagtctccacctctcatccccaggtgccctccctccaccctactagccccagggaggggcagtgcccaggaggcaggcaggcaatgccagtggaatgtgtgtgggcatcagagggcatggacagggtggggcagaggggggaactggaggtgccagttaggtggctttctgagccaggggtgggggtgtgccggggtgtgggggggcgtgccccatgctgcctactaggctgtaggccacagtgcgtgtgtgtgtgtgtgtgtgtgtgtgtgtgtgtgtgtgtgtgtgtgtatgtctgtctatatgggatacccaagctccaggctccctgcacacactacccccactcccctgtcttctctctacttgcctcaaggatatgagatgctggctatggtccttgaccccaactcagcatctgaccctaagggcagaagcctcagacttgaggattgggattccagctgcccaggaccagagccctaaagcgggacagtcatctcagtttcttgccctgaagacctcctactcaggctcccctgcccccaccaccactaacaaccaagcatcttcttacccgctggccgcctgcagagactggcttctacatactgggtcaggttgagggaactgggccgtagctgctaaagacagagaggcagcgtcagtggaactctgggaccagcactcctgggtccctgtcccggtcttcctgctctttctttgttccatttgggcttccctcaagaatactccagaggtgccccccaccttggctggagggagccaaggctcgcacctgggctgggaacgtgtgggagggaatccagcgcttcaaggaaagttcacagatccctatcctatgcaccagtccttcggaactcctggacgcggagggccaggctcacttgcctctggacgttttccttgccttctgatgtccaagctgtcccattccactggggagggaggaacttggaccagcatggaacatcaaatctacccctcagagcccgggggtaagggggtggtagtctttccccgcgagaggaaaccctgtcttctctcacattcccagcacaaaaatataaggaggaatgccccctggctgaagacttccccaaatgctgtcctctgctatgcaccaaaatgaagggcagatgacccagcccatcctcagcctgttaaaatcttccccattcccttcccacagcaggactggcctgggtcggggcaagaagcccccctcaagcccggcggccagcctggccagcctcgggagggcattcgcccgtgcagctcctccgcgccccctcccccagccgcctcgccggaggacccaggcgacggggcgggcgagcctgcttccccgcctgactcacctggagtgggagggggaagggaggcggcggagccccgaggtcccggcgtcgggcagtctcttggatggagcgtcgcaatgtccggggctcgccgtactggggggctcctgggggggcacggctctaggctgggactgtcccggggcctctcggagcccgcccgcccacgtgaccgccccaaaatatccgacacattttctcccaaaccgcacactgactctgcaggcggggacacggaaaatattttctttctttttctccctccccaccccccccccaacctccctccctgcccaactccctcctccccctcccgccctcgctcctccctcccctgcctgcccctgcccggctccctcctctgtgccctggggctggggggcggagggatgggtgggcgggagggggactgggcggggcggcccgggacgcctgggtctctgcccttcccatttgctaggcttccgtgactccatcctctgggaggccgggcacggctggcagaggaggtcagtgtcctggccccgtgatgccaaccttttctctctggcacttttctcctttctgccttttggggggactagttgagttgtctgtggccaggctgtgactcttgcgaggccagtctctggcgcctccccagggtaggcaatggggcggtacccactccctcccagtgctggattggccgggcaggagtatgccagatctagaatagatgctcctgcccttactctttgctcagccttcacctgcagatccaagtagcctctcccttcccctagcccacctcagtcctttggtcccaggagcaaactggttgactagtggctgttgctgggggtgctgaggccagggctcacagacatcttccctgtcatcttgcctggagtaagctccaggagttagggcgcctgggtccctggctgccagttgtcccccacctttaggcctggatttggaaggggagaggctggagaggagggcaggaggaactgtggctgggagtgggaggagccttgggctgggtgtgagagagaaagcccaggcagagggtgtgtgtctgccctagccagcaccggcctgcctgcctgcctgcctggtagatgtgccatgaatgctgttgactccgggtgtgtgtgtgtgtgcgtgtgtgtgtgtgtgtgtctgtgcaagcgcgtgcgcatgccagtgccgagagtgagtgtctgtgtctgatgggggcattatctgcttcaacatagacagactctcaaccctagagtgagagaacccagtggtttcactctgcattctactgaggacagagggagagaaaagaatgggtctgcagtccaagctctgtgcacggatcccaaacactcccatggggactggagttgggagggagaaagaggagaaggggagagtctgagctaggctgataggctggacagacatacccaaagtaccttccccagcaatgctcgcagggtgaccaggacctgggacacagactcctgggtcacgtcacattttccatactggaattacttggctttgtccttgctcccccctgggggccaggtgtcctccctcctgggaaaggctgcttttggtagccaaagtcaggtgaaggagatgggggaaagaagaggcatgctgtggttacctcagggaatgggagatggcaatgggggtgcagacaagccctctctttcactccagggataggaagagctaggaatagatactccagggtcccgtccccaggtggcctagctgctgttgactttgcttggttaccctgggagcagctctcagcagtgtgggaggggcgggtgtcagggagttggacccaggcgtccaggctggggtgggatggcgccccgcctgtgtggcagggctcctgccaagaggctgcaaagttaacccctcctgccctgccctagtggtggctggtgggaggagggcgggcccagttgtggtttgggaatgtggccctaatttccccctcccccttccagcacatctgtacttggtttacagtgaatgagcctcctgtcctcatgaaccaggcaagggcaccactccctccttggccaggcattctgacacagaaccaggcaccacccgtgacactctcctctccctgctgagtatcatctctctgaactcttcccttctccttctgtagaggggcttagggttggtcccaaagatctacagctggagctctgagacagtgcatctaggtagcaaatggggccagggaagcctaaatcgggggacaaaacacttgggg

SEQ ID NO: 916763 - DNA, 4001 bp, Homo sapiens
agcccttcctgaaagattctttccatctcagcacccccacaacatataacataccccaactccccatcctattgggcaatgagaggaaagttaagaattcacagggatttggtgcaaagcaatagttccatgctttctcggttctttaaatgacacacttttaaattcttcccccaccccacccaaaagtaaagtcaagtccggtctcctggtttgccatctccctcttccagcttcccagttgttaaatttgagcagctctgctctggaaccaaaaaaaaaaatccgaacttgtaaacagcactgcttggtgccaaggagcgaggcgcgttggcgggggcttggtgacctggcgtgcgcactcccccagcgcccgccgccccgcccgctgcccgccccttcccacccttcccagcgtgcccccaagcccctcatccccgggccgtccgcacccaggcagcgagcacatcccagcccagggtaaatttggggggtgttccaggctgcgctcctggcccctccccacaccccacccccgccaggcactgcggcccaagcttcaaagccgcctctcatctggacttcatttttactgcctctcagtccccagctttttattactgctctggaaaggggttccagggccccaggcctggcatctcccatttcacggagggggaagatagatatttggggacccagtaatggtgctcgccctgccgctgtcaacttcaggccaccccccaccacacacacagactttgctttaaacttttcgcttcctgctgaagttgttgtgtgttggagccataggaaaaagtaatctctgcatataaccgcatacacgtttccaaacatttctttttttatatgggggtggcgtacaaaactcagccttctccctcttgtgtgcacaaccttttccacccggcatgagaacacacaggatgcactctcgaacacagcactttccaaaaccgcccccgcagccacgcaggggcacacgccctcccggcctcacgccacaaacatcccctcacaggccatgtggacctggcagctgtcgcaggcgacactggtggagagacccttgctcccacacccacaccacctaggcaaggcgctgcacactccagggattcacacgctctgcaaacgatatttttaacactgccagcttcccacatgggctttacaaacgccacccacggtcctgagtgtcatatccttccagggccacggacgtgaaggcgcaaactacccacacacctcggtctctccctatccccaggaactctggagtggcatcaaccacaggttcgagctaaacacccaccataaaaaccacacacactccaaacactactgcacacacgcaaaggagacgctgaggcccccacgtttaaagggccagtaccttacatagaaagggccagaagctcctccttgcacctcagttccactctttacacacggaaagagtaaatcccaccctctcctgcaccctacaccccagccccggactccggtacctacattgcaggctggcgggttgcggccaggcaaaagattcaagtccggcgaaacaggagccgccggtggctctgcgcagcaagccggccccgggcccggccgccccgtacagccgtcgcggacccggggcaaacgtttccatacagtcgtacatcgcgacccggcttgaagggaaactgggtgctggaaacaccaaggacccgcagccgattccccctcctcccccggcggcgccccgctccagcagggggggagggggagggctagcatagggcgctgggctgcatgcgggtaaggggtgggcggggaagaggggggatccccagcaggggaaagggactgggcggggcgcgaagctggggctgccgctttagcctccgtccagctcttatctgggtgcttcggcagctagcactggggagaccttttttaaaagcgaagcctggaggggtggggggtggggcttggagagcgaagggggccgggcaccgagatgagcaaagctgagagtggagcgcacacatacacatacgtacactcgctccgcggcgcgcgcgcttgcttagacacacatccgtgcatgcatttatcttatcaggcaccaagaatttgcaaatatgcaagagtgaacatacatgtgagcacgcatataaaatcataggtgcacacacgtttgtgcaaacacaccttgctcgggagaatgcttgcaggcatactctccacagctcataggctttgcatgcatttgcactgaggcgcgtgcccaggtcggggttggaagaaggagaggaggaaccaagcataagcatttcctttcagagttttccctctccccaaactctccctttttcacactagtcaatacaggggtgttaaggatgactggggagaggggaacgtggaggtccccgcgcgcagctgctctcctgaggctcgggacctgcactacctccacccctctcattcccaggcctggctccgccctcgccctccgcgcgcccgcttcagggccgaaaagtgcattcctgcggctcggcgcgcgctgcctcctccttccttcccgtctccccacccgcggtcctagggccggagcgcgctcccgccgtgaactctctgggaacccccctcggggcgggtggccgagcgcgctcacctcctcctgacccggccccgccccaccccgcccaggccgtcttcagcgctgccgcggagtccccccgccccctccagcgcagccagagtctacccctcctagcccgagcagtccgccctccgccgcggcccgggccgcctccctccgagtccccgaagccttatcccgcaactgacgccccctaagcgcctcgaccgtctctctcgatgctccttcttcgaacataacttcacttttagagcacaaaactaccccataagctgtgcctgccgtgccaactgcgcctcgatgaatctgcccctgatggccaactcccctcctccagtttctcactgccaagggctccctcggcaataggggcgcttctggtcactgactgttctcagggtctttaaataccctctagcctaggcataactgccctcccttcggttagtgcccctcagctctccaaggccgcaacactgttccctgggttgccccttccggcactgagcgccctcgcccggcggagaagggggtgaggtgggcggggggctggccacgtcagaagtttgccctggcccggcagggccgaatggggggaccctggccccggacagcgccagcagcggcgactcccggaaatccccccctcccccgcgccccgccctcagccgccgggccgcccggcctgcctgcccagccggctctgtcagcgccgctcacacgggcagcgccgcggagcgggagcggcgcccggcccggcccttcccccgccaggcggctgtggctgggccagggcggggcgcgcttttctaagaatctgttgtaccgggtggggggcgcactggggtgctgcaggagtggggcgcctgttggaagaataaagggcaggaaggggtgccagagtaggcgagggatggcgggcgcgggggaggggcggggggctgccggggctgggaaaaggcctgacttgtggatggcgaggaaacctcggggtggcaaggctgactagggggcttgaagcagggatggagagggaatgcactgctctttccaacccagtgtaaactcccttctcctcccccaaccccaaatacccatttctgaatccagtcacccgaaccccacaaaaaaaagaaagaaagagagagaaagaaaagaaagagaaagaaagaagaaagaaaaaggaagaaagagaaaggaggagaaagaaagagagagagagagagagaaagaaagaactttctgaatcagaatctgaccagcagcaaacaacaacaaaaacagttaagtgcaaaatagggagtaccccgaaaacaagagggaaaga

SEQ ID NO: 916764 - DNA, 4001 bp, Homo sapiens
gtggcaaaaattgctctcaacagctgcccccttgacgcagctgcagtgttttgggggttgggaatgtcataaaatcaggcaggaaagtcctctctgggagcccacaccttggggaatcagcacagagctaagactgaatcttgacacaggtgaaggctcccaatccatgctcctgctcacctgggccacaggggaactcctaacaggtcctccaccctcccagctggatgggagaccccaggcaaccagatggggactccggtccagagctctcattgcccaaatgggaaaccaaggcccagagagaagcaggttcaaggtcacacaacaaatgtcctccagaggatcccacacctgtcgcaggtgctaaggccctcagagccccttctgggcactatgccaagcaggagggggaacccgccccccatattctgctgattcagcagctgctgactcagccctgggggaagcatagcttgggactagtagtgaagggagccgtagggtcccccagtcccattgcacctggctggggagggggtcgcagcaaggaattggctcttcaagcagctcagcacccggggaaggcccacacgaggctgggagccacaagactggggagctcagggcttggggtcaaaaggaccctggagggccacctggtgacactctgcaaacctaagcaccagatccacacaggatgttagggctcatctgatcccaggccctctccaagggtcctccccagggttcccttgctaggcccccacccacgcctggaggagccacctccaacatctgcctggactaaggaagagaccccccgctttctcccctcccagatctgacagaatatggccctctaatcccctcttcagctctggacgaccccctttagtacatcccgggaacaaagacaccccctcccctgcccgggggtgaggcggggcatctgctaactctaggcgcccccctcccaccgggacagccatgggcatgcggcctctcgcccctttaaagcggaactgccccaagaccagtcttggacaagaacccctcgccctcctgccaacccgccctggcacgcggaaagggcgacgtcggccccaccccaggccttgcgcgcccctcacccagaagcgcccgaggagtactcacacgtccttggcaggcagcgcgcggccctccaccacgcgaacattcagggagctgctcttggccatggcgcctagccacaaactttccaggcagaagggcgctcaggttccgaggctggaccaggggacgtctacatgtcacctgcttcaagcctggctccctgcctcgtggtcccagtgccgcctgtccgagacccgggtagctggatgggagatttccgaaagaggagaaggtgtaggtgcccggggagggagcgcccgtccggactctacaggtaggagccgtgctccgagcaggaggagcgcgcagggggcgcagcgggctcttgccgaggcgtctggagctccagacaagcaggctgggcgggcagggggcgggaggggcggcccagggacctccccacaatcccgcctccaatggggtcccccacctgaccccgggccccctcgcgcgccctctaccggcaccccagtcatgcgcgccagagcgcacgggcggcggagacaagggtgcaccgccaggtggggaggggcccccgtcctgatgggcgtggccgctggctcctggtgagttggcattgggcttaaaagacatggtctgtgcccccgcctgtccctcatccaacatattcacacctctccgcccccacccctccttgcctaccatgcagacacctgcctcctctctccaacctccgcgccccccggtccaggagcaagtattagtggtgggtgggaggcgtcgccagagagagggtcgcatgttccctgggggtccgttcagagtcaagggaggggccttgaacatccccttccatctcgttctagtttccagttaaacacagaacccagactctgctctaacgtcacgggctggcactgcgggggaggaagccgcggccagatgggggaggggaaggcttgaagataaccactacagcgatgataaaaagtcatctacagttgtttgaacacttcatgggtgccaggcactgttctaagcgctttactgggattagctcatttttgtctccagatgtgcactacacactactccactgttaccccattatccgcagtttatggataaagaaactgaggttcagagggattaaataacttggcagaggtctcacagtcagtaactgatttgccttccaggggttcgaatcctggctctgccatttggtagctgtctggacttgggtaagccattcaacctctctgtgctttggtttggttttctcatctgttgagtgaggatgacattgcatttcagtcacaggattttgaaagaattaaaagagttaatgaagataaaagtctcaggacagtgacaagtacctaatacacgtccagaaagtgtttgatattctgattgttgtcctttgaggcgtgggccacgcgtcacctctcctgggaaggcttccaggatgcccttccactccggtagagattttctttcctttctctctgctccagtggctccaggtttgtacatttttctgattttaaatgagataatatgacaggcagggcctgtcccagaacagatccgttcgcacacttatttctccctgtgaattcattgttgacctgcccaagacctcttagaaaggccaggcaccaatgggagtgcccctgcagactgagtgcgggagccaacgcccagaccggtgagaccaggagtgcccttcctggatccgtcagcagcccaatggtctgcttcccagtctcccttcttgactccccacccagcaacccagacaggctgatgaggaactcagagccctggaattccttccccagctggtggctgcctggtgagtctctgacccaccagagatggggtctcagttaatcccatctgggaaatggacctagcagaacaggctccaaggcttagaagtattgcaacatcctcagcggggcatgaggggtaatccagggttagatccagaacagtaatagccccaaaggagtcatcccactgtgatttttttttttttttttgcccagctggagggcagggctcgatcttggctcactgcaacttccactcctgggttcaagtgattctcctgcttcagcctcctgagtagctgggactacaggcacccactactatgcccggttaatttttgtatttttagtagatttttatagtttgtatttttatatcaccatgttggccaggctggtcttgaactcctgatctcaagcaatccacccacctcagcctcccaaagtgctgggattataggcgtgagccaccatgcctggcccactgtgatctttatcagttaccccagattctctccaaagaaaatataccacctaaggtggtggggggaatggtacttaaggtatttgctatgtaactgaagctttaagacgggaatcctgccccccgccccacaccgccccccaccacacacatttagtggaagctactgtttgagcctttttcttctgtgagcctgcaaagaccgcagacaggcctccagacccccaggaccccttttggaaccccctgatgatggaacctaaggggcctgttcctccagcccccatgggatgccagccaaactgccacgcagccatcttggcccatcttccagagctaagcaggaagtcatatacccaaacacccttccccagctccccacggggaaataccaaggatatagactgtgccagctgggcctccagcaagccagcgctgttacctgtccaatatctggagggtgaccccaaaatttgcctggggcaatggccacagtccccaaactttgcacatggcccggccatttcctgttgttctgagaatctctgacctgaaac

SEQ ID NO: 916765 - DNA, 4001 bp, Homo sapiens
agaaccccccctgccagctggggctaagtgactcctccccacccttgctctagggcatgacctatttcatagctcactggcccaggaattgggggcaggaagtttggccaagagctgcaggaaccaggcatgactcaagtcccttctccagaagagcagcaggttaccgtaagccagtgtccaggtgcaggggtgacacccatcgccccctcatgacctctcacccagggctggtggaggggccagagctcagtgagtgagaaccccgtttctggaaagaactcctttcaccacctagcagctgccaggcatccagcctggcctcaatgccctaacagtgtaggccgtctcattcccagggcctctgaggggacatcttagaaagagtctggtgggggggcttgtccagccactgaactgtcagagcacacactctgcttctcattcagggtgtgtatatttggagtagccaatgaggatgaagggtggcaaaaattgctctcaacagctgcccccttgacgcagctgcagtgttttgggggttgggaatgtcataaaatcaggcaggaaagtcctctctgggagcccacaccttggggaatcagcacagagctaagactgaatcttgacacaggtgaaggctcccaatccatgctcctgctcacctgggccacaggggaactcctaacaggtcctccaccctcccagctggatgggagaccccaggcaaccagatggggactccggtccagagctctcattgcccaaatgggaaaccaaggcccagagagaagcaggttcaaggtcacacaacaaatgtcctccagaggatcccacacctgtcgcaggtgctaaggccctcagagccccttctgggcactatgccaagcaggagggggaacccgccccccatattctgctgattcagcagctgctgactcagccctgggggaagcatagcttgggactagtagtgaagggagccgtagggtcccccagtcccattgcacctggctggggagggggtcgcagcaaggaattggctcttcaagcagctcagcacccggggaaggcccacacgaggctgggagccacaagactggggagctcagggcttggggtcaaaaggaccctggagggccacctggtgacactctgcaaacctaagcaccagatccacacaggatgttagggctcatctgatcccaggccctctccaagggtcctccccagggttcccttgctaggcccccacccacgcctggaggagccacctccaacatctgcctggactaaggaagagaccccccgctttctcccctcccagatctgacagaatatggccctctaatcccctcttcagctctggacgaccccctttagtacatcccgggaacaaagacaccccctcccctgcccgggggtgaggcggggcatctgctaactctaggcgcccccctcccaccgggacagccatgggcatgcggcctctcgcccctttaaagcggaactgccccaagaccagtcttggacaagaacccctcgccctcctgccaacccgccctggcacgcggaaagggcgacgtcggccccaccccaggccttgcgcgcccctcacccagaagcgcccgaggagtactcacacgtccttggcaggcagcgcgcggccctccaccacgcgaacattcagggagctgctcttggccatggcgcctagccacaaactttccaggcagaagggcgctcaggttccgaggctggaccaggggacgtctacatgtcacctgcttcaagcctggctccctgcctcgtggtcccagtgccgcctgtccgagacccgggtagctggatgggagatttccgaaagaggagaaggtgtaggtgcccggggagggagcgcccgtccggactctacaggtaggagccgtgctccgagcaggaggagcgcgcagggggcgcagcgggctcttgccgaggcgtctggagctccagacaagcaggctgggcgggcagggggcgggaggggcggcccagggacctccccacaatcccgcctccaatggggtcccccacctgaccccgggccccctcgcgcgccctctaccggcaccccagtcatgcgcgccagagcgcacgggcggcggagacaagggtgcaccgccaggtggggaggggcccccgtcctgatgggcgtggccgctggctcctggtgagttggcattgggcttaaaagacatggtctgtgcccccgcctgtccctcatccaacatattcacacctctccgcccccacccctccttgcctaccatgcagacacctgcctcctctctccaacctccgcgccccccggtccaggagcaagtattagtggtgggtgggaggcgtcgccagagagagggtcgcatgttccctgggggtccgttcagagtcaagggaggggccttgaacatccccttccatctcgttctagtttccagttaaacacagaacccagactctgctctaacgtcacgggctggcactgcgggggaggaagccgcggccagatgggggaggggaaggcttgaagataaccactacagcgatgataaaaagtcatctacagttgtttgaacacttcatgggtgccaggcactgttctaagcgctttactgggattagctcatttttgtctccagatgtgcactacacactactccactgttaccccattatccgcagtttatggataaagaaactgaggttcagagggattaaataacttggcagaggtctcacagtcagtaactgatttgccttccaggggttcgaatcctggctctgccatttggtagctgtctggacttgggtaagccattcaacctctctgtgctttggtttggttttctcatctgttgagtgaggatgacattgcatttcagtcacaggattttgaaagaattaaaagagttaatgaagataaaagtctcaggacagtgacaagtacctaatacacgtccagaaagtgtttgatattctgattgttgtcctttgaggcgtgggccacgcgtcacctctcctgggaaggcttccaggatgcccttccactccggtagagattttctttcctttctctctgctccagtggctccaggtttgtacatttttctgattttaaatgagataatatgacaggcagggcctgtcccagaacagatccgttcgcacacttatttctccctgtgaattcattgttgacctgcccaagacctcttagaaaggccaggcaccaatgggagtgcccctgcagactgagtgcgggagccaacgcccagaccggtgagaccaggagtgcccttcctggatccgtcagcagcccaatggtctgcttcccagtctcccttcttgactccccacccagcaacccagacaggctgatgaggaactcagagccctggaattccttccccagctggtggctgcctggtgagtctctgacccaccagagatggggtctcagttaatcccatctgggaaatggacctagcagaacaggctccaaggcttagaagtattgcaacatcctcagcggggcatgaggggtaatccagggttagatccagaacagtaatagccccaaaggagtcatcccactgtgatttttttttttttttttgcccagctggagggcagggctcgatcttggctcactgcaacttccactcctgggttcaagtgattctcctgcttcagcctcctgagtagctgggactacaggcacccactactatgcccggttaatttttgtatttttagtagatttttatagtttgtatttttatatcaccatgttggccaggctggtcttgaactcctgatctcaagcaatccacccacctcagcctcccaaagtgctgggattataggcgtgagccaccatgcctggcccactgtgatctttatcagttaccccagattctctccaaagaaaatataccacctaaggtggtggggggaatggt

SEQ ID NO: 916766 - DNA, 4001 bp, Homo sapiens
tgctttaggcagaatctgggccctttcccttaggagaagagggaaagaacacaccccacctaagggctcccatggcatggagctcccagcagcctccaggaagagcccctttgaagaagggtgctgacagctagggaaactgaggcagggtggccagaaccccccctgccagctggggctaagtgactcctccccacccttgctctagggcatgacctatttcatagctcactggcccaggaattgggggcaggaagtttggccaagagctgcaggaaccaggcatgactcaagtcccttctccagaagagcagcaggttaccgtaagccagtgtccaggtgcaggggtgacacccatcgccccctcatgacctctcacccagggctggtggaggggccagagctcagtgagtgagaaccccgtttctggaaagaactcctttcaccacctagcagctgccaggcatccagcctggcctcaatgccctaacagtgtaggccgtctcattcccagggcctctgaggggacatcttagaaagagtctggtgggggggcttgtccagccactgaactgtcagagcacacactctgcttctcattcagggtgtgtatatttggagtagccaatgaggatgaagggtggcaaaaattgctctcaacagctgcccccttgacgcagctgcagtgttttgggggttgggaatgtcataaaatcaggcaggaaagtcctctctgggagcccacaccttggggaatcagcacagagctaagactgaatcttgacacaggtgaaggctcccaatccatgctcctgctcacctgggccacaggggaactcctaacaggtcctccaccctcccagctggatgggagaccccaggcaaccagatggggactccggtccagagctctcattgcccaaatgggaaaccaaggcccagagagaagcaggttcaaggtcacacaacaaatgtcctccagaggatcccacacctgtcgcaggtgctaaggccctcagagccccttctgggcactatgccaagcaggagggggaacccgccccccatattctgctgattcagcagctgctgactcagccctgggggaagcatagcttgggactagtagtgaagggagccgtagggtcccccagtcccattgcacctggctggggagggggtcgcagcaaggaattggctcttcaagcagctcagcacccggggaaggcccacacgaggctgggagccacaagactggggagctcagggcttggggtcaaaaggaccctggagggccacctggtgacactctgcaaacctaagcaccagatccacacaggatgttagggctcatctgatcccaggccctctccaagggtcctccccagggttcccttgctaggcccccacccacgcctggaggagccacctccaacatctgcctggactaaggaagagaccccccgctttctcccctcccagatctgacagaatatggccctctaatcccctcttcagctctggacgaccccctttagtacatcccgggaacaaagacaccccctcccctgcccgggggtgaggcggggcatctgctaactctaggcgcccccctcccaccgggacagccatgggcatgcggcctctcgcccctttaaagcggaactgccccaagaccagtcttggacaagaacccctcgccctcctgccaacccgccctggcacgcggaaagggcgacgtcggccccaccccaggccttgcgcgcccctcacccagaagcgcccgaggagtactcacacgtccttggcaggcagcgcgcggccctccaccacgcgaacattcagggagctgctcttggccatggcgcctagccacaaactttccaggcagaagggcgctcaggttccgaggctggaccaggggacgtctacatgtcacctgcttcaagcctggctccctgcctcgtggtcccagtgccgcctgtccgagacccgggtagctggatgggagatttccgaaagaggagaaggtgtaggtgcccggggagggagcgcccgtccggactctacaggtaggagccgtgctccgagcaggaggagcgcgcagggggcgcagcgggctcttgccgaggcgtctggagctccagacaagcaggctgggcgggcagggggcgggaggggcggcccagggacctccccacaatcccgcctccaatggggtcccccacctgaccccgggccccctcgcgcgccctctaccggcaccccagtcatgcgcgccagagcgcacgggcggcggagacaagggtgcaccgccaggtggggaggggcccccgtcctgatgggcgtggccgctggctcctggtgagttggcattgggcttaaaagacatggtctgtgcccccgcctgtccctcatccaacatattcacacctctccgcccccacccctccttgcctaccatgcagacacctgcctcctctctccaacctccgcgccccccggtccaggagcaagtattagtggtgggtgggaggcgtcgccagagagagggtcgcatgttccctgggggtccgttcagagtcaagggaggggccttgaacatccccttccatctcgttctagtttccagttaaacacagaacccagactctgctctaacgtcacgggctggcactgcgggggaggaagccgcggccagatgggggaggggaaggcttgaagataaccactacagcgatgataaaaagtcatctacagttgtttgaacacttcatgggtgccaggcactgttctaagcgctttactgggattagctcatttttgtctccagatgtgcactacacactactccactgttaccccattatccgcagtttatggataaagaaactgaggttcagagggattaaataacttggcagaggtctcacagtcagtaactgatttgccttccaggggttcgaatcctggctctgccatttggtagctgtctggacttgggtaagccattcaacctctctgtgctttggtttggttttctcatctgttgagtgaggatgacattgcatttcagtcacaggattttgaaagaattaaaagagttaatgaagataaaagtctcaggacagtgacaagtacctaatacacgtccagaaagtgtttgatattctgattgttgtcctttgaggcgtgggccacgcgtcacctctcctgggaaggcttccaggatgcccttccactccggtagagattttctttcctttctctctgctccagtggctccaggtttgtacatttttctgattttaaatgagataatatgacaggcagggcctgtcccagaacagatccgttcgcacacttatttctccctgtgaattcattgttgacctgcccaagacctcttagaaaggccaggcaccaatgggagtgcccctgcagactgagtgcgggagccaacgcccagaccggtgagaccaggagtgcccttcctggatccgtcagcagcccaatggtctgcttcccagtctcccttcttgactccccacccagcaacccagacaggctgatgaggaactcagagccctggaattccttccccagctggtggctgcctggtgagtctctgacccaccagagatggggtctcagttaatcccatctgggaaatggacctagcagaacaggctccaaggcttagaagtattgcaacatcctcagcggggcatgaggggtaatccagggttagatccagaacagtaatagccccaaaggagtcatcccactgtgatttttttttttttttttgcccagctggagggcagggctcgatcttggctcactgcaacttccactcctgggttcaagtgattctcctgcttcagcctcctgagtagctgggactacaggcacccactactatgcccggttaatttttgtatttttagtagatttttatagtttgtatttttatatcaccatgttggccaggctggtct

SEQ ID NO: 916767 - DNA, 4001 bp, Homo sapiens
gtgagactccatctcaaaaaaaaaaaaaaaaaaagaaacgctaaatgcatataaacctagaaaaaaactgatgtctttactctttaaagcactaaaggattctcatacaattcaaacctgaatagtttggcccttgtggcatctcacccctggagaatccaagaaccagccagttttcaggagattagcagacacctctggaataaacttcaaactaccatgagttccttttcatgtcaagtggtgaaagcaacataaatgaaaggagaaaatgcaaaacggagaaggggaagagagaggccaagaaagagaaagcaaaaatggaaaaagcataagcaaatgcaatttttctacaacccagggagggtgggcatgggggaggagagggcgtttccaacttccaaacttcacagcaatctcatgctctcagaacacactctgctgaaagtaagagatcccactcaaagtgactcgtaaatagtggggccttaagccttagaaacaatacaagacggacaactatggcaccgggacttgagattaactgcggttactgaataagggcacttgacttcagcttacccttcaccgtctcctctcctcctcctggtttgggacttaagagcctgaaaagactagaacttccgaattttagaaagaattttacttcagaaagtggctaaacttaagaggtctggcaagaccaccctgacagattgcaccctcccacatccaccaaaagaagttatcatccggcccctgaacgattcttcttgcttctagtctctaggtctcagtccggtattaatagaaatgtttggcgaacgcctgttttctaaaagcaacaaatttgtgccattacaatcttctgtaatctgatgtgagcgtggccgggttggcccggctcccctggtgcggctcctagtgccaggaggccgcgggctctagcaccgggctcctcagtccagccgacgtgccccgtttcgggaaggcctcccaaaaaacacggctacagctggcgaaactggcacaagttcccttcccatcttttcccaactcgtgcttcccacggcatgctgcctccaaaaaaggaagaaaccggcgaaaaggttagctgtcgctggctagtatttagcataggagcttgtttgcaaaacatctgggcaccaaaaaacctagctttacagaaaacgcacaaccctgagtcccgcaacggagatttagtgagagcctatggtggcgaggcccacggtgcccttggacccccactccaccaggtcgcccgggccaggaagaggggaggtcaggtcacccggccacccctagctattacacgttgacccaagccactctgggggccacagatgagtaagctgactaacaggaaggacaggcgcgcgaacccgaccgtcgacccagcggggacgcgaaggggaaacctgggggagtggcccggggacgcctgctggctccggggctgctccccgcaggcggcagcccgaggcggagctgcagaggccatctggcgcggaaggcagaagccggccctcagcctccccgcccttcctccgccttccctcgcctacacgcacaagctccaggcacgttcccgggacccgaaaaggcagaagccacttctcggcccgctcctccttcccggcgagcatcccccgagcgccccgcagagacacgtggaggcagggggcgcgggctggcgggttccccggaactctggggcgcgggctgcagcgcccgccgcgcgccactcacttgttggccggagcggggcttgccctggggcgctctcctgaagaaggaggtcctggcggtgaagaagaagtcctcggcgtcctcctccaggctgctgtagccgctgctcatgctgccggtcccgtcgcgcgcgggcggcctccccggggcgcaggcggccagggagggggtgcggcgcccgccagccccgcgaggttcccggcgcgcagccccgggcagtccttatgcagctgcggccgccgctcaatcaggctctcccggcccctcctgccgcctccccgccaggctccaggcgcggctcggccccggtgcgcccgcgaccccgcctccctgggccccgccccggacgggcgaccggccgagccccaccccgcgcggccgcgaccctccccgcccgcccgcaggtggggggagcccggcccgccccttccaggcgcgcgggtttctcccgacagcgtcgcggaacccggaaagccgggcgctagggctgcgtctgctggggctgtgctcgggtcgcttcctcaacctcccggaaactgcaaattcctctgcgagccgtccgcccgcccccagcctcgctggctcgagtttcggagagggcgggagcagagcggggaactttctctgcgtccactccctgctcgcccccgcaccagggtcctgtaggggtgggtgggggttgcccggccgagggaccccccaggtcccacggcttcctgcagccgcaacgcccagtcctgaaccccagcagctcgcccctccaggaggatttcaagttggcagagatgggtggggaggtcaaaaactgggttgagtttattcgaatgaaaacatcctttctggtcattcatttgagcttcggtcttacccttttccccttctttctagcgagggctcacttccaaataagatcgttatcttaggcgcactcagtgcaactgaaaggtgaactagttctatagttacagaacaatcgagtgcttatcaattaaatgtgctttgtaaatgtccccgccacaatcagccttccacggtcacccacaaggcatggtttaagtggtggggataaggagatcagggaattccatccatccacgtacaaaaaaagtttccatgttttctaaaactcttcagtcagctaatcctcttaaagccaccagtgggtaacagtcttttacaccttggtgttactgcactgatttaaataatactaatttcaagatcttgactgaaaggtttttttgaagctgcaagccctgctatagttagcgagcttcagaagaggtttcattaggaggggaagagagacgttagaaaagagaaaatgtccatccatcatagccaaactagccaaactctcttacattatctccttcaatcctccgagcaactctgcaaggtacgtagtgctattttatgccggttttacacctagagcagcagctgaggcttaaagaaaggaaagtggctgtaggaggcagtactcggaccgttctgctttgcgttctgttgatctgaacgtggtcacataccctactgggttctctgcttggtatcggtcagccgtgctcttttgtggactacaggaggaagagttggacccgaaatgacgggaaggagagaagaattgactcatgagtcatcctactgtccctaggctgaaagaaggcttgcaaacctgctccaccttcgggcttacacatccatcttgtaaactagtatatattaccccacgtgattcacaacaactccagaaggagggcctttgagttacagcccattttaaaggtcctacaacattaaagtcttcttctcggccacacagctactgaatgataggaagccaggaattctaactccatatagtttcacccagcttaagctgatccgtgtgtgtgccatgcacataatctaatgtaggagaatagggctttatgacaaatttttcttatttggtttctcttatttcattattcagatataatattagcgcagctcttattaaatattccaaggtaagaataatgtgtaggttaagggcttaaattactcattttattgtgggtagaaaggggaaaataattttacctagaacaagttgaagtttatgaatactttgaggaaaaatgcattaaaatgctttattggccgggcgcgatggctcacgcctgaggaggcagaggcgggtggatcacttgaggtcaggagttggaaaccagcctggccaacgt

SEQ ID NO: 916768 - DNA, 4001 bp, Homo sapiens
gtaaaaaatcttagtcaaaggaaacgaattcctttgacgaccaacagtttcctcatgtgtgaactgtttatccttttctcatttaactgggtttgatagttttcttaaattacaagagttattcaaaaaatataaacattaaccgtttgttctacttgctgtgtttacccagtgtttgattttgtatttggctgcattataagcaaagcagaaatttttactttgtcatatagtcaaaccaaatattctttatttcctgtatcgataagaatgttactagcctgctaaaaatgatcacaattctttttcctgtgggtttaaaaaaactctcaactcttcctatgtaaattctctaatcaatctgattttttgtttgtccattgttttgtggtcttcccacgtctttgttgttaaaattcatgagatataataaacattgatttaattaagagaacatttggatttgtttataggtttacagtggcactggtatttcagaattaatggcttatttaaaagcttattttaaaaacactagaaatttttcttgtaaaacagtagttactacaaacagtggcttagtcccttgcacattcttttaaaagacctaagacagttctaggccatctggtcacctggataggtaagtcagaacacatgcaaggggaaggagaataaacctaattattttctccagagaaggtacacaaatcctttttgtcatcctaaaaacaagaaaggcctggctgaacattaatctcctagcactttgctttagctctctgcatatgacacagcataggtttcattatcccctgtatgaagaaagaaggggccaccttggcaatgacaagctgattccataactgtgctcctcagttatgagggcctgtgagatgttaaagttcctggggataaaggcttccaaagttaaagaaatgttaagaaagccagtaaataaagttaaacaagttcctttacagctagacttctctgagactttaataggctggtgtgcactctaaatttcaaaggagagttttatatgctgcccaatctagagaacatttaagaaaacagaaaagttctgacttgtttcctcttctgcgaggcactctacttactaaaaatagaatatgttttattctttcttgggataaaattaaggtatcaaaaatggcctaagattaatatattgctttattaaatttttgtaaaagctggattaaagtctatttaaagtgccttcttattcattaaaatatcttaaacttgggaaatcaagcaagaaagggtacagatctcattaaagcccccctgccaccaagaaacccatcatttcaaatgattctataggacttttttttttttcaattgtggaagaaaacataagatctatccatttaacacatttttaagtacatgatacagtattattaactacaggcatcatgttggacagcagatctctagaacttactcataattgtgtaactgaaactttataccccttctacaagcaactgcccatttcgccctgtccgcagcccccaacaacctacattctattctgtttctataaatctgatgttaggtatctcacagacgttttatattcctttttagactttagcatactgccacatattttcctatctgaattatcattgtttcactttgaacttttagtcatatattgagtcattaattcaacatagtattggaaattcaggccagggcaatcaggcaagagaaagaaataaagtgtagtcaaatgggaggagaggaagtcaagttgtctttctttgcagatgacatgatccaatatctggaaaaccccatcgtctcagcccaaaatactccactctaggagctgtaaccctgatctttatatcaactccaacagttctatgcccagccccagaaccagactagagagtaaaatggaagacctacactgtaggtgcgtgtggtggattggtcatcgttcagactaaagacctaggaagcaaaaggacactccaattggaatttggaatatatttttccatggaaacagtgatgcagatagaaggctctactgcaaaggttttaatatagttcagttattgtcttcattatgaggtttccagatgcaaatcactattattttaatagtttttacaatgaagcactaggcttattcactaacatgctaccagggaacaagtattctttagctaagaaccatttattgtcataatatcctcctggaattgagcatttgcatttgtggaaacatattacctcaagatcaatgctttcttaaaggaattacagccaatcttcattatttgcagattccatatttgtgaaacctacctagttgctaaaaatttgtttgtaatcccaaaaatcactatttgtggtgctttcagggttatttgtggatacgcacagggtgtgaaagtttttagctgacacacacgctcccagctgagactgaacaaggtgacattgcctttgtgtttcagctctcatactgtcaacatgtgtcctttctcagtctacttggtgccatgttttttgtgagttttgttggtgggatttcaccatttaaaatggcccccaagcatagtgctgaagtggtgtccagggtttctgaggcaagaaggctgtgaggtgacccatggggaaaacatatatattatgtaaactttgtttaggcatgagttatagtgctgttgggtgtgggttcaacgttaatgaatcagtaagcactcagttgagtttcttattcaaagcccacctccagatagtttattgacaattatatttttctcaaccatatgcaatgttaaagctctgtctgtgactttgaaatagagacttctctcatacccagaggttttaatcagcagtgcataaaacagtaccggaaatcttttgggagtacaatattttgtagaataactaaagaatagcacttatttctgaattaacgatttgggtaaattttggtctgccaatatttatacttattgcatattaaatataaatgtttatatttaatgtttattaaataagttatctttaaacagaaaaaaacacataaagcaaggttatgtattgatgggttctaaaaatgttgtgaccagaaactccccaaaaactaacaggaatattcattattaaattgaataagctcatgctctttcttctactattcattaccttcaggtgccagcattcacacatgcccagtgatttaacactctcaaatattacacacttaagtatttggcaattgtggaaataaatggcacaagtacttattacatgttaggcaccatgcaccatgtttcatttattcctcacaacataattcatcaagttagatatgattagtctcatttcaatatgagaaaagtgagtctcggagagtttaaataacttttccagtgtcaaaaaaatctagtaatttgggacacatatttgaaatttggctgaatacagaaactaaagaataaataaggctagggttcccaaaaggattcactgtacccaataaatgtttttttaaaatgtcctaaaccaccctaagaaatcttatctttaatcacctggaaactggtttttgtcaataaacaacgatcagataatatatacaaacttgccatttcaaaacaaagaaaagaggtgctaaatcatgctaagaaactgcaaagaattaattaattcaaagaatctatgaaaaacacatgccagcaaaatgagcatctgatgctcaggttcctttttcagcatcaatgaattattccttcagttttggaaaatcacatccagctttatttctacagaatcctaaataaaatatgtctgaacatacacattaattttaactcctgtcttaaatacaaagcaaaatttcttggagattttctgcattttctttaaattcacactattaaaatatactttctggaataagtcattttgtttgagacaatgttgattagtgg

SEQ ID NO: 916769 - DNA, 4001 bp, Homo sapiens
taccttctaaatagcttcctctgtttctcctctttcctttgcatttatctctatttctaaaataagtcttcttaaagttcaacttttgctttgctagattgcaagctttttaaaaggcagaggccatttcttatctttgtaacatcaaccactacaagtattgttcctttaacttaattcacataaatctttgtagagtgaatataaacacagcaatctcaatacactacactggaagacactgagcagtatgctgaacccaggttattctaaagcaatcccaacattctctaatctaaaatctgaatatgtcaaaatcttaattcaggacaaagaccggaaaagctgcttctcataaccaagcttgctaccaactgaaagctaaacaaactctagtacagcatgaacatcctttaccctggtggggtgggtaagtattcctaacctcagctccagccactcccccagcccactgtgcacatctaactttaatgatatcgagactatttgttctccggcagaccacattctcccttatatcctgtgcttttggacctgttgtcctgtttgtatggagtgtcctcccagaaaaaatgcctttcatcctcaagtcttagctcaaactgaactttcctctttaacattccctgatttcctcaggtggacttaggaagatctttccagaagcactcactcccaaccccaccctgggaacccacatctctattttatccattatcacacttcacaaattatttgtttaaaggcccctcttttaacaaagtgtctcaaagataagattggttcttattgtttttgcatagccagcttgcaaacactccacagatattgaatgaatgaatcactgatgaataaaggcaccacccaatccaccgacatcaattatctaccaatagctaccctacccacgctacattcagggttgagtgctcactggtcaatatgtctggaagaggcagacaaactcagagtgcagccccaacacttttcacctacctgagcaatattcccatagaaacaatactaccataaatgtataggtttgcaagctggtacatcaagccctattcaatttgaaaaatctaaaatagttaaagctgtattgaggaaaattaagatttctacttattcagattctacattaggaaatgctgggattgctttagaactaacttgggcttagagtattgctctgtgtctgctagtatagtgctatggcttaaaaaaaaaaaaaaaaggtattttagtaaaagtccctgtctgttttgtagactctcatggattaaacaaaaaacctagccatcccttgtaggataaatacctttggaaaaacatgttccaattcaatgtggacttccacattgctcacatttaaaatcagaggtttcctttaaacagaatctccattctctttgcagattagctgtggcacttctcgcgtattggctgggctttccacctccctccctcttctttctttcacctcctccgcttgtatgatcaggaaaaatcagtttaatattagccaaaataaaacaataataaataaatcttctaggggaaaaaaattacactccatttacattgctccaacctcagtgggggcctcaacactgctgagccccgctgctttctccctggaccaccgagctcactgagaccttagccaacacttgccccaaacttctctgttttgctcaaactgcaacctcaaagccatctgttttcacttcctaataacacccttctctcatccctcacttcatagagaaatttacagcagccggacacgggttcttactccatttgggctgctttaacaaaatactataaactgggtagcttaccaataacagaaacttgtatttctcacagttctggagactgggaagttcatgattatggcaccagcggatcaggtgtctggcaagggctcactttttggttcacggatggcaccttcttgctgtgtcctcacatggtagaagggaacagatagttctcttttataagggcactaatcccattcatgaaagctccacctccacgagctaatcaccttccaaaggccccacctccaaatgccatcaccttggaggttaggatgtcaacatatggacttgagggagacacaaacattcagaccatagcaggctccctaatttttaaatgaaggacctcactgtctggcagtctgtctcacaaactcagcatctcaagttaagcctcatggtcagtttataaggaagatagataccatcacatccagctgacggatggatgatgagcaaactgaggatcaaagggattaaatgatgtgtccatggtcccatgactactaagtgacaaacagaacctggttatcctaaccctcagttcacactgcatgcaccacatctgtttcagtacagtgccaatttatcttctcaattccccttcatatgtcccacagtctagccaaactggccaaatgaacctacccaagcattttaacaaataaactagcctttgcttctaaaaaaaaaaaaaatagcgatctttttatgattacagaatatttgcttattctggggagactgaggagggaggatcacttgaacccaggagttcaagcatgcagtgggctatgatcttgccaatgcactccagcctggacaacagagtgagaccctgtctcaaaacaaaaaaagtcatccataaaaaaaagaatgaacaagctacagttatacgcaatatgaatgaatcacacagccttgggtgccagaaaccaagacaccaaagagtacatgttgtatgatttcatttatacaaggaaaaaaaacagtcaaaactatgagatgccattagaagtgaggaacacagggcctatggagatgctgataatgctgtattctcgatctgtgcacttgatgcatggatttgttcagtgtatgaaaatccaataaactgcatatgcatgtgcatatacatgtacacacagacataacatacttgaagtcaaaaaattatgttaatattttggtatgtcttcattctggtgttttttccttttggtattactgtttttaaaaaatacaaaaattcttatcaccttctgtgtacaatcttgtattctctcattttaaccttataaaaagaaaaggatttacccaaagtactgtaaattcttcataaatacttttaatggctgtataacagttcatctggagcctatacaataatttacttaaccagtgccctgatattaaccattagatgtttctaatgtttattactataaatactgctggagtaaatgcccttactcttttagttttttagccactctctcctcttactcagctttatatatttataatattacatattatagcttatataatatttatgtacttactgtatcctcaatggttgataataaacttccccaaatcaaagaccacttcattcttcctcataaccttatgtcagtctcctgaatatggtcagtacttactatttgttgaagtgttttcagaagccaagtaaaacttccactcctattaatctagatttcagtatcacctaagtcatccatgtaatatgaatgattaagtcagttatatttcaaattattcgtttggtcttcacacttagtgtctaccggcagtttggcatggtcctgttttagggtataaattcactcaacgactagctgtgctgggcccaaggatccagtgggaatcagtaagagtcagacaagtgcctgccattaaagagtcagtggataactaaatatggatcctgctttccaggagacccaaagtctagcagggaaagcaatactaaaccaatctggacttctcactctcgtgattgaaatcacaagtgctcagatggcaacaaataccagttccagagccaaactctgaaaacttctcctgggtggttactttcatgtttgttagtctgtggatgaatgtgtctgctgtatctacaat

SEQ ID NO: 916770 - DNA, 4001 bp, Homo sapiens
cttaaaaaaataaataaaaggcaaaacaaattatacaaccatgtcgaattttaaatctgtaattaccaaatatctgaaccaaatgccaaattcaggaaacatgcatcctataaacaacttaaacactctctgttctttgtaactgttttttccagaagcacactgacacttctgcaaagtgaagtgcctttcctgcctgcacagccccatgatttgctccctctcagggccctctaatgcacccctaagctactaaagcccagacataagatttgatcaataaacctagaaagaactcagtgcattactgccaattgtgtccatcacagaaagtaccacctggagactcttgaggaaaaaaatgaggaagggggagatttttgaaaggttttatcatctgtattacaaattatattttgttgtacttgatccttgaatagaataatcatcaaactatgttcagtcttcttcaagtgggggatggtcatgtgtaattttatggtttggggagtgtgcctcatagagataaataaaattaaaagtaccattagtatgcccgctaaaagataaaactcacacaaaccacttccccaaatgatagtgctgtctcctgcgtcctgatttttgcgtccaccctgcacctctccctgcagaaagctggctggcattcactaccgcctcactctggcaaaggacaggatgtcgaaaacccattaagaaagcttctcattttctgttccttcataacatgatggcaactcctggcaactccaagatgaaaggcaaaaaagaaaataaaaactacctggggccccctaccagaatgagtggttaatctaatggagagaaaagcagagatttatacatattttaaaatgcttcctggggacaaagcagatctaatgaattgctgagccacaatctactggaaaatccataaatgttcgtccctgctgtcacagggctagaggatttttttttttaatgaaatgctttaatgctaacctgacagggctaacctgacaggtttaagtcagctatgagacgtgatttgcattcatttcgcttctaaatccctaaagatcagcaacaatattgacccgcaattatatatcctacgttgcactgttcaagatgccatttgaggctgggaaagtagtggtttagcaacaccaggcggctctatgatgctaaaataacaacgcaacactggattccgaacccaagtactcatcttttaaaacccagtgccgcaccaggacccacattcaaagctcgcgtcccttcaagttgaatcttccggctttgtgcgatttaccctctcaaactttctagtttgcaagtcagaattactttgaacgtcccctcttctggactcccctccccaaagggactggcggcaaaggagaatagaatgcagatggttaatagttcaaatgaaatttaaaaacctataaaccaatatttttttagaggagaaaagcgttcaccaaaccgccacccggcaagcgagcatccgatttccatccggaggaaaaaatattttaaaaaccagacataaaattccctttgcaagaaaagtggcctctaaactcccttgccaaggacactgggaggaagcagaaaagcaaagaccaagctcgtacttttcagtccgcggcttgtgtgccgcgaggagaggcgcaaagggtgacacaccaggaaaggtgaacgcagagggagcgggagcccgcggcggggcagggtgggggcggaacggacgaggtacccaaggtgcggagagaggggcaaccgggcggagggcagctccgaggctgcaggcgggacgggcggggtccccggcgcagcccggatcgccgccgctaagtaaagttaatacttactcagtttcgcaactgcgccgcccccgcaggccgcccagaggggccggccggggcgctggggacgcggcggcacccggagctccgcggccgcccagcgcccgtccccgcgccgcactccccggcactccccggcgctccccgcgccgcgcgccccgcaccggctggaggccccggccccccggcgttccctctccgcgcacctcccggcccgcgctaggtgagtgtggacgccactggcgggggtgccgcggtgcgcgagcgctcggccagcggcagagacgccgcgggagccgcccccagcgccaacgccgccgcgggcgggaagggcgaggctcggcgaggctgggcgaggagctgggcggcagacgctgagcggggcgcggcgcggggcgccggacgagcgcgggcgtaggaggagcgcgggcgtaggagtcggcgacccgctcgctcccgcggccggtgcctctgggctgggggccgggctgggggccgggccgggccgggccgggccgggcggccaggcggctccgccccttcgccgggcagcggctgagcgcgcgagaggagcggcgcgggggcgcccccctcggccgggcgctcgggtttcagccgccgctcctccgcgccccgcccgcgcctggcccgctcgccggcgccgggagagacctcgtaacggaactgggacgccagcgctgcattgtgggagcttttaaagcggcggggagctcggcgcgaccctcgggcccaccgggccacgctcgcccggcccgcgacgcccccccgctgtcgcctggcccgcgacgcaccgaggcctgaggacccgaaagccgggcgcggggagatgaccggtggctcgtgacggtcccacgggcaaaatcttccatcgcccggggctgagacttgtcaaactgccctctacggtcacccggaaagtaggaggctttttctgcagaggggaaaaaaatcaaaaagagccgttccatcccccctccaaggactgggtttgaattgcttttcatctgcagtggctgtgattcagcgtccctcttagcagcaggcaatgacagaggcaggagaggggaaaaaaaaaaagaaagaaagaaaaaacacagcaaatgaatcaaacggacgtgagtaacaaaagtttagaaagagctgggctcgtattcagaaaaaacgcctcatccccccgccccgctgcactcccaacccctttaaaaatagcagataatcaagaaaggaaacgggtgctttcatatggaaatacagatgtgtatgttgttttcaatattctactgtttttttgtgtgtggcatgcaattactcaggcactgggcaaaattcagcctttggattttgtggtcacacataccccaactccgcaacagctattaatttgcagggcgatggggtgcggatagtggatgagatacaagaaagcattccaattaaaatgcccccccccaccccgccttttaattttccagacacttgcttttatttttctttttttaaacatcatcaaaacaagaatattaaacttgaagcagaatttgttacagcgtatctgactcaggacctgatttaaggtttggggttttttggccctttgtttcttcctcttgttttttgacctttagttactccacacctcattagttccttgacctgcaggtggactgagaagagagccatggtaagactcaaatttgtcaaatcaacatttggagaggagaaagttcactgtgattcaaatgcaaaaccaaagggaatatgatttaaaagtcaacctggagggcatggatcctcccttaaccctacttgactcttttcaaaggagttgcctagccttaaggtgaatgtttcctaacctctcattcccttctcagcctttcactccactgaacaacatcagccattgcttaattgccaaatctaatggaaaaatttaattcccatcttgtgccctttgtggcatttgccaatgttgacctctccttcttagaactttctgccttttggccgggcgcggtggctcatgcctataaccccagcactttgggaggccaaggctggcagattgcctgaggttgggagttcgagaccagcctgaccaac

SEQ ID NO: 916771 - DNA, 4001 bp, Homo sapiens
agttttattgccctgtatttggcataccaatgacagaaatctcaaattgctaaagcaaaacaaaaaaacctcaaacaaacaaacagaaagccctgactacagggatagtatgccagaaacacaacttgatttatgaaaccataaagttttccagagtatttttatacatttgatgacatttaaacaaatgccaaaataatactacaaaaataccactacaaaaatatcatttaaaaaacagagtatttttatttttggcttgggggaggcttttctggaatattctagaatattttaaaatgcattgtcaccatcaaaacacaaattttaaatactcaaaccactttattttaatatagtttcattatctttaattaccataaatagcatatttgtgaaatattgtcaaattattagaaaataaagcttacttagaaacttttacagtatttattaaggccatttactttctaaaggaaattttgtcacctaaatcatgaatacatttggaatgagttaaaaacaggattttcaaagtagacatgtgtgcgcaaaataaagtatggagatttactttaaagttgtattactctatattgtcatgtagacactttaaaataattatatcatttcctaccatgtaattgtatccttttgaatctgcactgagcaaattatgacaagtacaaacaggcatgattgagagaaaagtggtggacaatcccctatgccaaaataaatatatttttaaaaaaatatagcccatgtctaaatttattctcaagtttttggcatgaaaacgtaacatttgatgtgtaaataaaatatttaataagactaagacagacatactgtccctagaaaaatacgtgtgtgtatgtgtgttttgagtaacttatttatactatgggcatttcaagcttgaaatatcaaatcaaatcaaagtaaaacagtaataataaggattagagaggatagctgcttgaatccttctttagtgcttaaaactacctaaaattctcaaagattttttaaagaatcaattcaaacaaagtttctctccagagtgtttccactttgggaacattccaggtttcaggaatgcctcactctcaggggagccaaagcattgtttctgaattgtatcagcagttttatttttcatcctacttagtggctataaatactagttacatctttatcaaagttttaattatttctacaatattctaaagttctgttgaaacaaaatgacactttttattgtactaccctcaaatgcccagggcaacaaaaaaagaaactgtttatgttgctagttgtggaaacaggactggtcaaaaggggagaaaggagtcaaatataatcactctttattctctgcgatccttgagctggtcactcccatcatcaatactgggagaatatccttactatctaggtattcatactagcctaactccttaggctaggactgtgtccccacgaagcctttttttatcagaatctaacaaccacaaaacacatactttcacaggtagggtccagagtacacacacaagacacacacacacacagagacacacacacacttactcacacgcttgactttacctgtttttatgccgagtctttagcaagtttcttccaaagggagccatggtctgtcgggcaaacgaataaagaaattatcttaaagtgatctgagggtgggggtgggggtgtctggatttccagggtgaagggaggagggctggaagctttctcttctcctcggatgttcctggctttcagctcattagtagccggctgagaaagttgctggaagttgtgcaactgctgcttaactttgaactgcgggattgttgtggctgctgcacctctggagacctgcccagcttcagcctcgaagaaggcgtttggaagcaggaaaagaaaaaaaaaaaagaaagagagagagaggaagggaggaggactctattgtgttctgtagttatttgcagacttaaagaactgccaaccccacaagcatggtaataccaatggaacgggagtttcactcgatctggaaatcccccctcccccgctttccacacccaaccacacaaggtgtactgaacacacataaaaggattaaaagtaaatatcccccaactcctggtcagctccagtctgtgaaaagtcatctgatcatggcaagcatgagggattgctgagaactctctttgccaactcattcgaccccagatcccctgccagggtgtcaggactttaaaatatattagggagagggaagctggaaaccggatcaaggtggactcacagaccacttagaattgttaagtccctgagttcacggtcttaagagtttcttccaggcccctgctccacactctcaagttcatcttgcaaaagtcgaaggacctgaaggaccacagggctccagggctgatgcatcacagtttggtctaggaaccagctggagtttagtgtttgactcccaaggcgtttatgttgacccctaccccatctttgacattcactgggcctttagagccctgggaatttcagaggaaaagcaaactgctcctgcccctcaaggagtaaagaagacacaccgaggggatctgctggagctcgaaatgtgaagtggaagtctaagggagggagggcttcatctggtcccaggagagctcgaatccagaagcagggcagaggaatggagatgggagagttcgggtgcctgtgggaggcccagcgcagctcccaccaggtacctggcactcatgggaaagcactatttaggggcaagggccaggagagctttctcatggacgtgttttactgggattttgcccctcctaaaaccaccccaccaccctccaccccgccaggcttctaatcatgggcttcccaggcagacgatgagggagggagggaaaggaaagccaacaaacttgtgagttctttctgagccttggcaaagaatatgaatcgctcctacttactttgggagtttatcccctacccccaacaacaccaaacaaaaaaataatctcaaggtcttccatgattctgatacacactgatttatgcagtgctcagataaatcatgtttttcattatttattatcataatctttctctattcatctatatttcatgtttctgtatgtgcatatacacatgtgtcctatactatttcattatttataatattttctttataattttatataataaatcatatattatatccatatatgcacccaaatcattatgaagtgaaaaacattacaatagccaatgttaaagtttagttacctttttatatccctgggagttaggataactaaaaaatacatacccatcttaatttgatatggtcagtgattccagagaaaatcaagacaccaaaaatagtaatgacatgttctgtgtatatatatgtatatatgtacacatatatacatgtataaacatctgtataaacatcttcatctttgtaaacataagtatatatatgtgtgtgtatatatatatatgtattacatgctatgtatatatgcacttcacatgcaacataagctacataatcttgggtgtatttctgtttccgttcttgattttgttttactagcacctcacaagaaatgatttaaactattatggaagtttacctagttattctaagttcttcaaaatgtaatcccttaaagctatactgtttacttattaatataattgttgcagtcaatttgcaaataatttcacatttgcaaatatccctgtttcctttagtttcggttctccatgcttagtaacattatttatatacatatgtgtactatatttttcaataaaagagttttaatggggaatgaggaaacaatactatgtctttactagcataatcttgtgttgagtttcaggttatcacaaatgagtttcatttaggtgtcattaatcctcacacaaaatgccctgttaatatttttcat

SEQ ID NO: 916772 - DNA, 4001 bp, Homo sapiens
ggcacacagtaaactctccaagtgtcagctgcaactgcccttgtttttattattctttcattcatgagataagacaaacaatgataagagagtcaactacactgtgaagtgcaacaaagctgaatttgggaagaaaaggaagtgcagccacgctaaaaatcctcatcgcacaaagcaaggcatcaagagacatgtctaacctgatggatggatgagtaatagatatttttaagtatactactcagagattataacaggataattaaaaacaagaatattacagacactggagaggaggaacagatgatctaaattccttatttttcacagttgaggcctagcagatagtcactggggcaggcaggtcaaaaggaggaaagtacactcctcaaatatacagagatacatgtgaggagtcccaaaaacaaatcaatgaagatggttactcctggacagagagggaaggtaggacagagcaaagactttgctactcatgttatacactactatactgtttgaattttgaaaactgtgtgttacaaagttcctttgtcccacctgacaaatgaaaaaaaaaaaaggaaaggaaaaaactcacaacattagaacagaaatgggggccaggtgcagtggctcacgcctgtaatcccagcactttgggaggccgaggcggtggatcacctgaggtcaggagttcgagaccaacttgtccaacatggcgaaaccccatgtctctactaaaaataaaaaaattagtcgggcttggtggcgcgtgtctgtagtcccagctacttgggaggctgaggcaggagcatcgctagaacccgggaggcaaaagttgcagtgagccgagactgccgagattgctccaccgcagtccagcctgggagacagagccagactccgtttaaaaaaaaaaaacaaaaaaagaaaaaaacaaaaaacaaaaccaaaaaaagccatgaaagagagagaaaaaaaagagataagacaaacaatgataagagaatcaactacacttgaaacacaacaaagctgaatttgggagggaaaggaagtgcagctacgctaaaaatcctcatcccacaaagcgaggcatcaagagacactgtctaacctgatggaaggagcagtaatccatttaaaaacaaaaaaacaaaacagaacaaaaaacagcgagagagagaaaaaaggatgatccattcgagcccaccgcatctaatcatctaatattacgtacattcacctattttgcctaccacgtgtcgggttctgcgctgggctccagggaaacaaaaaagtatggctgggtcaccactccccacttactggataaatgctgtaaagccctttacccactccgtattcctacttgccctaaggatgggagtgggaattggaacgcaggtccgcagattaatattccccatgtcttccccaacagtttccagactgggagaggaatataaatacagtgtcggaccatgtcccgggtcaacaactaaaaaacagtgatcgaatgaaagaggttgtgggagcagggtattcgccacaaggtgggagttgtcatctccccgagaagaggtgtgttaggagtcaggtaccaaacaaccggccgtgaaaccgtaagcagtcactattcctctttcctcgggatcaaatggggataagcccaggatcccgccccctttgagttcagaattggcccggagtcctgccccagagcaaaaattcttcgatcacctccaggcatctcttccctacctcacagctcccggctggtctcatttcagattcccaagtcctgcctctgcactcaccccattcgggagattcttcacgatcagtcgcgacatggcgcagggtccccgctgttttgattccaacacgactggtcagcgtcttccaccaagtttcacgctaccgccctgggcgccgccatctttaccgagccggaacacagtcacgtggctgagaccttggcctgacctgtccggaagtaggcgtggctaatccaaaactactcagggaggtcacaccccacaaggggtgggcctgggcgcttgcattttgcgcaggcgcagggccttgggcggattctgtgagacgccaatgcagcggagaaggcggcagggggcgccggtccctaacatgcgccggtttagctcggtgttaagggtcgcgccaaccgggcaatcgcgttctctcctttttcttattttatttttattattgagccttaggactcccctgagaacgggggcaagattagggacccttgccttcctcgtagaaatggggaaagtgaagtttagagagattgccagccaacacaaatcaagtattgagccttttgtgtaaatacttggaatgaacatgttggaaataaacgctctcattttgcaggcagataaactgggaatcgtgcgtgtaaagcagcttgctcaaagtcttataactatgaattggaaagtcagattcgagctagggactgcctagggccctacaatgagtctctacgccttcaaccccagccccacaagcattttgcctcccttcctaatgtttggaactctcagctggccaatcttctagctgagagatcttggccaaaatggcctctgagcctttgtgtctacttctataaaatgggaataattctttattatgctaggggttaaggaggtgagaacgtgaaagggatgttattttcctattgcttctctgagcattctcggtacctactcttggatggagacatcctatgaaaacccctattttcactcttaaatgacggtatttcctttctgtttccccacagtgcctcagctgcactggacgttgctgccaagcttctgcaatttccttcacctaaaagacattccgtccccccttcttattgttaacagctttatcacaaaccatgcaattcacccacttaaagtgcacaattcaatggtgctgactatatttacagaggtgtgcagccatcaccacaatcaatgctaggacattttcattacccccaaagaaacaccacaccctttagctataaccttccaattcctccctctcccttccctctgataaccactaatctactttccgtctctatggatttgtctgttatggacatttcatgtaaatggaataatacaatatgtagtcttttgtaattgacttctttcacttagcataatgttttcaaagttcttccatgttgcagcatgaatcagcactttatttatctgtttatttatttgagacagggtcgggctctgtcaccccgactggagtgcagtggcacaatctcagctcactgcaacctccgcctcccaggctcaagccatcctcccacctcagcctcctgagcagctgggactacaggcacatgccaccatgcctggctaattttttttttttggtaattttttggtagaggcgaggtttcaacatgttgcccaggctggtcttgaactcctgggctcaagcaatccacctgccttgaactttcaaagtgctgggattacagacgtgagccaccacactttttttgctgaatagtattacatatatggatgtattacattttatttattcatcagttgatgatggacatttgggttgtttccgctttgtggctactgtgaataatcttgccgtgaacatttacctgtaagttcctgtgtgggcatatgttcttatttctcttggatatattcctaggagtaggattgcctgatcatatggtaactctatgcttaacctttttagaacctgctaacctgttatccaaagtggcttccccattttatattcctaccagcggtatatgaaggttcaaatatctccacatctcctccagtgtttgttattgggtctttataatcatagccactctagtgggtgtacagtggtgactcaatgttttgatttgcatttccccgataactaatgaaacagcatctttcatgtgcttttggccactggaatatctttct

SEQ ID NO: 916773 - DNA, 4001 bp, Homo sapiens
atatgtacatataaacatatattgataaccaacaaatgtgtataaactcatatttcatttctttttgagatggagtcttgctctgtcacccaggctggagtgcagtggcacaatcctggctcattgcaacctctgtcccccaggttcaagtgattctcctgcttcagcctcctgagtagctgggattacaggcgcgtgccaccaagcccagctaatttggggtttcaccatgttgaccaggctggtctcgaactcctgacctcaagtgatccacccaccttggcctcccaagtgctgggattacaggcataagccaccatgcccagcctcatttcttttttaaagtaaattttattgtgtatatttaaggtatacaacatgttacgggatacatatagatagtagaaaggttactatagtgaagtaaattaatcatcccacataattgtcccttttgtttctttttgtggcaagaggagctaaagtctgctcatttagcatgaatcccatatacagtacaactttatcatctatagtcctcatgttgtacattggatctcaggatttgttcatcctacatatctactactttgtatcctctgacctatagctccccatttcctctcccctctacccatatttcttcaggatataaacaaaatgagtaccacacagactaagcccataaatcaacattaagtgttttgggtctaaacatttacccactgcattgatcagacacttgtgtttaaatccacctctaatggtctcattaggtacatgagaaagcagcaggaatcgttcctcaccctccaacattccattagatgagcaaaagattccctaaatgtctatgtcacattttttcttcaaagaacagctacaacacaaagagagggtaaagagtcttcttcctgctacagcatgaaattcctcctaatcagtatgctgtgcgccctgaaatgccagaaactgccaaatatattccttgtcaaatatggacaagattgtccatctctccccatgtgcccaaggacagcacaattctctggcagccatgggttaatcataaagactcctaggatcactgcaaagtctggctatctgcagaggtccaagtatcagttcaaatacaagatccaaagtatcacagcgctctgtgccttaatcccaaggtgcgatgtctctcaagactccttctctataggctgggtggggtaggatctgtagtctagaagagtatacccagctcttgataaactgttgtggtttctctgactatctatgatttcagctatctaatactactggtggtatgggtaggagggaaggttggggagagaatggaaacagttaatcaaaaaataaaataatcttgtggggtggggtggactgggggacagggtctgaaatgacatattatccttgtggagattgatacatcagcaggaagtcaaactaacttcatttcataaggatacaaacttgcaagcttgatttgtttttaattcccctgtcttttcaggcctcgcagagactgaaagttccctgaactccagaaccagttgaggaaagatgcagaaagcagtagtggaaaagggagaagcgcggtgaggaattaggaatcttgagagaggaagccccttcccctctttaaaaagaatgtaaaaaccaagggcattgcaagatccccagaaaaagaagtagctagataccaaaaaagcgcttttccctaccttcttgttgtttctattgtagccaaaagtcgaaatcccgggcctggaagtcacggatagcagcattttctctttaatgttagggaacgagcgagagagagagagagagagaaagggagggggtaagaaagacggggagggagggaggaggggagcgagggaaagggggagagggagggaggaaaaaagggagggggaggagaaaggaggagaaaaggagcaggaggagagagatgaaggggggctgcgggcagagaatgagctcgggctgctcctttacgtcactgagagaagttaacagagtctgaatgaggcagaggcacttccactgggtcctaatgcccaagatgtttttttttgtttgtttttcatagtctcaggagttaaagctagaaagaagagttcttaggtctaacccctttcaaatttatcccctttcctctatgaacaagttccgattctcatataaagacaatgagggctttatttccacccttagatctcagctataagatttcaagcttgattttaaaggggctcctgagacattgccttggagaacacgcaaaaaaaaaaaaaaaaaaaaacagagttagagtgtgtgagataagctcagggcttcccctactttacacttacagtgattttttttttttttttttgagacagagttttagtctgtcacccaggctgaagtgcagtggtgcaatcccggatccggctcactgcaacctccaccttccgcaattctcctgcctcagcctctcgagtagctgggattacaggtgaccaccaccacacccagctgatttttgtattttttagtagggacggggtttcgccatcttggccaggctggtctcgaactcctgacctcaagtgatccacccactcaacctcccaaagtgctgggattacaggcatgagccaccacccctggcccatttatagtgatcttaatgtacaaaggaacaaacagaggaacacaccaaagagcagagctaagcaaaacagagtatggggtataactagtttcagatccttagatgtgtttctcttgggtcataccaatgggctgatgcccctcactcctatttcagattctccgaggaatgagttcatacttaagaaggaattatcagactggactatatcatgaaacttggtgccttgttatttctctaacaattgcaggctatcttatttaacactttaccctgctatttcctcatctttaagatccatgaaactgaaacaattacagtaactcaccaaacctggagtttatgtctaaattgaagtctacagttgggatgtctgctttgagttgtctttgagctgtttaaaaaaaaaaaatacttaagaagcatatgcttcaacagaataaaaacacaaaattcttaggaaggaatacaaatttcagagtcaagaacctaatagagttgcaacacttacctctactagtttccaaagaatgtctttgtaggcgtaaccttaacaagaaaggaaaccaaaaacttaagaatgatatccagtaacccctaccaatccaagtgcaatagggatgttaaatgaaagccttcaaatcccttcataaggccaccttgctgccatcctaagtagtttcttgagatataaattaaccctgtctgttttgtgacaacaaatattaagcccaaaccctccctcaaatgaagttctggtctctattctagtttccgtgtcacttttttgctatgataatggaacagacagtattagtattctgcagagtaaatatacataccctacccccaatctctaactttcatttccaataggacaggaagtgcctgctcagctcaggggacacaggaagggtgggagagcctcagtgtgggaattgcaactgagactggaaacacagcagccaaatgcagtaaataaataaatgaaggcatcactcagtgatatctttttttttttctgagacagagtcttgctctgttgcccaggctagagtgcagtggtgctatcttggctcaccgcaacctctgcgtcccgggttcaagcgattctcctgcctcagcctcccgagtagctgagactataggcatgcgccaccatgcccggctaatttttttgtatttttagtagtcttgttggccagactggtctcaaactcccgacctcaggtgatctgcccgccttggcctcccaaagtgctgggattacaggagtgagccaccgcgcccggcccatatatatatatatatatattttttt

SEQ ID NO: 916774 - DNA, 4001 bp, Homo sapiens
tcttggctcactgcaacctctggctcccgggttcaagtaattctcctgcctcagcctcccaagtagctgggattacaggcatgcgccaccatgcccggctaatttttgtacttttgtatttttttttttttttttttttgagatagaatttcgctcttgttgcccaggctggagtgcagtggtgcgatcttggctcactgcaacctctgcctcccaggttcaagtgattcttctgcctcagcctcctgagtagctgggattacaggcatgcgccaccatgcctgcctaattttttgtatttttagtagagatggggtttctccatgttggtcaggctggtctcgaactcttgacctcaggtgatccgcccgccttggcctcccaaagtactgggattacaggtgtgagccactgcacctggcctaatttatgtatttttagtagagatgaggtttcaccatgttggccaggctggtcttgaactcctggcctcaagtgatctgcctgcctcagcctcccaaagtcttgggattatgggtgtgagccaccacgcccagccttttcccatatgctttaaatcatctctagattacttataatacctaatgcaatgtacatgctctgtaaatagttgctatactgtattgttttttatttgtatcattttgtattgttattttttatttttatttttcccaaatatttttccatttgcagtttgctgaagctgtggatgcagaacccatgaatatggagggccaactgtattttgtaggcagttgaaaacattgccctggagctcaggagatggctctggctggagaattcatgccaagggcagcctatagatggaagcagaaggcatgggtgtagatgatttagcctatggatagtgggcagacaaaagggagaagacattaagaacaaaactctgcggagaaaactccagtttaaaggattaataggaggactaggatctgcaaaggaggctaagaaggaatatgtaagaagtagaaagaaatgcaggagagtgaagttattgatgctaaagtaaaagggactctgggtgaccaacagtgtcacaggctggagggtgggcaaatgtttgctcttcggtctgggttggcctgttctttgccctttgggctggtgataagagggggcagggaagaagtgggagagagacagggagcaccaggacctgttagttctggagactggtatcctggggactgcattccctgctgtggtgaccattcccctcctccccgctgctctggctggggaaggtcactttgttttgccccatgttgttaggagtctcctgtgatgcctccttccggccaccgcccagccaggggaaatgtacctggcattttcgtccgtccacgctcctgaggtcctcctcaaactccactcccacatcaaactgcacagtgtagtttcggaaggtgctgagcgtcctcaccgtcatgtggttgccctggtgttcgatctccttgtccggcttcagcagcagcgcgatcttccgcacagccaagctgatgtctgtgggggctgcctgttagtaggggtgctgctagccagccaggagctcctctgcctgcagcagcccctcagggctgtgagtttcccttctttgggtctgggactgtggattcaccccctcctaccaatgcctggttagaaatggatcccaggtctggtgccagccgcctgagcctttccacagtgtccaaccccgggcattccctcttctccatgggaccaagaagcaggaaggaagaggggagaaagggagtgacaggggtctgggagggcgaggccattacttagggcttgcaggtagtcctccatgttcttctgcgagacaaagcggtagtagccagtgaggttgggaggcattgtgtggatgaaggtttcaggagaatgcaggagacagggtgaggaaggagggggtgttgtctggcaggtgaggctgagagattccagccagctccacacacagagacaggatgtgtaatggccgggttaccagggctttttataaggctggggccctgttgcaataagagtccctaccagacttcttccctccccgcatggtgagtttgggggtggtgtctccagcctgaaggaggggcagggatttggcaaagttgcgcctgaccttggcttttcctgaggaaggaacctggagcaggatccttcctgaggaaggaacctggagcaggatctggggctgtcagtcatccaaaactcagccatccaaaggtcagtgttggcctccacctcatttctggcaggcttgggaaccgtcccagggcctgaggggcagtctttcctgggagacacctgaggctggtctggctgtgtgaggtggagatgagttccaacaatatcctgagatcctgggactgagtgatgttggaagatgtgaggggagggggtgaggatggccagctgccaccatgaagagcaccctgtaggcctggctctcagagctccctcaggtagtgtgctcaactgggaccccaaagtggcattccagactcttggtcctaaagagccattaggagggaggtggagcccgaggggtgctgagttcaaagtccggaacagacagcctgagaggagtttgttggctattctggagaattttattctttttggcttgggacccagggggttttctctccctctgagtcatcgatgagaccgtaacccccagtccccagccctaggacagcccatgctttccagatgtatttctgtgaaggtggggtggaggcgcctaaataatattgtgccccgcccccagctgcccaattctctctcgaacctgccatcgtcccgggcttcagaatccactgggcttggttcatcatggtttaaggtgaaattcggggcgaaggaggcaggacaggtaggcaggaggaggcggccggtcccgacaggtgcgtgcgcgaggggtgcacgacgtcctgcccctccttgggtcccagagcctcgataccgccctgcggaccgccctgtggcttcctcgcagccctgggctacaaatgccaggatttctcaggctcagactgagggttttacttcacccttcccagagggcacgcagcacggatctgtggatggaaggggctgtggaaacaggttatggcagagttggggggcggggtgacgcggtgccacccctcctggccgccctcaggtcccgctgacgtctctcttccccaccccctggcttctggcttctttctccccacgtccctcttctttcccaccccctccgtggctctccagcttcctccccagcccccgcagttcctcggctcccccaaaattgcagccaggggaaggagccttgaaactctccagccccgacgccccagtctcattggctccctcccccgctgcagcacctggtccccccccctcccagtcacctgattggccggcggccccatcaatcgttgcccggctgtgctgacgtcatcctgcagtagcggggttggggtgggagtgagagagtgaggacgctgggctgggggaaacgggaagccgctgcaagtccaccgcctcagctacccagattgggatctgcccaggcccgctttatggactagtgtgggcggcaggctcctttccgtccctgccctgctgtaccccgctccttggagaccccctgtatccctcccgcaaggtggaatccgcaggctggaggctcccaggggaggcaaacgcctggccctgccctgccccacgccgcaccatgaccctcctgctgctgccccttctgctggcctctctgctcgcgtcctgctcctgtaacaaaggtgagtgaggtgggggtgggggtaccgaaagaggggcgtcgggcagcgccgtgcggggtgggggtgggaaggaggtgtcgaggctccctggcacctgacaggtgtctggccctcttctgatcaccctccttcccatccgttctcagacctgctccgtct

SEQ ID NO: 916775 - DNA, 4001 bp, Homo sapiens
caggaaagagagaaagagacagacctgaaatcctaggcttgggggaacttgggaaacatcctgtttcccaagtgtttgaactcagggcactggtcttgaaacatcctgcatcagtaacatttttatagaaagcacaggggaattccaatgcacaggctttgggaagaaagcaaggttgcgtcaccccactcagtacacagactccaccctctgccccagaaaatgtcaccctctcctcctactgcatcagaagcccactcttcatccttccctttagtcccaagttcacccagctctgggaaaatctctctggaagatgcaaatacacaatccccaggacttcaagtcaatagagttttcaacccacagagctagggggcaggagcacagggtcccttgagtccaggcagggggtggcagttgttgatctggaagggttggcccaggcatatgaacctgtcccctgctcaataacaggccctgccctgatgcaaatgcagattcctccacccagacatctcatttttaagaatccaatcaatactcacacttacagagacgttggcaaataaaagtccaccaagatgacatttatgatgaataaaaagcaggaaggaatttcatatccaaccactcagtatggattacataggtaaggctattggaaggatacagtattctaaataattaaatataattttataaaaacagtcattatggtggaaaagtgttcatcttctccagagaatttaaggtgactgaaactaagaacaaaatataaaatcctaattttgtataattgtaaaaaggacttatgtgtggatgacaatttcagggaaacttgttttcatctttattcttttcagtgttttccacaaagatcatattctgatttattgttacataaaataaatccatgtttctttcttcctctataataagacagatgaattagtgtagtgaaaagaagaaagaaagaaaaagtaaccccttactagttctgccttccttaagcagtccttaagctgatactctcctctgaagatggagatgatcgtagctctcagtggacgctgatgggccctagcaaaaacaaggtaaagtgctgggaacataagcctggctccagcacaggcacagcctccgtgcacacttgcagccctgtgctcccttctcaacgatgctccagcaagtctccagatctctaacccaggctcttagcatcaaacaacacatgacttctgcttagacaggagggagaggatagagaggaattctggagagaaaatctcatcagggcaaactctccccaagactagacacctccaatgtcgggagaggttaaggattgaaaagagatggggttcaggcagcctgttaagtgagaaatattagaaagctactgttacttcaacctggaaagacactgtaggaatcttcccagggagcagacaggaggtggtcccttcacacagagggaagacacagacagacttgacaaacctgggtggttacctttgtctctcacgcactccttcacccactgggcggctgcagcaacgctctctgtcttggtaacatccagggtcaccgtctccagcctgtctgaagtctggcccctcagctgctcggctcctttctccgtcagacatgcagccagcacccgcaagcctcgtgcatccagctgtctggccagcagtttcccgaagccagagtcacagcccgtgatgaacacatacttatctctcaggtggctcagcacctgcctctcccggtaccagtgcagaaggtagtacaggcccacgaaaaccgccaggtagagccacatggctttgcagaggacagacacagacaggctgtgggggaaaccagagtctggcctctgttcagacaggaggatttaagaacacagagggctgtggtaggcagggaagccctcaggcattttggcagggaatcctcactttcctccctgatgactgcctttctgcaacatatttattctggccccacctctctgctctttgaactgcttttgcagtactcatgcacacctttgcacacctcaagtcctgcccagtaggaagatactatcttcctactgggcaatgtgcccctagtctcctgatttctctctgccttgctatgcccactacatgcatgctgtgtccatgaaggagcacacacatatattcacacaggaacatacacagaactcacacaggcttacacacagctgcccacacacactctccatggcaaacacacccctctgctctaagtacaggggtcaaaactgtctctacaaagctccgataccaacactcctggtccatgaccttctgaacatagaaaggccttattgggtagctacccatggtttccaggcacattaggtggaaatccctctctgagcctgagtttcctcatcctgctccgcaccccagaatcaatcactcctctgaaaactagggcacggtcaggctgtctaggatgagaaggagaaggcaaagagtgagcaggaacaggttccctcctgctataatagttttttggggcagaaggattgcaggatcccacagggagaatccaacctcagaggtaaagaaagcagggagaggatgggcaaataggaacagctccggtctgcagctcccagtgtgactgatgcagaaaatgggtgatttctgcatttccagctgaggtacctggttcatctcactgggactggttggacagtgcgtgcagcccacagagggtgagccgaagcaaggcagggcattgccttacccaggaagtgtaagaggtcaggggatttccctttcctagacaagggaagccgtgacagactgtacctggaaaaacaagacactcctgctcaaatactgcacttttccaatggtcttagcaaatggcacaccaggagattatatcctgtgcctggtttggtgggtcccattcccacagagctttgctcactgctagtgcagtagtctgagatcaacctgcaaggcagcagcctggcaggaggagggttgctcaccattgctgaggcttgagtaggaaagcaaagcagctgggcagctcaaactgggcgaagcccactgcagcaaggcaaggctttctgcctctatagactccacctctgggagcagtgcataactgaacaaaaggcagcagaaacctctgcagacttaaacatccctgtctgacagcactgaagagagcagtggttctcccagcatggtgtttgagctcttagaacagacagactgccttctcaaatgggtccctgaaccctgtgtagactaactgggagacacctcccagtaggggccgactgacatctcatacaggtgggtgcccctctgggacgaagtttccagaggaaggatcaggcaacaatatttgctgttctgcaatatttgctgttctgcagcctctgctggtgatacccaggcaaacagggactggagtggacctccagcaaactccaacagacctgcagctgaggaaactgtttgaaggaaaactaacaaacagaaagaaatagctcaaaatcaacaaaaaggacatccacaccaaaaccccatctgtaggtcgccaacatcaaacaccaaaggtagataaaaccacaaagatggggagataccagagcagaaaatctgaaaattcaaaaaaccagagtgcctcttctcctccaaaggatcacagctccttgccagcaacagaaaaaagctggatgaagaatgactttgatgagttgacagaagtaggcttcagaaggtcagagtaacaaaattctctgagctaaaggaggatgttggaacccatcacaaggaagctaacagtcttgaaaaaaagattagatgaatggctaactagaataaacagtgtagataagtccttaaatgacctgatggagccgaaaaccatggcatgagaactacaggatgcatgcataagcttcaatagccaatttgctcaagtggaagaaagaa

SEQ ID NO: 916776 - DNA, 4001 bp, Homo sapiens
gaccaacctggccaacatagtgaaaccctgtctctactaaaaatacaaaaataagccaggcatggtggcgcatgcctgtagtcccagctactcgggaggctgaggcaggagaatcgcttgaaccccgggggtggaaattgtggtgagccaagatcgcgccactgcactccagcctggcgacagagcaagactccatctcaaaaaacaaaaaacaaacacgttaaaaatgggtaaagagaagtaatctacttatggtcacaaagcttacataagggtagacttcattgaacccatgaagtctagccctaaactgtctcttcttaactattccaatgtgctgtatcttaaccacctctgctggcccacgtttgttgagtgggctgctgttagtcctggaacccagagccctgtacccctcacctcaggctgtcagagaaggcctccaggccaaatttggagacacagtagcccccaccattggctgccaggcgacccaggacgctggtgatgttgatcacccggccccgggcttgctgcagcagaggcagcagggcaagggtgaccccgatgggacccattgtgttcacattcagcacccgctggaaatcgtcccgggtcagccatggtgtgggtccgatgataccagccacaccagcattattcaccagaccaaaaagccctgtggggagatgaaaaggatgctgggggtaggtgaggcactcccacagctccctcttcttcctgggagcatctgaaaactgcttctcctcaaattgtccctttagcttaccacagcccttgcaggtgactcctggggtgactgtggggatcaggacaccccacaccatattcctggtggtctaccatacttacctgcttccttaacgtgcatctccacccacttggctgcctgctggacgctctggggatcagtgatatccaacagggtggtgtggaggcgggaggaggccacccgctgcaggtcctcggccccggagggggtcaggcagctggccaggactcggaagcctctctggtccagctgcagtgccagaaggcgcccaaagcctgagtcacagccggtgatgaagacaaaggcattgctggcgggcaggctctgccggtccctgagcaaccacagcactgcccagagtaaggcacccagcagaagaggcagccacatagctggagcccaagtgacctacaggtggcagcctaggctgggcagaaaaacttgtccagtttactgtggccctcaagccctttcccctaataccctccctagctggaagcatctggtgtgagcatattgagaaattatctggttggcagataattggccaaccatggctcatctgttcaaagcaaagatgtgggcagaccctgtatttgtggctaacttaactaaaaccacatgagccagatcctgtgtacagacctgctgtatggagcagaggcatctttttttttttttttttttttttgagatggagtctcactctgtcgcccaggctggagtgcagcagaggcatcttcttgcttgcctcacaccacctctccttctaaaccagggacactgaaccttctatatgcaacctgggtcttgtgtttggaatgatgtatagggccaagaggtttgctgtgtgatactgagcatctcactgtctctctcaacctattttctcatctaccaagtggggctaagacccaccaggtccacctcagagttgtggaggatcaaaggggataatgtgtgaggaagcatgttaaaagctgaaagttttgagttggcaatacatgtaatatctggctagtcttctcagttcccccagctcccagtatccacttacctcctgtggcgaaagctggcaggtactacagcgcccgaagcttattcttttgcttttgtttaagagactgctcccagtcttcccagcctcccacactaactactgctaaggccaaagtccggagtgggtggacttggatgccaggcgtattaagtgtatgtgtgacagggtggggataggactgaggaggaggaggagccagggaggctggagcttgcctggctgaagccaggacttggcagaggccagatttgcctaggctccccccaccccttggctgtctttctcagcctgggttcctgaccatctatgtcatggtctccaaggaggagggagctgtcaaggatggcagctgcactgctctgttggtaacggttactggacctgtcattcctcccccttctcagccctgaagtgcccccaggaattaatctcccacctggctcagactcatgacactgcttagagttagcctgggagaggccatgagcacgtggagaggcagaaagccagagctggggaccaggcctgtaccttgccttgtttctcttctgtaggaaacaagtcctgaattaggaagcttggggcagggctactaggaccttctctcaggagggatgggaactcccaccctctgcttgcctaacagacacctgcacaagggccatggaggagaagagagttgggatagtaagaggaagctagttccaccctctccccaaaaggtacctgtccctcagggaaaccacctttgaaccttccactcccacccccgacactggagctagtagctctctgaaacacaccacagagaaacggaggcttgtgttttattcaaggcttgtcagcctccctccttccccctgcgggtgaggtaggagggatagggttgggggagggaacaggggctaggaaggggcagactgcagctgccctttgtagacatattccagtgcagtggcaatggtgcgcatgtccagctcgatgctccgagcccagttctccacatccccaatttcctgggaagggggagaggaggtgggagcccaggaatcagaatgggtagagtatggcttccagtctggggaatacgttttattcatctcctggaaaaggctttacttggacccaccaactgcttttctttctttctctaccttttctgacactggggctatagatggggtttctgggaccaccctacttcctccttaacctaaacctgaggtaacctgactggaggcagccaatgggggcccaggattggggtggtgaggtagggagtatggcccaccttgagtgcctggttgaagttctccaccattccgatccactggcctgtctgcttggcaaattgggcagcctggacctgtagggtcttcacctcatggtccagctttctctggttcatgtaggcctgggccacactggggggttggaggagggaggagatcagctccagctagttgggggtggtctccgggactaatattccattgcagcagtgggagttcagccaagaatcagggctcataattttggccatttttggatgtgatgcaaatgactaccagtacatgcaaataaacccagctccttcctttcactcccaggattcccaggagagccaagctcggagctgactagaaacataccagctccaaaccccaaaaaggagttcctgcagctgagtgggggaagggagggaaaacctggggtgatatccctgaggaaaaagctgggagggaaaaaggggcatggaaaaactgggaaaatccagcaggaggaacacatctggcagtgattggaagcctagggatctatgcaagaagttggagagggaaattgggcccctccctgaagccgggttaggatgggagtacaaaccccctccccaggaaccctgggtcaaaagagggtatcccaggggtttcttctcggctctcagttgctctcccaagccttcgcttttgcccacacagatcaaggaacacacacaaacacacacacacacacacacacacatgctctccctcccttctgccttaggcactagtttttcttttcaatcaaggtatgggctgtggttaccattactaccatggggttggtgtccccaaccttctgccagtgttttttgccctccccaac

SEQ ID NO: 916777 - DNA, 4001 bp, Homo sapiens
gatgttcactcaacagtaatctgtcattcctaagcacggaaaatgttagaaagtaaattatatattgcagtgacctttcaaataagaaccacatggttcttttgacactaattttttatggaaaactctatatttcagcttaataacccacaacactcagaacgactaactctctagatttcagagaagtgtccaaagtcacataaacgtatacatgacaaatacagtagcaatgacactcagcaaacatccacaagatacaaagtgatgtaacaaaaaacagcaaacattcaacaggtctagcaccaattgctatgtgactaaattactatgttaggcaaagttgcatatgctgttcctccaagcctctttccctacctgtaaaactgggaggatggcaatcttataaataagttggatagattcaaatgtaccagattaagcaaaatacatcaacataaataataaaattaatcatctaacattttattgagcccttgcgttaaagaattacaatataagcccaatcttaaaagagaaactggtattctacagaaaagctagattttctaagttagaggtggggggaggggaaaatggtttgtaatgatttctaagtatctatgaatgactaaaacctaagcatgcatatggacaagtggaaaatggggctggagagtagaaactttaaattccccataatcctaaaaacacctcttctatctctctaatatggacattttctaaaactaagatgctctccaaaagtcacttctgcaacacctatccttagactgctgaccttacgccctttctacacagaattctgaagccaccactaggccggaaagataggctgactcttttttgccttgctaaagaatgtggaataaccacaccattaaaagaaggctaaataggagagtaaaccaaggatttctaattcttgatctatacaaacatctcttcacgtaatgaaaatgtaacattccttccatagactgtaaggtcctttagcagggctggggttcaatctcttcacctttgtatccgcacagcccaggaaaatgccttgatgtagtgagggctcaggtttgctaaggtagcaggggctgtttctacccttatgaaaagacacagtctatatccaattctcccccacgattttaaatgactcctttgattatgcggttaaaagactgctccttcccaaaatgatgtgatttaacagcaaaagatatctcaacataaaatgtatccagaaattgaactacagcaggtctgtcactcagcagtataagctaggcatccacaggaagaatgttacagggtgacagccagtcatcaatgttggaggaaacgccactgagataccataggctaaatcctctctctccccgccacctgcatttagaggcaatagtaatttaatattaataacgcccgcccttccgctactgtgaagcagggggtggaagaagcatccccagtagtatttaccaacaaatggcagctgctaataaacaggctttggtggccaatcctcctgcatggaaaagaatggggagatcagaagaccggtcagcaggcgaacgtgcccctaaaggcccgagttctcagagcagggcagtgattaactttccggtttctcctccgccaatgtgtgggcgaaaggaagtgatccgctacagaccggcctcgccctgcagcaggaaagggaaggatgaaacaaaaagcgcacacccttgacccttcaaagctgtaacagtagttatcccagagcctctccccaccgagaagcccggtctaactctccggtgtttgactgtccggtgtccgactgtcctgtgtccgactctccgatctccgactctcggatctccgacaccaaagcacccaggcctcgagcagatctttccgctactcgggagtaaaatcttcccgccagccagctgagagcatccacccttccgggtcggtccgttcagccaatcacagataactcccttctctaattggtcaaggggtgtggtcaccatgcgcgtcaccgaacaacattacgagttattggttgagattggaagcaggtttcgccaataggaagcgctcttaaagcggcagtgagggtggctgcgtgtttccggaagacgtggcggctctcgcctgggctgtttcccggcttcatttctcccgactcagcttcccaccctgggctttccgaggtgctgtcgccgctgtccccaccactgcagccatgatctccttaacggacacgcagagtaagcacctgctccggggcccccgcctcgagccgcgcacacccatcgcccggctgggtctcgcccctccgccggggtcaatgaatgaagctctgggttgggggcggtggcctgcgagacagagctagggctgctgggaccctaaggggctgccttcgggatgccggggctagacttggactggcggacctgacctgggagaagagtctgtggggcagggtgggacgccctatgttgggaggggagctttagcccagagtctgtctcattccagggtcgcgctgatctcctcatccccagtgagatgggcgctttgttctaggggcttgccacaagagaaagtttgcgtggtgcccgcggcccactctcgggatcgtttatgcgcatgacacacttcgggtcctctacaagtccctggctggctggttatttgggaggcggtattttaaatgtcacctacagtaggctctttttgaaaatgtccttacgcttaaatgtggcattttgaatattcgctttttgccagtactgtaagcaaccttttagaagtctcttgaaacattctcacttttctacctgctaaagtttcaagcagtagagaaaagccactttgtgtgccattaaaggatatatttcgttagtattgtatattgtgctttgtggcttgttttattattttagcatcgctctctgcctgccacagagttctccaggcctatttcatctctaaagctagcattgatatcggtttccttttctttcattataatatttccactttcctactgctttttgttaatattaataatttttgtatttatgtctgcccaagctctgtacctcatattttgatgttcataagagtctctttttgtctcactttgctttatctgccacgcctttcatttcactccagttaactcagattttcaatattttaagacttaaacagtgaattgaagtgaaaaatagaagtttatttaaaatgccctattttaaagtggagtcttcttgtggagattcaagtcatggcagaccaacttcacagagcttctaaggcctcctacacacactgccaccccccaatcaggctgtcttccctcctgaggctggactggggctgcctcttggggccacctgccccaaggttgccgcccactttggtccattggcctggcctgttctgatcaaagaaaataaaagtgtagtcttgaggggataggaatctagtgtaataataattactggcaattatataaaggtattttctttcagttaaccatgtgctttcatgtgaatcattatgcataattcttataagagccctgtaaggctcacagaagcatgcccctttcataagttaaatgaggcacaaaagaaattgagtgcatggtcaaagaaaaagtgacagaaacaaaacttgatcccaggtgtgctggctcagaaaccttttgcactgtaccccactatcacctaagaagacttgatataaactttatttgagatctgagaataatctgtgcatagaaattatatttttgaagacttaatatagtgatgagtgcctgctttataaaaacaagagagtgggtttggactatgggcattctccctgagaagcattctcctcacttcattaaattttgtgagggcaatgaaattttactctttgctgttcacttgtcacatgttttaggtgaaacagtggattgaaacataaaa

SEQ ID NO: 916778 - DNA, 4001 bp, Homo sapiens
ccaaagtgttgggatcacagctactcttcctggccaaagaattttcttttcttcttcttttttttttaattgatttttacttaacctaatttataggcttacagggaattttctttacacgactgtagaatatgggctttgtaactgggcagactttacttttttgttacaagccacttaatagatttatgagttatctagcctctttgatttggcaaatagaaacctcttagagtcatggaagacacatgcaaatcacgctaatatatgtaaagcatctgacttgacttacaagtgcaataaataatggtgattcctttttgtactgttataattccacactggcttttaagtaaaaatggttattatatgtgaatacaccttccttactgcaaaggctaaacaagtattattaaaaggaatagttttataggtcactgtttttaaatcataggcagagctaacactaaagtgaatctcaaagtaaatcccatcaaagtcctctcagtgcagagacagcagctagggagaagacagaataaggtaagtgttagaggaaaagaacgctgtgagttttgtgcaggagtcctgaacccaaactatttttttttttttaaagatgaggattcactctgttgcccaggctagagcacagtggtgcaatcacagctcactgtagccttaaactcctgggctcaagcgatcctcccacctcagcctactgagtagctgagaccataggcataagccactgtgcctggcttgaaactggcattacaaatgtaattaaacctgctctgtagccttacccactactttatcctacccatctcccaccaacagatgcaaaaacacattttatacttttgagtgctagacttattatttcaaacagacactttttttttgcaaatcaaactttaaatgtgactttattatctctcttccatttttattattgaataagtgaatgaaatattaaactaaattataacttttcctgaactgtttttaaatcataggcagagccagggttttctttttttctctctctctctgtaattgcgacatgaatgtactttgatcccagtaatcattttcaatcaatgggaaaacaaatgaaaaaaaatcccatgctggaatgatgcaaataggtgagcttgcttattagaatctttttttcttttcctcttacaggccactcacataatacatatccaagtcagagaatgctgatataaaccttgcccacctctctcagcccgtctttcttactcagacaatttctgagcagctctttgatgaacacacaatcttcagtttccaggacaaactgagccacagccttccctcctggcagatggctcctcaccatctgacttttgacactgtccaggacaactcccctgatgtctttaggctttcctggcataccaaagatgataaacagacccaggcaatcctctcctattaagttacagaattcttccagcttatcaaatctacttttcttccaggaagactcctctacccttgattctggattggaaaggtcacaaggcttagattccacaggaggaggtgaagacatctgcagagtctgtactgcgagctgaagctttatttgcttgttggatccccaaaaggtccaaatccagtctgcaccaaacaggaaggcttggtgcttggtcatcttggtggtggtcagccactcatcaactcccttttcttggcagaaagtgatgaaatggattaagaagatctcattcagagtatttgcagctgggcagagtttacttggaggatattcaaatccaaggtactccttcagtttctgagctgcatggactatagcttcactgaccacctcacagacgacgggcacctctttgctgtccttcagagccaactgttgcgatgctttctgccccattttctctgcatccaaatatcaaacatgtgaatctggttcagacgtacttctttttcaaagtaaaagttctgcagggaggccacatctgttaatggttcatgtttttctaactctacagcttcctcgggtgtagttaagcatatatacatacagctaaataaacatgttagttctctctgtttgtcagttgggtgtgttgtgttcatacagttcctgctggtttattaagttaaagatactaaatttcacacaaaacatctgttctatctaggttatattcactctacttttaatctttggtaatctcttccaacatgtttcctctttccaagttttagttgaagtaaaaatagcacgttagttctttttgtttttgttttttgagacagggtctcactctgctacccaggctggagtgcagtggcgcaatcatggctcactgcagcttcaacctccctgggctcaggtgatctcacctcagcctcttgagtagctggggctacaagtgtataccaccacacctggctaatttttgtgtattttttgtagaggtggggtttcaccatgttgtcctggctggtctcaatctcctaggctcaagcaatcctcccgcctcggcctcccaaagtgctgggattataggcatgagccactgcacccagccctatgttagttttttaaatatccatacacctctttctacaactaacttcttccaatctctaggtgagtcatttccatttgcttttcctattttctttttttgtttgtttttgtttcttttaccttctgccatgattcttcattccccagctcagttgcttcttttcctacaaaagcttctcaaacaaaggcctcaaattcctatctgttgatacacattataaactccattcgaacaaatttatggcagtttataaagagattgtgttattttctatgtcagaaacaaagcctgttactatgaacaacggaaaatgaaataagggcaataaaaatgaggcaattatcaattgactttatttcctttcatatggtaacaccagcagtgtatgatatttgtaaataaaatacgtcataaaaaaatttaaccttattacctattatcagttaggttataccatcctgaataaaaaatatttgggccgggcatggtggctcacgcctgtaatcccagcactttgggagaccgaggggggcgattcacgaggtcaggagattgagaccttcctggctaacacggtgaaaccccgtctctactaaaaatacaaaaacaaaattagccaggcgtggtggcaggtacctgtagtcccagctgcttgggaagctgaggtgggagaatggcgtgaacccaggaggcggagcttgcagtgagctgagattgtgccactgcactccagcctgggcaacagagcaagactccgtctcaaaaaaaaaaaaaatggcgtctgtaacagtttcctggtattttcaaccaggttctaagaacaaattgattttttgaagtggtgacatctagtcacattaaaataaaatccaaataaagtaagttcaatacagttaccacataatgaatggtagagtttaaagaaaattattattagcatcaaatcaattgttatgaataaatagtaatttgatattacaagttctttaatgaataccttggtaacttgctgacaacttaaaagataataccactgatattcaaatacagtttataatcaagtccagtggcagatactgaaccgcccacctccacctcaatttgtgaaaacctgtcttttgtagggttggctaccatgggtaattacgcagcactgaataaaaaatagaatatttttctaatacttctacaaatataataaacacagtaacagtttttgctgcagcgattttctttacaaagaatatttgggcccagtgctacagaaaaacatgaactacatcttatcgtcacaaaatagccattataaaatgaattttgcagcctctgtttttttgaactttgaaataaaatgttcagacaaatattcaactttttaaaaacctccattcattgatagcc

SEQ ID NO: 916779 - DNA, 4001 bp, Homo sapiens
attagcaaaaaccagaagcttaaacatctgcaatttgtccagtcccatatttttggctaaagataaaaagatttccttatttgtcactttagatgcattcattaagaaaaggccctatgtttttaaggttcagggcttcatcacagaaacataatatgtggagatatattaactatttaaattataaatgagaagaggtgctggcaagtatttctttgaaacattgaacacgcaagtgtctgcagctagtataaacaataattttgtttcatgcaaaactgttcatatacatggatataaaatgcaagtaattatctgtctgattaatgtttcatgaaagtagccatcaaatgtgattttaaaaaaatgacaagtcacattttttagtaactcccaaatggccccagaggcataggaatttcacataagaaagagaaattgtgtgggctattttttccatttataacctaataaagatacagctggttattgtcaacctaattttatgtttagaaaaatcacttaaaggaagacacaaaactgacaggagttcttcaacattttatttctcacatgaaaatgtgaaaagttacatttgacaagatagaaaacaaaaataaatatgtaaattgttgtaataagtaaactgttgccaagtttctgatgttccaaataattcataatctgagagcttccatacgtggatctaagaaaatccatttgtcctaatgttctgctgaaatattctgagtagggctgaaatttgccattcactttttatgtggatggtgcttattaggacaaaaacatctcagctgctatcactctaaaggtaaaatcatacctatttagtttgaaggtgtaggtttttttttccctaaacataaattaaaggaaaaaggaaaaacgctagctaaaatcctgtattattagtgatgcattcattgatttattccacactttcacgctatgcacatacaaataaaagtagttcccttcgaagagcttacactctgttagacctatgatatttagataactgtaaccttatttacttacttatttaaagaaagttttcattcctaataaatcattctcaaggctatatttatcaaggttcatgctttctacttcctcttgggggtggggcaagcaagcgtctttataaggtaatcatgcttggaacttctgtttgcatgcgctcatcaaaatcaagtgtagctatttagggaagcaaagaccctagtctaggcctggaaatgagattctcttcttttttggcctccccttctctggttctgaaatcaagttttcctggtctcattactaggaattcttcctcttcttatcactacgcagtacccacagcaaaccaggataattgtataagccccttggctatttaatgttgctctgaactcaacaggtatcttgcaagaataaacaaatccattgtggactgcaagtcacttgctttcaggctagggagaaaatgcagccttaagtcaaaagggcattttccctctcagctaggagagccctgtcaagataggctgctggtgttcacatctccctcgcagcgaaccccaaagccgccctgggaggagaacccggtgaccaagaggaccgactcagaggccgagcgcgctcagggctcggaatgggtctgcaggaagtcgtcccgaaagagctgcctggacacgtgcgtgacactcacctgttcacactctccaggccaggagagctacggtcctctgcaagttcggaatgggtcccccaagatcgcgaagccctcccacactgcgcagcccaggcttcaggttgcgtttgcgagttgctgggctgcggtcgtgggtgggactcgccgcagaagcaagtgccagtggcccggcgggggtctcctcactcgcgctcgctccgactagcggcggagggactgcggcaggacgcgagctgagcccggccaaggccgctgcgctcagcggccaggatgctgcagtgcggcgcttcggcgccccctactgggggcaggggcaggctcctcccgccgcgctgcctcccaggcttgcgagcttgggtctttaacgtgctgcacccaagacgggcttccctttttcactggttatttccaagcctccaggctcccaccgaagggcggctttcctcggtcaaaaccttgcctaagaaagcatcactacgtggtgttttctattccttatttcaaatgatcctcgcaatatctctttgaagtatctttaattatctccatgatacccaagaggaaactgaaggagaaggtaacgcaaggctagtaaatggctggaatgaaatccagactggattgggaactgagagatgctaggaaaaacaaacaaggaattcaattgaaattctattcatatatttgagaaagttccaaaagcttctcgtcctccttacaggatcagcatttataggatttgcattggagtcatactccattatgctcagaccctaacaaagacaattaatatgcgagctgtgctggacctgctttcatatccctcatctgatttgatttttacaccctctcttcatgtaagaactagtattataattactagcctttcacagatgaggaggtgagcttcagagaggctaaatgatctcccaaaaactgaaacatctgagcaaagaagcaggaggcacttatgttattgtttttcccttataaatctgggtattcttaccaagataccaaacggcttccagaaaaccagtgttatatagaacagacaggggcctagggcaaactgaacgatctgtagaatgtcatcaatgggaagggaggtaaccatggaggcaatttccagagtccagactgacctggaaggtcactgcagccacgagtgaatggctgaatggaacagctagatctatggcaaaaagaggagttgcctagctgagcaggagctgccctgctggttctttgagaaagctcaaacattgtatggtttatgagtttcctgatcactaatgtacccctccctccacaccacatacatctggattagatgcctccctctgtatctcacaggaccctgtgatcttatcattgtgtttgtgttgtactcatttctgccccttagtcctctccattaatctgtgagctcccagaagccaggaatgtaccatgtgtgacttctgtattcccagcatcatccatacagtgtgtatacctacagcctggcatatagtaggtagttaaagaatacctactgaattgaatgaattaagataaagaagaagttgtgataggatatgtttgagcttttttacatactggatttaggatagaccatccagtaagaaattgaatgtatggggctgcgacatttaagaaagaggcctggaaaagagagagactttggtgtcttagcatgcagaagatctttgaagtctgggatgggataataattacccagattcattatatagaatcttacagaattccaattacatggaatcgtgtggcattaaggtgttcaggtttcacatgttaccttgtttcccccattaaatcttatactcagggcaagatttaataaaaaaaaaaaaatctgtgaccctatatctgtaaatatactatttacagagacttgagttggaattcccactttgccactcttatttaataagagttattgaccagcctgggcaacatgggtagagacagcgtctctactaaaaatacaaaaaattagccaggcgtggtggcacgcatctgtaatcccaacactttgggaggctgagatgggcggatcacctgaggtcagaagttcgagaccagcctggccaacgtggtgaaaccccatctctactaaaaatataaaaattagccaggcgttgtggaaggagcctgtaatcccagctactccagaggctgaggcaagagaatcacttgaaccccagaggcggtggttgtaacaagccaagatcgtgccattgcactccagcctagg

SEQ ID NO: 916780 - DNA, 4001 bp, Homo sapiens
ctcatttcatttcttcaattgggtaagatattagcaccattatattgtttaattggtgagccaaaaatatgctcaaaattatggcaaaatttctcactttttgtgttgtactatttcccatatattatgctaattctagtcaaaaaacagaaatttatagaagagttcgagaaataatcttaaaattatatcaaaatgccccagcatgtgttttagaatttttctacatttatataaatgacttagataatgataggatatttaatcaaggcataattttcctattattttcttatggttttacaataaaaataaactttactcctttgttagttgtggttttagtattaattttctcttattttttaaagaatgttgaatttcaaagttgttttataccttacaagaaatattcagttacatcttctacaatattttgaagagaggatcttagttttaatgtttttccagttccagactttgaaaccaactgtcttacttaacatcaaattgggtgaattttaccataaaagaacatttaattcaagtacctattttggcagttctaatcagaatatgtgaataaataaattgtttcatatgcataaaaatggtatagtctatcaaaatgcatctctgtacttaagtgggatttaattacgatgttaaaagttttaaggtaaaaatgtctagagtagtgacttaccaaaattagaagcatattctccaatgaatcgcttagtaagaaacctcactgtaagggctgcaaagcaaacaatctagatttagggctgttatattttaggaaacagctaatttggttatgtgcataaggctttagttcttaaaccaaaaatattcaagaattaataaagactttaaaattagaccaaattctgttctaaatagtagttaacaatatttccatggtacaaacaaatgattagaaagttagaaaggaagtgatcttaaagtgcttcacatctaaatcactatgcagttaattcattaccacaaaaacataaggccacttaccttttgtaacagaaacagatttctcattatatttgagatgcaagaagtttgacatctgtttattttctctgtcaaactcagtctggcttcaaggtactatgtgtaatagtcacaaagacactaccaagtatttgcagttatttaaggatgtagggacctacaaatccaggaaatagaaaaagaacctctggtatccattcatcatgtcacagctcctgggtttggccagttaagatgctatgattctttaggctcaagtgaccctattggtagcatgtcaccattataatgtgaccgaaaccaaagcaaaacacagcaaaacaaaagcatgacttccaaagttagagcacattattgctcagttccagaacatccaccaagccatgcgccccacaaagttccttcatcttagtaatgctacatttaaaatacaatccacaaacctccaaacatctccctaccccagtttcagagcagatgagttctatcaaggccattgtttgggaactagtgggtataaggcaagtgtgttgaagtgagaagtaggtgggatagtgatgcagaaatttcctgttattcctatgaattgtaaacatcagtagaacaatatacaaattaacatttcagatatttatcttgctatgcctgcctatatattctataaacatacagttacttacctataaaaatgaaaactcctaatgaaagataatgtgcctatcatcccagtgagataatgttattatagatatattttcatatatatgaaatatatatgaaatacgtggttaatggttaacatgtcaatgtttctcactctttctacactctatgataacagagaagatgtcaccactcaccagatttgcctgttccttcaccacccaagacagcaagcttcacatcattcatcttgcttttctgcttcttggtcagtcctattttctggaactacactgccctgtgacaagcttttttttaacttcctttttattgctgctctcatttctcaactccgccccatattcctgccagccaacaataactttaaaaatgttttcctagagtagttttcaactcagttttcatataacatttaaaaaaaaaactggagttactgtttagacacaaaggcttatgaagaaaatatgtatatatttataacagaaccttagtttacaagtctctatttttgtgtacctggaatctaccttctcctaggacctaaaaaaaagtataatctcttttcatttagaaaatttttagaggatgggtaaacatctctgtaaatttactttgattggattggtttctttgttttattagtatctgagcctatatctgctagggtttcttctgtgaaaaaaaagggaaatccattcattcaatcataaaaagagcacaactatctaggatttagaagtttaggttggataccaatgcaaataaatatctagaccatgtttgtgaatcatatgagattctcaagaagcaaaaatgggcagtacagagttttaacttatccaatgtcttatttaataagtaatttctcctttaaaaatgttttgtcaatagaaaacagcaatatttctggagaaaaataaagcaatcaatgtcatttgttagaaaaataaatataaacctgtcatatttccttctgtagtacattgaaattagaaaagagaaatgataaaggaaagaaaatttggaaggggtattctggcatgattcattcctgctttataataaagagataaatttagtatgcaaaatgatgagtttttcatatttctttttgtcagatttccctactgccccattactgtctttctcttttatctcccaatttagatatgtagaaattctacaacaaatacaataagtctacatgtgtgtactaaattttgaggcccaagtgaaaaagtttcatttccagactaagttgatcacaggagtaatcatttacatttcttttcttttttattttactttaagttttagggtacatgtgcacaacgtgcaggttagttacatatgtgtacatgtgccatgttggtgtgctgcactcattaacttgtcatttaacattaggtatatctcctaatgctagccctccccctccccccaccccacaacaggccctggtgtgtgatgttccccttcccatgtccatgtgttctcattgttcaattcccacctatgagtgagaacatgcagtgtttggttttttgtccttgcgatagtttgctgagaatgatggtttccagcttcaaccatgtccctacaaaggacatgaactcatcattttttatggctgcatagtattccatggtatatatgtgccacattttcttaatccagtctatcgttgttggacatttgggctggttccaagtctttgctattgtgaatagtgccgcaatacacatacatgtgcatgtatctttatagcagcatgatttataatcctttgggtatatacctagtaatgggatggctgggtcacatggtatttctagttctagatccctgaggaatcgccacactgacttccacaatggttgaactagtttacagtcccaccaacagtgtaaaagtgttcctatttctccacatcctctccagcacctgttgtttcctgactttttaatgatcgccattctaactggtttgagatggtatctcattgtggatttgatttgcatttctctgatggccagtgatgatgagcattttttcatgtgtgttccagctgcataaatgccttcttttgagaagtgtctgttcatatcctcgcccactttttgatggggttgtttttttcttgtaaatttgtttaagttctttgtagattctggatattagccctttgtcagatgagtagattgcaaaaattttttcccactctgtaggttgcctgttcactctgacggtagtttcttttgctgtgcagaagctctttagtt

SEQ ID NO: 916781 - DNA, 4001 bp, Homo sapiens
ggaggcggaggttgcagtgaaccgagattgcaccactgcactccagcactccagcctgggcgacagagtgagaccttgtcttaaaaaaaaaaacagaatcctttcatatcctaatttaaaaaggaagaataagaaagcactttaagtttgaacagaccagtggttcccaaccacaggtgattttgtcttcctaggaacatctagtgatatctagaaacatacttagttgtcacaggtgggcagagggtcctatggcactcagtgtgtagtctccaggaatgctgttaaacatgctacagtgcacaggacagctcccctaaacccacccagagtatctggcccaaaatgtcaatagtgctgaggttgaaaactctgttctaacttcatctttccagctgtttgcctataatctcaacctgatgggcacctactattgcaaagtgcatttgaaactgaactcctacccaaatagacttcaacagaagaatggataggtaaaatctcttctgtccatacaatggaatatgattcagccataacaagaaattaactactgatacaagcagcaacatgcatgaaccttgaaaacatgatcctgagtgaaagaaaccagacacaaaaggccacatagtgtaggattccacttacatgaaatgtccagaataggcaaatccatagatagaaagcagattagtggttgccaggggctagaggaaggggagaatggggagtaactgtcaatgggtaaaggatttccatttggggtgatgaaattttggaactagatagcgggaagactccacaacagtacactgcattctgaatgtacttaatgccactgaattgtacattttaaaatggttacaggatgggcttggtagctcgcctctaaaagtcccagttcttcggaggctgaggcaggagaatggcttgaaccccaatgtttgaggttacactgagctgtgatcacaccactgcgctccagcatgggcgacagagcgagaccctgtctctaaaaaaaaaaaatacgtaaatacataaaatagttacaactgtcaatcttctgggttttttttaaccacaataaagacaaattgaactagttactagacaatgacaacttgcagcttttcgaagccaagccaaattgcttcaaagtcttggaagcattgcgagaacatagctgtttaagtaggatggttaagagtacaagatctgaattcagacttcctagattcacctccaagccaattttctcccttggaccatagggaagtcattacatctttctaaaatgcagtttcctcctgtgtaaaatttgaagcggtgcctacctcctacggtctttgtaaggatcgaacatctaacagggcgtctgctaatctaataatatgccattcaataaaagttgaccagggagcgttattactagtttaaaatgtgaccaatagtcgcatcgcaggttttgaagagtgggaagagggcattttggcatggaggccattgcaggcgtcaggagacgcgggatcgaacccctgtgctgtcaccaggtgcgaaagccgccttcttcttcggcaaatggagctgggggtgaaagggtgagaactggcaaaagccctaaacagaacggacgagtctgggtagctggggggtgtcgggggaaacctctgcaggtcggtcccggctgcaggcctggagacgacgggaagaggtcgggttggggtccggtcacctgccaccccagccacctcctccccgcgcggccgcctggccccctctgcccaccgccgccgctcggcctcctcctaccagggcaggttcctgatcttggtcgccgcgggctgctcctgctgcttgagtgctgaggtctccatggcggggagacgaaggtgaccagatccgctgagatcgtcgcgtcacccaagcgcctgcacagtgaccagccgcgacctgaccctgagaccctggcacttacagttcgcgcgcaaaagcaactctcgcgagacgcggccaccagtttccgacttcctccctcggtcccgccccctcgcgttgctagggcgtcggttgctaggttaccggaggcgcgggccgccagcgtccctccaagctccgcccctccagcctgctctgaactctcagatacccaggcgcttccagagcagggcagcgggagaggcagggccccctgcagccccagtcatcattacatattaagatctcaaggccaaagccaattcctgccatcgccaagcttcaaacacttaaattcaaaggaacaaaagctgccggggctcaaaaaaaaaaaaaaaaatctaagaaaaaaaacaacaccgagtaaaacggctgggtcttgaatatagatgcctttgcgaaagaaggcttgagatacctctcggcccccaagctgggaggtgaatatttggaaatgaaaacaaccccaaacaaacacaactgcaacctacctatctccggaatccgtgcccctcgcccaaaaagtttagggaaccaacctccagaaaacgactccagagaaaaacaaacagaaacttccagttgggttaatctgtgtcgctggaaggtctagttcatgaacacagaggacaaggtccttgtgatctgagatactgaggagaatcgatatcaacattttaggtttttttcctgaggcgaggagaattctagatcacttttattttcttcttttttgttggtctgtattttcttttcttttttttggtgtcttgctctgtcacccaggctggagtgcagtggcgctatctcggctcactgcaacctctgcctcccgggttcaagcgattctctgcctcaacctccggagaagctgggattacaggcgcgcgccaccacgcctggctaatttttgtatttttagtagagatgggattttgccatgttggataggctggtctcgaattcctgacctcaagtgatccacccgcctcagcctcccaaagtgctgggattacaggcgtgagccactgcgcctggcctggtctgtattttccagcaatgagcatgcaaagcatccatattgaagtcttttctttttttttttcttttaacatgatgaggaagacaaaaatcctggaggatttttgaggctggcctggggtcagcagtgttctgattaggaggtagcaatactctttgcataggattacatcactgtcacctgcttcaggaacacagcagagggacagtggcaagtatgtgatggcagttatggcttcaccctagcccctgcctggggaccccgaagaaggggatcagctagggcttgtgatgtgacagtgcccctactctgcttgctcccaggaaactttaacactgggggcttagatcattagcatgccatttttaaacttttctttctttcttttaagataaaactggttttattcatttttatctccaggaagggaatcataaatgattaacaagtttttcttaaatactaaggctaaaaatcagcacatgtttacaattaatttgctgacacatgctgaggtgagatatagatgcctctgaattaaagttatagaaacacattaaatatttgtcatgtattgccaaattctggggtctttgaacactcctggggttttgttctgtttcgtttttgagagaaggtctcactatgtcacccaggctggagtgcagtggcacaatcacggctcactacactctctaactccccggctcaagtgatctgcctgccttgggcctcttaaagtgctgggattattggcatgagccactacacccagcccacttctgttttttaaaaggcataaaatacaagtgatgggtataaaaataaaggaaaacagctgatacaattttagaaaacaactgatacaataactaagcaaaattatgaaagattactaaagaaataaatggtgctataccctcctcaccaacgatctaattgttgagacgcaggcttcacactggggtaaaatcctaaagggtgg

SEQ ID NO: 916782 - DNA, 4001 bp, Homo sapiens
tgacagcaacctcttagattatccctgcatccatttattcattttccaataattatcaagtgccttcgatgttcaaacagaggggatgaacaaaagctattcaacaggacacacatatattacacaggatatctctggtggactagcgtctcaagacctaaaagtatcttgggtttttttgtttattccatttctttaaatcacttatttttcccacccttaacatgtaagttcgaatgaccttgtctatcttgttcagtaccttgtccccaagagcctagtacagtactgggcacatagctgtagcgatgcttgtgatgaagaaaagtaaaggaagaaaagaatagagaatgagagacaaggaggggggattctccaccagaaaggcctctgggaagaaagagcctatgagcagacactgagtttagtgagggagcaaggtttcccaagattcagagagaggggaccacaagggcgaaggttacccccaaccccaggaaagatcatgcttgacttgtttgaggaatggcaagaaggctcaggtggctgatgcagagtgactgacggggaggtggtgcaacatgaaagagaagacagagacgggcttgggagaatgtggggtttggagctcaaatctgactggatttcaaatcccagcctggccacttactagttatgtaacattgggatggttcctaaattgtcctaaattcctacctacctgatttcttcaaagattaactggaattataaaggtaaggcacttagtgtgtttggctttaagggccatagaaaaatgaggaaggcatggtttctatccaccaggaactcacggctgagtgacagggacagatgcctaatggtgatgtctggcatttattgagtaacctccagggctggttgccccgctccacatgcttcatctctgttgctcgcagcaactgaagcagagacttgactaactttgatttgcaagaatgaaactcagatccagagaagctagttgatggctgagctaggtcaggtctgcctgactccgaggctggggtgcactcactgccctcatgcccacactgcccacactgcctctacaagcaagcaggtaccaggagtgtttggtattataataagatgctgtggggcatagagaggagagcttccatggagaggaaagcctggctgcttcacagagggggtggcatttcagctggtccttaaaggattcagcacctgccagaccaaggagggaagcagggcatttcaggcaggagggctgccttcaggacaaaggcacaaagctgtgaaaggcctggtggttctgggaaaggtgaagagttcgccgacctgtgactcccagtggtgggagacaggtggaagagtccgttaggagcagattgcaaaggccttgcccgccgggcccaccaggccgcgaagcctgcaggcagctgggagccagccgtggtgttcaagcagtggagaagtgaacacgctgagttttgttcctgaggcactggatgagaacagggaggtcctgacttatgcaatacctgcagaaaacgctgcctgacttaaaaagtgtcaccgggatttaatagaggccattattcacactatatcaacagtctctcagggcactgtgctgaggcctattttaggaaattgcagctccagaaacgctacataaaagagttgacatgccacactcacagctaccaaggcgggcctggccccagttccccctgagggtgccaggcccaccccagtctcctgtccctgggccctggtcattaccagtggaacggcgccgtcgaggcctggtcctgtcgcctcccgcaccagggtgggctctccttttgatcattctgtctcagcccctttctgtctctctcctggctccctgccggtggcagtggcgacacacaggagtttggagaagcccaggaagccagcagctgtggcctctccagggggtggctcaggtcagtgggttgccatggcaacgccacaggtcctgccccaggggctgctgggttccaggaaggggccctgccctgcctctgctttcattccttccctcatttaccaaatattgatttagaacctactgtttgacaggctctgagcagctagtgatcaacatggcagacaaggtctctgctctcagagagcttatattctgtggcggagacagagacaaattagcaagaagacagcagaaagtgagtgttatgaagaaaataaagccatagaatgggagatcaagagaggtgggggtgctttttgggcagtggggacactgaaggcctctctgaggaggtgatgttggagtgcaagggcctgggtgggcttgggtgtgtgaggaggagccaggaggccagcatgacgaagcgggaggtggggagagcagcaggaaatgaggtagaaagttgggaagaatccaaagtatgtagggactcgcagaccctcctaggaacttcacatttattccaagtgcgctaagaagctattggaggactttaaacaggtgatgcggactgcactggctcagaaagggtaacccacattcattcatccctgtctgcatttggcaactatttatgggataccatgcaccaggggctggctacacaggagggacacagcctcgatagacagttctttttggaagattagagtttagtgtggtcaactataaataatcatacaaacagagatgcaattaccaagagtgccacgcgagagaaaaaaaggggggttgggtctaatctgggggagttaggaagcttcttggaggaagcagcattaaactggcagctaaagaatgcgaaggcatgaaccaggtagagagggaggaagcgtgttcctggcagaaggaacagcatgtgcgaagttcttgaagcaggcagaagaaagatgctttcaagaaactgacaagcagcctgagcatgactacacacattgattcaggtatcaacacgtgtttcctgatattatcctgcttgatgagcactttatgagatgctataggagatgcacatacataagccttgcttctgtactcaatgctgggttaaggagtctagattgtattcagtaggtggttgagaagctcataaagtttttgagtagagtggggcataagcaaagcagttctgtgggcagctccatctggtgctgctaaacatattttagaggggagagaatggaagaggaggccacggagtaagggtgaccgtatcccttatcatccaaacctgaacattttgagattgaaaagcaatattattaataattttgccaggatcacatgcataaaccaggattgagccaggcaaaccgagacttacttgtccccctctgtaggaggccgctagaggctcattatgtcttagagacctgaactggagggatgaagtaatttgtttaaaaaaaaagaatgtagtggagaaaagataagaactctttccagttaactgtgttcactccccagccaatccatgtgatcactggctctatgtctcctcctcatcagctggagtctcaatcacaataggacacaggtgagcctgagatgacgctaatatcattctcctggaatatggcttcccaacacaagcaccatcaccttcatcatcatcatcatcatcatcatcatcatcatcatcacagcgatgacttgcccaagatcacacagttgttaagctgctgagcagggatttgaatctgactcgaacctaactactcacctgtggttatatactcgtaattatatatacattaaagtctcattgtgaattctaagctgtgtctaacataacaccaattgtacaataggtgctcaataatgtggctgccctttcccactttagggaaactcaatatgtaaaactctaaagtgggcaaggaaattaactaagggtcattgcctgcaatgtacaagaaaaaaaaaaaaacaacgaggaggaaaaaaaaaagaacgaggaaactcccaacgatgcaca

SEQ ID NO: 916783 - DNA, 4001 bp, Homo sapiens
attaaaccaaagtgccagccatcaatcaggcaggtaaaaataaccaaaattgcctcctacagaaaacgttaagtcaaatactttgcaaagcagagaggggatgaaaaattttccattagtacttgatctctcatgtctagccaaatgggataccagcacttgagggtcccttctctgtggggacccaagcaggatatgtttgtgactactaactgcacctctaataaaaattcatttggcctgtgttttccttttcttttttctttctttttctttttttttttttttgagacagagtctcgctctgtcacctaggctggagtgcagtggtgcaatctcagcttactgaacctccacgcctcccgggttcaagcgattctcctgcctcagcctcctaagtagctgggattacaggcatgtgccaccacacccagctaacatttgtatttttagtagagatggtgttccatcatgttggtcaggttggtctcaaactcctgacctcatgatctgcccaccttggcctcccaaagtgctgggattacaggcatgagccaccgcgcctggccttggcctatgtttttcttaatcaataaatggtagtctcaaagaactgtatttttaaaaaggtaaattcagtgcttcagttgacactgaatgtaaagcgaagaccagaactttttattaactcaaaataggcttaatattagcaatgttttcaattaagactaacaagggattggaggctgcattttgtttagattttagctataatctattgagcattatatattggctacatgccaggcagtttgcaaaggactttgcatgcattaatttgtaaaataaccaataatggaaattattacagtctttctacacatgagaaactggaggcaagaaagctcaaataatttgtttaaggtcatatagctgtttaggggaggaacaggttcttgaacacagacaggtctttttgactatgaagccacagtgctatcctactgaaaacactgcaagatagtcttataaactttgatcttatcagaatcatttttaaagtttaataaaaatacagactcctgggccctctctcagtacctactgatttagaacatctgggaatggggcccaggaatcagcactgaatcaagcaccataggggtaattctaaagcacatcagtttgagatctctggtactgagtgcttgacacacattatcttatttaatctcacaaaatccccataaagctagaattaattattatccccatttttatagataaggaaactaaggcccagagaatttaagtcatgcacccaagatcagccagtgagtaaggagcagaggcaggatttgaacctcccaagtgctttgaaccactaagccagtgattctcaaaccttactactactaagaatcacttacaaaacatattaaaatatccctggtagtctagtagctaggactaaaagaagaagaagaaaaaaaaccattaaaatagagactcctgggccctgctccccccttaaagactcctatttagtacgtctagagtcgattttcacagtcccgtggcaatacaaatgttaggtcatccgtggacctcgctttcagaaacaccgcacaacatattaactacttttctctacccatggagatacaatgaaagtcacaaaatcatacagatgagaaggcattttgaattatgggaagggcttttgcgaggagggaagagatgagcacgtcaaaaccttccctctccccaaccctcctttactcctgataccattccgtgatatttctgcttagtgggcatctcgaatctatctgaatgccttctgggatgaagaattcagaccctccgaaggcagcccagttcattttgccagtatggttatcagaaaattctttgtgctgagcgaagtctgccttctgtgccttccgtgtcttctactacttctcaactgtcataactgccttcccacctggaactcactctgtgggtgggggaggagcatggttccggtggcttcaggtgggatgacagttatgacacaccaccgtaaccttaaaaagttcacctttataacttcttaagagccagatcatctaatatgttcagaccagaccacttcttgactattcagagatcacgtagctaaaatcaacaaccacagtgaagctactgctctgatcttgagttcttctatttcagttctgtagggcacaacaacacattcctcaccagccacccccagatttatttatttattttttaatttcttctaaaaaaaggcaggggatacatgtgcagaatgtgcttttttttgagacaggtctcgctctgtcaccctggctggagtgcagtggtgcaatcgtggctcactgaaacctctgcctttcagcttcaagcaattctcctgcctcagcctcctgagtagctgggactaaagggacgtgccaccatgcccggctaatttttgtattttttgtagagatggggtttcaccatgttggccaggctgatcttgaactcctgacctcaagtgatctacgggcctcagcctcccaaagtgctgggattacaggcgtgagccactgcacctggcccacccccccagatttcttctgtcattgtcaatttgccaagggagtttctctataaggccatgatgcaggttggagacaagagcttcttactgcctttcaactggtcgaaggtgtgaccaactttggagtatccttatggaagaggatacaataaaattgattatacagaatttttaaagagggtattttgccaacctcgaggttaaagaaaaagaaaaacaaacaaaacaaaaacagactctcccatgtggacagaaggaaattttctctgtttatgcaggatgggaaacctttctgctctctctttactgtgtgtctttactatttctgctcttcttagaaatgagcaacaagctatcggagccactgattcctcaaagaccaagagctggagaaaaataatttattttcatttattccatatcgttctatccatccactcttctgtttgaccaacattttgaattgcctactatgtgtttaccagcaaacaaggaagaacctggcttttgtaatctataatcgtaccaaggctgaaaccttacttttaaacaaataccagaattttaaaattataactgaggtttgttttttttttttttttttttttttttttttcagaatagtcatcttggaaaattattaggaatttattccaagaggtcctttgttcaacagtcttctggaaattcctttagagactggttcaaaagcttctgagctacaccaaaaaaattagtctcattattttcagaataccaaaaaagggtttttcccagttcgatcatccattttctttccctaccttggctccaaaatcaaacccacccttggaggatgggaatgtgctgcccagggatgagaggagctggtgagggacaggggtttggcccagggtgagagcactggacatgcttttgacacatccttcaagacaagtcttaaaagtcctatatggttgcctttctaaaaagttacagtgttttataggtcactatgtgctgacctgctcaacgtggtcaaaatgcttagaaatgctgcataataaggcaccctctagtggagtcaccttgtacattagcataataagggttctgagaagtcttgcagtaaaggaaactgtttaaacttagtgttaaccaaacttatagggcctgctgctcttcttcatggaacacctattatcgtccaacaatttttgaaacatccttagaggcaagtcctataaatgcagattttaatgaaggtcgagcagtacaggaagagattcccttcccactgactcacacctagcagacaagtgtctgcacagccttctgcactcccctagtctttacttaaatgtaacctcctctgaaagaccttccctggccattcctcttttgt

SEQ ID NO: 916784 - DNA, 4001 bp, Homo sapiens
tgccttcgtttgtcatcgagtataggaaggagaacttcggggcttagcctttccccactccctgggggctcacacccagccaggggagtgcaatcaggcggggccttgactctaggaatcagagatcgacaactaccctaaaacacagaatatccccctggcaagagcagtccggtgtccgggccaccagggctgcagcggaaacctggagaggccttaaatatttctgcagggaccgaggaaagaccttctggggcaatgccccgatgaccccagcccccaccccacttccatatccagcctgcctaggggtggagttggggagacattcgtgcggcatttgtttatttgctcaaggaaaggacgtgcatgctcaggggacggccggggctggaaggcacttgttgctccgcgctgcaatgctcagcagcttatgcttgcaggcattctctcaaacctcgccacggcccaggctgagtccactgccctatttctgcctctccccaaactcatcaccctaagaaattctgaggctgcagggggccaaaatgaaaatagccgggttgcaagaatgagcctaggggagggggtgaactgtaagagaacttccacctgcaagggacttagggagcgttaacagatctagaagtgtgacggctcttcaaaggtgctaggagtgggaggtggcgaaaactactggaggaagaaccgagataccgggtgttttcgttgtgaaagattccttggcctccttttttcgttgttaaggaccgccgcacccccaaaactgacgcccagcagctcttgaactgcagagcagtttgcagaccccaacgccgagtttagcgggccagtctgcgtcctgccctccctccagcaaggtcacagctccctagtggagcccggcgttgggtgccccttcctggcagaaaagctaaaagcccgaccccacagcccaggactcccacctcccgtttctgcggattcccccggaccaccgggttcgccgccgccactccctccagctgcgcgtctctaccagccggagcctcggtccccacctcccaggcgcagtgcgaagccgtcaccctcccccgcctcggggcgttccgctcggcttcccggccctggccgccagaccccgagcgcaccgctattccgaggcccccataccctaggaggacctgggtccgggagggggcggtcggctggcaaagtttctgcaagtggcacctcgagctcgccgcgagccagcgcatctttacgtaactttgtgtccagggcaagcgaaagcgcgctccttcgcgcgcgcgcacgcacacacactcacacacgtacacaatcacacgcttatacacatacttccacgcatccagttacacacatcgcctcgaattgaaaacttctgcaagctctgcgttattctttggggttccactgtcaagttgacccgtctgaacttttcccaacttctttctaaagttccccctctcccttctccttccctcccaatgtatccccccaaccccgccagtaggactaacctgtggaatccatgtcgggttcctccagtaacccacaatgcatgctcttcccatggacagcacaggcgccccccaaaagtcctgatgtttggggatcccctgtgctagagatgcccagggaggaagggagggagggagggagaaggggagagagagagacgcagaaagtgagggggcacaaggataaaggaggaaaggaaaagaaaagaaaaagaagaggaaagaaaagagaaagaagaaaagaggagagagagggagagaagggagcgagctcggagaagggggagagagaaaaagcgagcgagcaaggggacactcagtaatccagccgggcaaagccaaacccgtcaaaatgtttgcggatgtttcatgggaaaaagcatcattttataggagccccgatgggagcaatgtcattgataggccagccggcctgatgaatggccgctcgtcagatggggccgtggcgaggcgcactgtgaagcccattgtgggcctgttttgaataagaaaagccgcctccgaaaaggggggctcagagcgacgcaatcccagccctccgacttcccccttctattatagcattagcaacgtttttcttatttaaagttccagaggccttctccagccttcgcccggcactcattataggcgaaatcaaaattggcttagatgtggccccctccccctcccggcccttccccaccatcgggccccgcgccgtgctggcaggccgggaggggggcgcgggcggggggggagccgcggggaactcctggagcctggggagtcgcctgcgctaccacgagtggggccccactcccttccttctcttgcgcccccacccaccccccattttggtcctgggttagatttcgggtggtggccctgagaatgcgggagggggtatgtcttgaccccttgcacgcggatccgcagacacgcgtggggagtgaagcgagcttgaaggggaaagggtggggaaggggaactgaatccctaagaccccatgccccaatatgagcgtaacaaggccgctaggcggggaggaggtgagtggctggttcgcctcctccagaactttctgtcttcctctgggcctgggtccttcatcctgtttctctccttccatctcgctgtctctctccgcctgtctcccggtgtctgtttctagctctctgtccctctcgtcctctgtgtctctgtctctgtccatttctccttccttggctgctagtgtctctgtccagaccctgcctccacttctctttgtctccccctaggactctgcccctctctgtctctatccccctcggtctctctgtactgtcccccctcccccgcctcttcccgtaactctgtcagtctgtctgtctctgttcctccgccctccccctgccctccccaccccaccgccgtcccccagtcggcctcgaagtttgtgagaagccccggcatccaagtggggacgcggttttcccagggaccccctcctcggcggagttgaaagtgcagaaagaggggggcgagggccggggggtgctggaagtggaagtgagggggagcaagctgcgtctcctgcgggccccgataaagtggccgttcgcgggtcggccgcgctgtgattagaatatgaatggggcccggcgggcggaagagaaaggcggattaccccgggtgctttgaccatggacagaggcagagccggcgggccgcggcgggggcggggaagcgcggagtccctaacgccgtgcgggagtgggggtctctaaccccgggcccctggcagcgcgcggctttccgcgatccttcggaaagacgccccccgccccctcggtccgccccctccccacaatcagagctgagtgggacaatgtacggagactggggagcccgaggggccagcacgtgccgagttaaggtcacggtgcgggaggaagaaggcggcgcgcggtaccggctggacagagcccgggatggactgacggtagcgcggggttcgaatcccagctctgtaaattccttcatcgttctgggcctcagcttcctcgtctgtgaaatgtagcaaagttgccccctctcaagctttgggggaagataactgaagcagtggttataaaaggagccgggcatttgctgttccctctacttggcactctgccggctcctccttcctcacaggtgcctaaccggccgacacctttgcgtcaccctggtctcagctgagcgtcgcctcctcggaggggctgtgcctgaccactctctgcgaaggtcccttcctgccccggccgctgccgggctcattacccggtttatttctggaggactttgttcaccaccccatgcccagtgcccagaagggcgccaggcacattctttcccgctgcgatgctggtgatgggaaagaggtcgatggaaacctttggcagccgaatgccatggtggcggtcaccgcgc

SEQ ID NO: 916785 - DNA, 4001 bp, Homo sapiens
cttattgtaagctatagtcaccctactgatctactaagtcttatttcttctatcaaactatatatttgtacccattgatcaatttatcttcatccctcccactcccttcccccttacattctttttattcttttttttttttcttttttttcttgagacattgcttcactcttgttgcccaggctagagcgcagtggcacgatctcggctcactgcaacctccgcctcccaggttcaagcaattctcctgcctcagcctcccgagtagatgggattacagatgtccatcaccatgtccggctaattttttgtatttttagtagagacggggtttcaccatgttggccaggctggtctcgaactcttgacctcaggtgatccacctgccttggcctcccaaagaactgggattacaggcataagccacggtgcccagcttttttttttttttttttttttttttgagacagtctcaccctgacacccaggctggtgtgcagtggcacgaccttggctcactgccacttttgcctcctgggttcaagcgattctcctacctcagtctcctttgtagctgggattacaggcgtgcgccaccatgcccagctaattttggtatttttagtagagatgaggtttcaccatgttggccaggttggtctcgaaatccagacctcaatccatccgcccgcctcagcttcccaaagtgctgggattacaggcatgagccactgcgcccagcctccccttacattcttaaccttgggggtgacacagatagatcagctccagggagttatccaggtaactggaaagacacgctaaggttcttaatgtctacatctaaactatcccagactcaatatcttgcaaaatccatactctagccatccatcgaacaggattgctaaagaagaaatcagatgtaatgtctaaataaatcagccccttggcaccagagaaataaattatggagttgggtggggtatccaagccctccgggtcgcataccaccagcacactaggggagaagtctactcactattctccactgtaggatcgtagccttccgagaactcgccttccacaaattgatgtgccaaagatgtcttccctgtggggagcagtgtgacagttgtatccaaatcatccatccacattcacatcctctgtcctttcggactgtggcccaggaccaaaggagaccccaaattaacaccacagtctgtgagtgcctcaagcaatgctatcctttgtgtctaccctcaccctcttttcacccagggtctccgcactttggctaccggatgcattcagaagcgcagcaggaagcctttcccgccgccttccccaccccatcccactcgtaggaagatccaagattccctaggatcaagtccgccccgccccaggacacctgcgactatctgtccccacggagaccgcgtcccggttttcaaattgtgaccccacccctatccccaaagtaacgctgggaccactctgagattcccgcagccaggtccgcattaacccttaagtgctcccgcttcctgcagcctccacacaccaccaactcttccaatcctccactcttccattcctccactcttccaatcctcgctctacaaccccatccttacgatgtcatcattcctccctgggtcgcgttcccacggcagcgcgcctcttctggctacaaagctgctgcgcgtccgagctctgcagggcggagactcacctacacagcggtatccgaggatgaccaccttcctgtagcggactagcggcatggcaggagcccgccccaggggcttgcggaactgcgggctcagagagcccgaaaacgaggtcagggtgtgagcaggcgcggcagctggtgcaggaaagtcgctcaccccgaagctgccgtgggcaagttagaaggaaaccaaaacaagcgccgcgcccggagctgcccacgtgatcacaacacagcacgtctaacgccagggagccgggcgcccggggaactactgagccgcgccgcgccgggctccgccccccaggccgctcgccattggtccattagaatgggtaagggcggtgccgccagcaggagggaagggtgggcctcacgtggagcgggagaactgggagctgcgcgtgcgcagactggagccggttcattcataaagaaacagaaaggaacccggggtcctaaaggcgtttgcgcatttacagcctagctgaagtggcttcgaagaattatggatggaaaatacccgttttgtggtttccggtcataagattctagccctcccttttgcatggtctctggggtccttagatagggagaaaaccgccaaagttctagtatattccttctgcttcccccagccttcagccccagacctatcaaggtttccagtcttccagcatctaatttcaaactgcaattcttattcttgcagaaattgctagaatttatgatcaagtagtctgaggtttcttcttcatcatcatgatcctcaaatattcatttttcaacaaatactgagtatatactacatgtttcaggcattgctccagctttggggtcagaacatggacatcacagacaatgtgtctgctcttatgaagggagaaacaaacatacaacaaggaaatatcagagagtgttaagtgctgtagaagatggtgtgatgaaagatgaccactttattttttttatttttttatttttatttttattttttttgagacggaatctcgctctttctaccaggccggagggcagtggctctatctcggctcactgcaagctccgcctcccgggttcacgccattttcctgcctcagcctccagagtagctgggactacaggcgcccgccaccgcgcccggctaattttttgtatttttagtagagacggggtttcaccgtgttagccagcatggcctccatctcctgacctcgtgatccgcccgcctcggcctcccaaagtgatgggattacaggcgtgagccaccgcgcccggccgaccactttattttttaaagacaatacagcatttttaattttttttctttatttattttgagacagggttatgagactggctaatttttgtattttggggagagatggggttttgctatgttgcccaggctggtctcgaacgcctagcctcaagtgatccacctgacccggcctcccaaagtgctgggattacagacgtgagccaccgagcctggctgagatgaccactttagtgatactttctctcataggaaaccccatttaaactaagatctgaaggaaccaactaggagatttcacaagaagaatccaccaatgctaaggcgttaagatggaaataaattgggtaaattccaggaagaggggaagaaaaaaagaaagccagttagcctaaagcagatgaagtctaagagaatggcagaggccaggccacataaaggagtctgggctaattctaagtacttgaaggtatttaagctggggcatgacatgatctaaattgtctttctaaaaaatctccctggctgtagtgaatagattggggtttgagggtaacaggagcaaaaggaagcagggagattggcgaggaaactgttacctgtagtccaggtgagagatgagagcgcttgactagagtgatcatgttgaatgaagttgagaattcaggatattctgaagctaaggttaaaatgacttgtggaaggattggtagaggagggaagaaaggaaggaaatcacctagatttatagagagttcgactatactatgtgccaggtgcattttattgttatctcatttaatattcacaaaagccctaggccgggcatggtggctcatgcctgtaatcccagcactttgggaggctgaggtggacggatcgcttgaggtcgggagttcgagaccagcctgtccaacatagtgaaaccccgtctctactaaaaatacaaaaattagccgtgcgtgatggtgcatgcctgta

SEQ ID NO: 916786 - DNA, 4001 bp, Homo sapiens
agaccctgtctctacaaaagatacaaaaattagatgggtgtagtggcatgtgcctgtagggggtcccagccattcaggaggctgaggtgggaggatcacctgagcccaggaggttgaggttgtagtgagccaaggtcatgccactggacttcagcctgggggacagagcaagaccctgtctctaaaaaataaaaagataaataaaaataaatatataattaaaaaaaaaactcattctgagcattgctttgtagtaaaaaaacaaaaactgaattcacgatcattcccctgacaaccccccgcccgtcccttggccaaagtgattatcttccagggcccttggtcagggaatagtgtcattattccttcagttatgcagctgaaaatcttgacacttctacctcccatccaacccaccatcaagccctgtcaactttacctcttaaacatgttttcttaatgccccttttttactctctctgtctccttctttctcttcctctctctctctccctgccaccctttttcaagctccagcagttcttgcctggagtattgcaacatccaactgttctgccctaatccactctagcaatccccgctatagagggaccttttaaaatgcaaatctgacctggattcacttctgcttaaagcttatgactggtttcctttaattcttggataagcacaaaacttctcggtatggctaaggctctgcttcctccggctccagcttcaactcacaccacactccattcaggtcgattagctcaaacccctcagatatttctcagcctttgtactcactgtgcttcctcctgccatccagcctttgcacgcctgattccctctgcttagaggagttccctcctttctttgtaaaaggcatcagatctcacaccaagctctcattacaaaagcctttcctgtcctacctctcaagatctcgttattgtaaatactcaaagtatcattaacctctaatgtttcaatttacagcaataattcaacatttgtttgttttggagacggtgtctccctctgtcgcccaggctggagtgcagtggtgtgatcatggcttaccatagcctccacctctcggcctcaggtgatccttccacctcagcctccagagtagctgggactacaggcacgcaccaccacgcccggctaatttttagtagagaagcggtttcgctatgttgccaggctggtctcgaactcgtgacctcaagtgatccacccgcctcggcctcctaaagtgctgggattacaggcgtgagccactatgcccagcccacatttgtttatttgattaaaatgtctgtgcccctcttccaggattgggctgtgagcccaggggaaggaaagaaccttgtctgccattgtatcttcagggcctagcggtgcctggcgcacagcagttgctcaactagactggttgactaagtcaataaataaagcactacggtctattatatccgaaggcttggcttcgggaggggcaaaagacaggtttcgcgctgaggtagggttcatggtgccgacattttttttcaagatggaagaaagcggagataatacgcagccctcaaaggaacttagtctaatcggggggagcagacgatcgttcactgtgggaaaatggggtacgatttcccccagtgaggaaatcaactaaagccgagctttgaaaaggggagcagaggagcctgaggggaagcgggggcgtgtcgcctggcgtgaccagcgcggcaggaaaagcgggcccagggacccgggcctgtcacgccgcttccgcgcgtccccaaactctccctcggctcgcccacccacgcggcggggacccctccggcccctccccggccccacggccacttcttcccccacaagccggcctgcggtccgccttaccagcccgggccggacggggccgcagctcctggcagaccgcacagccttcgagcccggaatgccgagacaaggccggcgccgattggcgacgttccgtcacgtgaccttaacgctccgccggcgccaatttcaaacagcggaacaaactgaaagctccggtgccagaccccacccccggccccggcccgggaccccctcccctcccgggatcccccggggttcccaccccgcccgcaccgccggggacccggccggtccggcgcgagcccccgtccggggccctggctcggcccccaggttggaggagcccggagcccgccttcggagctacggcctaacggcggcggcgactgcagtctggaggtgagcgggatgcagcaatggagtcccaggcctggcctgggcacaggcggggagcaaggcctccgggcgcggaggtcagggcgtctagcagcagggcacgggccacgagtggagatttgggtcacacgggaagaatctgagccagggtgcaagttttttctgcgtccacctcctggccgtggccttctcactgcttaaagcgccccttggccttccctggaagtctgacctccgcaccctgcccgcggcctcgggagggctggggtggcctaccttcttaggccgactgtggctgagatgaagactgagattgtactacattgagtcaaagaccaacctgcatacacactcccctgctcccaggctgtctcaccactaggcaacaccgcctccatcttacttacccttttgcagggcccttttcctggttcttgagaatgtagcaagatttccccgctcaggatggggatgggtcggaggagccactctggaagtttcccgggcaagaaagtgttggcaataataataacgggctggtcaggaagtagaagagaaaattaagacttagatatcctgtggaaaaagaggaataatatctactgattgatgcggggagagagggaagcctggaaagatcggaggtgaaagtaaaactgagatttgaaggtagaggtgtggagggcctgtgaactctatgcagatgacaaatgtcaaaaaagtgcagttgcttttcagggagagaataagtgtcctaaaaaagagacagccaattcctctgtcttccaaagttccgtgaaatagaattacacaattttgcttaatggtagaatattccatgtatctattaaaatcaacaaaaggccgggcgcagtggctcacgcctgtaatcccagcactttgggaggccgaggcgggtggatcacctgaggagttcaagaccagcctggcaaacatggtgaaaccctgtttctactaaaaaaaaaaaaaaaaaattagctgggcatggtggtgcatgcctgtaattgcagctactcgggaggctgaggcaggagaatcgcttgaacccgggaggccgaggttgcagtgagctgagattgcgccattgcactccagcctgggtgacaagagcgaagctccgtctcaaaaaaaaaaaaaaaattaaaaaaaatcaacaaaagacttaaaaaaaaaagactacactgttagcatttcagaaccaccttagtgtaatgatgatagctcattgtggtactaagaagacaggggttatagtcttatttctggaaaagaaattaataaagtggcatgcttagttaaaatatatataaccacatgcaagtactaaaatgccactgtataaatacaatacaaattgtaaaagaaaacatgctttttaaattagagcaagtataatagcctgtgaaataaatgtcaccctctagagttgttcagtgcacaagctgcacaactttacatgggccttcagtagaggtttccattttatgtgaggttttgtaaactgggagatgatttttccagtagtgtggcaatagtacaatctgcctttcttccctgattctgtgtgcactggtcctatttacaaagtaatataaaaatcaaaaggcttggccagacgcggtggctcacgcctgtaatcccagcactttgggaggccgaggcgggcagatgacctgaggtcaggagtttgagaccagcctgag

SEQ ID NO: 916787 - DNA, 4001 bp, Homo sapiens
cagaaaggccatccctgttcttatgatgtggaggctgccctgaacagtgaaccccgggacctgataggggaggccctgatggcagaggaggaggaaagaaaaaacctcctgacctcttgcagggcagtgggttgctgtgaatgtctccacccagcagcacttgactcaaaaagtgggtcaatgaccttgcccctccctggctactgcacaggaaacatgagagtaaaggtgtcccagaccatgacttttactacccccgggccacgccccgggaattcctctgatgcctcagctctcccagctcaccaggggctagagacaggcgctgttttggggttggccctacagggcccacatcccacaaagacaggttcctcagaggccacgataggacctgctgaagtcggaatggaggggggctctgagctaggacagccccttttcgggtcctctccaaggtctaggtgggggtggaggtgtctggattttggctccatcctaggtcagtgtctgacctcacctcacacacacaaggcttggctggccggagagggccaccggatgacgtggttccctgcaggtcactaaacactgagtcacagaggtggggtgaggccccacctggggatctcaacctttggtccccaatgttgatgaagcccagatgggagtcagggtcctcccactgactgtttctcctgtccccacccctcacaacaccgactcccaagcaattgcacataaatccgtaaaccacccgtgggggcctgcaggtggcaggcagagcctggtgtggggcccctgcccccagtgctctgttccttcctcagttcattttctacactgtctggttttgtcccagggaactaggaaagcacagaagtaattgtagccacgcaattccagaaccaccaactgcaagccgtggaatcctgggagctgcagacacagaactcgcatccacaggaccccagagcctcaggctgcagagcgcaggccacagagccctggagccacaggctgatctgcagccgggagcatcccagaaccacaggacccagacacacagcccaggcaatccgagcaccaagggactcaaatctgcagctcacagagtctgcagagaccacagcaggtagcgcagcaatcctggaaccatgggaggcccaagagcagcccactgctttctagaaccacaggagaggaacgagctgtgggctctcagcacagagctgggagggtggccccagagttcacctcctcctccaaacaccttccacttacgtatagggcttggcctctagggccccgcagccagcgcccctgagcggcctccaggagtgaagagccggccaaggccctgccaaggctgcagggcggggacacccagtgggggacgcccgggaggggaaacccttcgggcgggcggaccctcgggccccccggcgcgcaggcgcactcaccggccgtgtcgtagaggttcagggtcacctccttgctgccaacggtcacgctggccgtgtacttctcgaacaccgatggggcgtagtgctgcgggagagggggtcgggttggtccttagtggggccggcgggggccaaagttccagctgaatccactgtccacccccctcactcgtcccggatcagccccccctcaccccgctgggctctggaattcccgagggggcgccccggggtggcggccgcctgtccgtgctcgggacgctggggactgagggtcggggctctgggctcagggtaaggggcgtccctcgcccccaccccagccccgctgcgggcctcacctcggggaaggagccctggctgtacaccatgagcagcgaggtcttgccgcagccgccgtcgcccacgatcacgatcttcagctccttcctgcccggaccgggggcggcggtctgggccagggccccgggggcatccattgcccggagcccgcagcactggcggcggcgcgccgggcactagcggagccaagaggtcgggggcggggcggggccggaaccagccccgcccactcggagcagcgccgcctccgccaggcagcctcccggccgacctcccagcctcagtttcctttctgctaaggtctcagccctgggtgtgggtattcagctctcagtcccagggatactgcagcaccggaaaaacggggctcagctgcgagcaaagctcccacccccaacccaccgccaccctccgcgcgtcacgtcgcgcccctcgccggcgagacccgatcgtggctgcccagcgactccaggtgcccctgattagcaggctccgccttcggcagggaccctctgattggctggcgcggccagacagggtctcccggattggctggctgtgcctccgcaccgggttcgagaagcccccggcctccagctccgggaagagcccctcaactttgcactgccccagcggtgtggcttggcacatgtccgcctctggcctcagcttccccacaggaggtagcggcggtggcaccagggaagatgctgacgcgagagtcatgtctgcccacctcgcctgggccagggacgccagcgtgcacgcgggttcggggtgagggactgggctccgcttacccgcaccccgaccctgggctgcagggtggacgtctgacgccctctgccgggcaatcgcctcggcgccggccgctccgggcgcaggttggcccgaaaccactaggggcggccgcctccttccggcaggagccagaggcgtgaaccacgcaagacgtcgtcagggaggggcaggttggagtagctctagttgaagtcaacttggtccctctcctggagctttggagactgataaccccacacccaccaagaaatgtaagaaaatgcgtttccttgccagcagccacatgtccttcatcccaggaatccccccaactctcccatcccctgatcaaaacagcttatttgttgagcacttactgtaggcagtgctatcagggctgctggctgaattacccgtaacccccacccctcctcttactcctcaccctgggcgggctgactgccctctgcaccacccagatgagtcgacagggtggcagagggacccccccctggagccggtccacggcagacaggcacgagagcatggccgagagtgggatcctaccagctggggtaggaagagcccatttctaacaaaacccccaacagcagcatggttgggggcaagtggccttcgtagtttcctcagataggggctggcaggactcaggatctttttgctggcgaccccaccccgaagactcccagttttcaaggtctcggcaagggtcatgtaaacctcacttcgtggaggaaaaccgccaacctggcagttccatggtcaaggttctcacagtgcaagcaaggcacggtctgaccaccagagggcagcagcgaccgcccacagaatcccaagaccacagcagagctgggaaggggaggccggggaggcaccccaggttctcagtggacgccctcttcaggcactgggcaaagggtaatctcctgggtcaagcaccccctagacaaatgcacagcaactcatccattccttttttgcaacacgtttattgagaggcagttgtgctccagccttccaggaggtcacagtcttaggggaagcagtgcaatggaggttggaagcaggggaaccctttactgaaggctgagcgctggctggcacactaggcctggcagcactggagggcaggcagggaaagtagggtgggtaacccagcctggcaaatgcacggcagctagaaaacctcttcaggttctggggtggctgggccatgagaggggaggccaggcagggctgtcaaggtaaccggggtcagatcatggagttgcctgccaggctccacaggagtgggggacagaagcagagcaacccagctaccagccgggccctgagctccctcagggtgaccagggaggagctgtgactggctggggaggcagggctggggcc

SEQ ID NO: 916788 - DNA, 4001 bp, Homo sapiens
agaagagataaattggaggaagcaaatctggagtctaattagtttagccataaagggaaggagaaatattaaagaacgtgattatatccagttgaaggtttttcctccttcctcccctacagaaacaaattcctatttattgctgggtatctggcatatagtaagtgctaaataaacattagttgattcaacaaatggccaagttctctttgcatttcttgcttctgaaaatcagtttgaagctgccttatatcttttctggaaagcagtaataaatcgggttaaatcataatctccacaatatgtacaactatgcattgaatgagttattcctaaattaggcagacatgttcaacaataaagtgtatcagaaagtgaaggagctaagatatgaatagatagaacctatgaatcttcccaaggaaagcaacacagtacggcagaaagagcgctcgctggacttggagttggacaacgtaaattcaaatctcagctctatctctcagtggctgtgtggacttgggaccacattatcattctaaattttatcatttgtgaattggggaataccatcactctcctcccagggttgttgggaagattaaacgggaattcagccaccagtatgccatttctgccccgggtggaaaagattcaaaaataagacaccaattgtcagtaatacaaagtggatggatgcagtggtggacacaaagcaaacactgaaggggagacgatgtacgggggcaaaagaaagaaaaacattaacagctaggttgtgacttggtgttgggtgtgttttcacagaagggagtcgccagtcattcctataaagcagtcttctaaaccaaaggataaaggtgtggtaggctatcttttgaagtgagcatgtaaaattcctggaaggaaaagtaatgaagagctaacggttcttggaaagaggttctgagaagtgactgggatttataacaagatactcttttacgcagagttgtgaagtggaaagaactaaactggaataccagctccaagtatgaccttgggcaagttacttaaccaatctagagtctcaattgcaaaatgcagataatacctcacaggattgctgtaagattaaataagataatggataggaaagctgttaatgcgatacaaataacaggtatcattaggagttacattctccacccacttacaacattatatgtccatgaccttgggcgtgatttcagctctttgcacctcggtttcctcatctataaaatggggaggatgataccatctaccctataaacactctgaggatcaaaggagaccatagatgagacatcaatgccttgaaaaccgtacagtgctaaacgtatagaaactgccatcgttgctgatacatttgatgcatgtcaagggccgtgtttatgcagggaagcacgtatttttatgctatacaggtgaggaagcctctcatgcatttatgcatccaggagtggggcacggggcacagatgcacatctacggattccgggggtgtgacttgcacgcttgagaggaggaccggaggtcaagctgctgggccaggaatcagaggagtgggcgctacagtgggggtagtgggatgcaggatgcatggatggaaaaggctgggggcacaaacacgcatgcccaagccggaaacgttttcgggggagagcaatgcgcatccccggaatgaggggggtggggaaggatgcgatgtgcaagcacggagggcggcccgggggtgcgataccgcacgcccggggccaggactctttaccttgtcgctgtaatccctcaggacccgctcgatagcccctgcttcgccggcccggacgatgtagagggcgcgctcctcatccatggccgcaggtgcgggggagccgcggccgctctgcgcgcccaagccgctgcctccaggtaaacgcctcgcgcccccgctcgctccttcccagcttccttccttccctctttccctccctccgtcctgcctccaacccgccagcctccgcccgggccggcccgacgtcaccgcccctcaactttcaccccgcgacgtcaccgctcccccagcaaccggcgcctcacggccgcccctgacaaggcccaggactcggtcgaggcctggctagcggaccgaggcggagtcaggcccaaggccctgcttgctctcctgcctctccctccctcggagaactgtccagtcttttaagggggctttcacagactgaaccgttcttctttcctgaccctcctctatgaatcattctcaaaggactagagcaacccggctcttccccgcccatctatgaaccagccgctaaatggactgcaattccctgcatgcaatggggctatcccgctcttccatctaatttactggcgtgccgaatggcatgctgggattggtagtcatccagccggaaagaattcccgccaagggcatgctgggaactgtggtaccgcgagggccggaaacgggagtctggcggccgcctgaggccagcggcggggagaccgttagagggagggtctaagcgtctgcttcggttttgttcgttatgtcgctgactgtcctgcttcagtctcggctggctgggctggctggactggccgacggtcgcggaaactgccatcccttggtgggaactgtcaagcacggtttaattcccttttctcatttagcggtttcggtctcgggaattccttccacccttatttgcgttcttgttatgtactcagctacagtaatgtgggaaataattgaaggcagttatctggataaaagaggactcggcgattttctgccttaatactaatctctagcatgcatctcgtgccaccggggctccagactctcttaggtaatttccctatatcctctaattctcccaacacaaatttttgtggaaataaaaaggaacccgaatagtttcagtaatttatcctaagtcacacggccagagaatgggaaagtcgaggtttgaaaccaggcctttccccccgaagcggccgctctacgacctccgggaactgtaataataccgatacagtagcggtggtggtgatgacaaagattcccattgccccggtggtaattacgtgtcaggcactctgttaatacttcacctgtgttagctcaatcaatttcatacacattcattcaacaaatatttgagagcctgtgctgtgcccaggtgctgttaaatgcagtgtggatacagtgggcccaaagtaaagtccctgccttcatggagcttccattctagtgagcacccatatgagttattctcattttaagatgaggaaactgagtcttggagaggttagttggttaatttatcaaaattgcagatttttggaaactgaatttgaactcagagcctgtgctctttctgctctcccaagcttttttttgatggaaagtggatgaattctccaagtaatttcaagttttccattccaagcagcctttacccataatcatccttgatgtctcccctaccagtctctccctcttgagctgtgctgaagaggaactagagggggcaaaagtttatttatctaatgattgaatttcttctatgctgtggtagatattctgctagatactgggaattcggaaataagaacgaacatgggacctgagtttatggagcttttggtctttctgtatattatactttccatgcagcaaacatttattgagcatatttgagtcaggcattggggtaggtgctctgtaataaattaagtcagaaagattttaatccatctctccaaaaagcacattttagtaaggtcatggaatagttagctaattttctaagctaatagtaacatcttgcaattgtttttaacagtttacagaactttttaatacttctaatctcaatggatcattggggaaggtattgttcccactttatagataagaaaacagggtcagatgagttaagtaacaagaactgggacaaaaactgagagct

SEQ ID NO: 916789 - DNA, 4001 bp, Homo sapiens
ttctaatgggggtactattactatcccattttagaactgaggaaactgaagcacagagatgctgggtgatttgcccaagatcacacagcctgcaagtggtagggtttgaaaccaggctgtctagctccaaagtcctagcttctaggagtcttgaaattaattacaggtcaaagcattttcaggctcccagagtgacctcggaaatgctgctcaactcttgggagcctgagtttccttcctgcccctagggcatagggacccatgaggacgagcacagtcaaacatggcaatggtgctgttacctacctgtgggtctgccctcaggtaaagggttcagacccagctttggctattttactccaaaacacagagatccatcaaagtacacaataagggatggcctgcccctgaggttcagagaggccatctgtatttcctgaggctgaacagcaagctggagactgctcaggcaccctgatccctcaaggaaaggtgtttcctcccattctcagtctgaaggggctgccaagagcatccctggctgaggttagggcaggaaaccacatgtctttcacttccttttctccagaaacctcgtctgaactccaggcccagtggggaggccctgattcagagagactcctgatcacagggcagaggcttagccttaaagccaccccaaatcatccctttcccccaattcaaacagggtggggaggagacacgggggctgggactctctcaccactaatttgggacaaattgctcctcccactgtgaccctcggtttctttatctgtaaaatgaagatagtctctatagagtcctgtgaggattaaggataaaatcagaggagagaacacgggctaccacaggttcataagctaggggagtcccgggaagaaagttgcaaatatgaacccgaagactaggggtcacgaagctcagtggctggaggtcacattccctttgctctggggagactgggggggggggggatgaagaaagggtcctgggcctgatgtcacatcttcttggtaactcgggaggccaagaggcttatttcatgtctggaagagaataatatgtctaagcacttagcttatatggtcccatttaattcttctaaggtgggtcctattatgattaccatttgacaggtgaggaaataaagcacagagaggttaagtaacttacctaaagtcacacagctattaaacggtaaaggtgggattggaactccagagaacagctcttaatctctcgggtggtatctgccagccacccctggtcgggcaaaagaaggccagggcctccctccctccccacgtcgggtctcctctggtccggtccctgaacacacacacgtgcgcacccacagctgcccaatgcggaagagcccttgggtccccgcggtcccactgcccggacggacagaccgaggccgccgcccaccttctggtgcttgcgctccttctcgatgcggtccatcctctccaggcgcaggcggtccagctccaggcgcagctcgtccagctcgggcgcgacgtggtggcggctgaccagcacctccaggatctccaggacgcgcacgaccttgggcatgaggcgcgcgatggcctcgcagccgtgctggtcaatgacccgctcgaactcgtggcccacaagcgacgcgatgtcgtacacgtccatgacggtcagctcggccacgttcttctccagcgccgactcggccgccagcgccgacccccgctcctcctccatggccaccctcctggcctgtcccccgccccgcaaactcgtgcaactcccaaacttgccgctgtcgagggccgggccggccgggcccagcctgggccgcgggcgggcgcgctcagcgggcgctggggcgagggcgcagcgggcagcgggcggcgggcgcgggcgcgggcacgggcggcggcgcggggtgtgcgggcccggggtctgggcgcccggctcggcccggagctgctcccgagtgggcggcggcggcggcggcggcggcggcggcagcggggagggcgcgcgcgtgcgcaggcccgcggcgcctcccaagttgggatccgagttgcgctcaatggagccgggccgggcgcctcggggcggtgcgggcctgaggggcggcagagcgcggggccggagaggaagggcggcccgcggctcctccgggaaactttggcggcggcggctgcgaggccgggtgatcgcttccccacagggaggccgcgcgccccgccccaatcccggcctggccaggggcgcgcccgctttccgccgcccgggggcgccccggggtacccccccaagcgccgactccgcggcctgcactccgggcccccctctccagccgccggacccgcggcgcccctcacccgtgccccggccgcccctcccccgcccggcgctgactcctcccaccacccggccgccgggaggggtccaggccgccccgggagagggggccgggggcgctggtctcgcgggacgattcgctgctccgggtagcggccccggccttggagagggatggaggggtcacgaggaggtccccgggctggggctcatcccaggaagagaacggggaccccccccggcccgcagacactccgcgcagacccggccaccaggcggacttgcagaggcgcccggagaggggccgacgtgtcgaggaatgctggatccccggagccccagggcgcgcctccccgagccacatccatcactggctccttgtgacatgaacgccacttcacagtagagcgaagcccgcttggcattccagcaccacgagttctcttgtcccaaggccccctgtccatttgggctggccaaatccacttgtccatcagaccccctcccactcccgggagaacgtttcctgaacccagaaccccatccaccctccccgccccccacgcaggagttaaggacccccttgcaaactcacagtcccctgcttgccccatcaggattgctcttagcatcctgagttttcaccgtgtggttgcaggtaggtttccaccgtcagatcttggctccttgagggaagaaatcttaatgcccttgtagccataaagcgcaccccaacgtggcacgtattgattaaaaatctaaaagttggccgggcgcggtggctcacgcctgtaatcccagcactttgggagactgaggtggacgaggtcaggagttcaagaccagcctagccaaggtggtgaaaccccgtctctactaaaaatacaaaaattagccgggcatggtggcgcatgcctgtaatcccagctactcaggaggctgaggcagagagttgcttaaacccgggaggcggaggttgcagcaagccgaaatcgcgccactgcactgcaggctgggtgacagagcaagactccatctcaaaataataatataatacaataaataaataaataaatagtaaaaaaaaaaaaattaaggccaggcggggtggctcacgcctgtaatcccagcactttgggaggccgaggtgggaaaatttctagagctcaggagttcgagaccagcctggccaacatggtgaaaccacgcctctactaaaaatacaaaaattagccagacatggtggcatgtgcctgtaatcccagctactcaagaggctgaggcgcgagaatcatttgagcctgggaggcagaggttgcagtgagccaagatcgtgccactgcactccagcttgggcaacaagagcgaaactccgtctcaaaaaaaaaaaagaaaaaaaaaaaagtaaaataaaaaaattagccagacgtggtggtgagagcctgtagtcccaggtatttgggaggctgaggtgggaagatcccttgagcctgggaggcagaggttgcagtgagttgagatcacaccactatgctccaaactgggcgacagagcgaaactctgtctcagaaaaataaaaaataaaaataaatactcctggccacagtggctcatgcttgtaatcctag

SEQ ID NO: 916790 - DNA, 4001 bp, Homo sapiens
acccagccagatgatttttaacatatgtgtagatccctatatccataccctgattaagatatgggacacttctagctctctatcaatttcccttcttttccccccaccaccagtttgccttctataactataaattattttgcctgttcatgaattttatttaaatgtacagtagggctgggtgctgtggctcaggcctgtaatcccagcactttggaaggctgaggtgggtgggtcacttgaggccaggagtttgagaccagcctggccaacatggtgaaaccccgtctctaccaaaaaagaaaaaaaaaaaatagccacgcgtggtggcacacgcttgcaatcccagctgctcaggaggctgaggcaggagaatcgcttgaatccaggaggtggaggttgcagtgagtcgaggtcacgccactgcactacagtctgagcaacagagcaagattctgactcaaaaaaaaaaaaaatctacagtagtttctctttagtgcctggcttctttctctcaatgttacatctgtgagattcattcacactgctgtgtgtatcagcaccccgttctttttctctgttgcatagtattccatatatcacaatttcaaaactcaattgggttgcatttagagtgtttccagtttggcagctgagactaaagctgctctgaatcttcttgtctatgtctttttgtggtcatatgcactaatttctctttaggtaaaatgtgtttcttgtccaagtgtggtggctcacatccacaagcccagcactttgggaggccaaggtgggaggattccttgagcttaggagtttgagaccagcctgggtaacggtgagacccccatctctacaaaacatcaaaaaagttagccaggcatggtggcacatgcctgtactcccagctacttggaagggcaaggcaggagaattgcttgagcctaggaggccaaggctgtagtgagccgtgtttgcaccactgcactctagcctgggagatagagcaggaccctgtgtcaaaagaaaaaaaaagtgtttcttgctctaggtcaaaggttctcaaactgtggaccctgggccaatagcatcagcattaactgcgaactcgttagaaatacagattctggccaggcagggtggctcacacctgtaaacccagcactctaggaggctgaggctgggggatcacttggagccaggagtttgagaccagcctgggcaacacagcgagatcccatctcttaaaaaaagaaaaaagagaaaagagaagagaaaagaaaaggaaggcgtctccctgccagtaggtgccctcctacgccccgcaggcgccgtgggcccggaaccctcgctcccacactcacctccccgctggccggagggctctgtctccgcagcccctccacctccttcctgaggtggtccctctccatcttcagctcctccagcgccaggctgccctcattcaccagcgcctccagcatctccaggacgcggacgactttgaactgcagctgcgtcacccgggggtcgctgcccagggccataagctcgcggcccaacaggtaggagatgtcatacacgtcctcggcggtcagctggaaggggctcttgcccagcgccccctcgggcccaacctcgtccctctcctcgtcctcctctccctcctcctcttcctcttctcgcacagggggctcctccatggccacccagacccccgccgacctcggagctgctgtcttggagtctcccaaaggttagacttcctcccggcacccaaaactttccgctgggcagagtccctacctgcccaatcagcgcggcccgggggtgggcccggggggatggtgcaaggggccgcgcacgcgactcttgggcctgcgccccggcgcaccgtccccgctgccagccacgctggagagtgcgctccaggatgtggtttggggcgcgaagggacaacggaaaaggaggcagccgagaagaggaacggggaagttcaggggtgacggcaatcgccccagcctgggaacagttgcagccccggggaggagccgccctgagccccgcccctggcgaccgctgccaggaggtgcgtttccgtggagacggagtttccaccgtgcaatccagagcggggtaaaaagaacgcaactttttcctttccaccctcgtgctttccagccgtagaatttgcatcgtaggtgatggaagatccgggtgtctctttgagggtgttttctggagcctgcggccaaacagaaagcagctgctgggggcagcgcgacagagtccccgaggcttgaggatctggaaaactcccaggcaaattgtcactagggcctggggcgtccgacttcgctgtgactctcaataaaatggagaatgtctgccctgctcacttcgctgggtcctcggctcctccacgtaaccagcgctgtcaccttggcaagttacttaacgtctccgagcctcagtctcctcctctgtaaaatggggacaatagcgggacccaggtggcagggttgctgcgaggaacatgagcttatgagatcatgtgtgcgacacctcaagcacttaggaagcactcacatacgtgactgcaatccttcattctttctttctttctttctttctttttttttttgagacggagtctccctgtgtcgcccaggctggagtgcagtggcgcgatctcggcttgctgcaagctccgcctcccaggttcacgccattctcctgcctcagcctcccgagtagctgggactacaggcacgcgccaccacgcccggctaatttttttgtatttttagtagagacggggtttcaccatgttcgccaggatggtctcgatctcctgacctcgtgatccacctgcctcggcctcccaaagtgctgggattacaggcgtgagccaccgcgcccggccccttcattctttcttccacagcgctagggaggaattgctggtgttggagacaccttgctacttgggtgagagaaggaggagtaattaacaagagagaaacccctgtctgaaaatcacaaagcattcgacacatatgcggaatccatattactgagaatattagcagagtggcgtagaaacttgagtcattcgctgtggctcatgccttaatctcaacacttcaggaggctgacgcaggaggattgcttgagcccaggaatttgagactagcttgggcatcatagtgagaccctgtctctacaaaaagtaaacaaaagtagctggacacagtggttcatgcctgtagtggcaggtactcgggaggctgaggtgggaggaccacttgagcccgggatgttgaggctgcagtgagccaagatctcaccacagagtggtgcctgtgacagagtgggaccatggtgacagagtaagatcatgtctcaaaaaaaaaggcacaacaaatctcaagttattttaggtttcactggaggtttgtgatagtctcaggcagaaagctcagcaacggggcttgtctttcccaggaatgtattggcagctttccttgtgataggtgtatccattttctccacactgaggtactagaatctcaatggagaatgtacatagattaaaccaaccaacaaaagcaaagcaaattaacaaaacacactattttcagagggtcgtttctttttattttattttattttattttatttatttgtttatttatttatttagagacagaatcttgctctgttgcccaggctggagctcagtggcatgatctcggctcaccgcaacctccgcctccctggttaaagcaattcttctacctcagcctccccagtagctgggaccacaggcgcatgccgccccgcctggctaattttttgtattttagtagagatggggtttcactgtgctgcccaggctggtcgcgaactcctgagctcgggcaatcctcccacctgggcctcccaaagtgctaggattacgggcgtaagccaccctgcctggcctattttacttttat

SEQ ID NO: 916791 - DNA, 4001 bp, Homo sapiens
ttttgtatttttagtagagatggggttttgccatgttagccaggctggtctccaacttctgacctcaggtgatccactcacctcagcctctcaaagggctgggattacaggtgtgagccaccacacgtgactgccttttcaattcttataccaggattgggattgctagatcatatgcaattttatttttaattttttgagcaaattccatactgttttctatagtggttgcaccattttacattcccagcaacaatgtgcaggattccagtttccctacatcctcatcaacacttgtaatttcctaaaaaacatacctttaaaaaatggccagacaggaaggcaagaaaataagtgtcaaatcaagacaactctaatttttatatttaatcactagagctcagttattccttgaaatatgcatgggcaaagctgcaaaattaacagcttaaaacaacccatcattcaatagatgttgactgagcacccgctatgcatcctttgaaggtacaggagagacagtcatggatgtaacagcaaagctctctgcaatcccaagcccacattctcgtaggagacagacaaacacataagtgaagacccgtgatagactaagatagcaagaaaagatacaaagaacatgaaaacaggtgttgtcacatagagaaaaaagggatggagggagggctgttagagtggacgttagagccacgaatccttaccaggagggacgcgtaacctgagggttgaaaggcaagaagctcccagctgttgaagatgatggagtggagtgttctaagcagagacaaccatcaaatgctgagacaagcttagggatccaaggaacaaaagtaagtcagaggtggacgagaggtagcaagatggacaggatggcagccacagggagaagcctcagttttatttatggaaggcattggaagggtcagaggattgcatgatccagagggcatcacaagatcactccagttgccatagggaaaagaccacaggatgacaagggagctagacaggccagttaggaaatggctttggcatctgggaaagagaagatgaccacagtggagaggagggggaggagagctggggcacgtctggtgctgagatgagtggttggtgcgctccatggtttgaatgcatcccccaaattccatgtgtgggaaacttaatcctcaacagggcagtactgagaggtggggcctttaagaggtgactgaatcatgagcactctgccctcatgaatggataggtccattcatggattaatggatcaatgtgttaatggaccagtgggttatcaggggagtggaactgctggcttaataagaagaggaagagagccctgagctggtatgtgagcacactcagtccccttgccgcggggcaccctataccaccttgggaccctacagagtcctcatcagcaagaaggtcctcaccagatgcagcccctcaaccttagattctcagcctccatagcttaagaaatagattccttttctttataaagtaccaagtttcaggtattctgttataagcaacagaaaacagacttgagcagggagttagattcggatgaagaaagagcagcgcccaggaggccccatcatggaggctcaggcaaccaggagtggccacaccattcactggggagaaagtggtttgggagagtgggcaccaatgggtttgttctgccttgctgttaaagatacaggtgcctaatagacttccaagcagagataaccagcagatagtggatgagacatcactgggtgcctcacgtgctggtcatgtgaagaagtgagagagacctggctcagcctctcaggccaccttcacactgatgttcagtgattcttccctgccccttcccagttgttcctccctggcccagcccgctccctccagggccccagatggtctgtggacagtggtatcagctaccttgtcatgctgccgggcccttgtgggaaggcctgcatgatgggatctcaggagatactctccctgggtggcatccttcagttcattttcctaggacaaaaggaaaggacatgtgagatggtgcccccatgtttagagacttggtagagtgcagtggttaggagctccaatgtggtaatgagacccaaggttgggcactgattctgcaatccataagctgtgtatgagttgggactgatttctctcttttttccaaaccataagtttccaaatctacaaaaggcaatcatgttatattatacgatgattagaatataatacaataatacatattaatcacttagtgtctgtgtcctaaaaaagcaacggaacttctcgccaattggagttgttaataagctttgacccatcctttttcccgtgaacactgctccaaacatacagccacaataaacaatagacagagaaagtttagaaatatttagccactcaaaaataagataaagcattctaaggactaaatggctagaccacaatgtggtgagcggaacttctggaaccttctagattcagagtccaaaaataggcagggagaattaagagtccagctttttcaagatatccaagattcaatgtattccacataagacaagagacatgaactaaggtcaccacatgacctgaggcaacagttaagcccccaaagaaagctgaaaataatccatcacctccacctagagccagagcttttatggggtcatgcacctagagaggcaagagggagaaaactcatttttaggctcagttttaggacttgtcttactctctactatcaccatggcacaggaactcggagctgccaataataaaatctaattcaagactgagatcacctagggtgtggtacagtaactacaaataagtaagacagggagagtgagcacagagatgggattaagaatctctcattcaagatgagtctgaaaagagaaattccagaacacataaagagaactaaccctactaaagagatctcataaacttaataatcaggataaatttactccagaggaaataaaaataataaagcaacctgaaaaggacttcaataagtttagaatcctaaaagaaggaatggcatccattccaaaaggaagagaagcagaagggataatcaatgactcacagtggaaggcagctggaaccacaccagctaccagctgtcaggctgagaacttctctttttcccaattgttcaagtttgttctctgttcacaccctaaataaattaatactggtgggacacccacatcttgaattgatctggttcatctctgttacaatatttcgagtgctcagagtctaggctccattcacacatcagaaaagcagcaagaaatcacgtggtttcaacacttcccactaggagagaggctcctcctggccattttcagcttccatttttcagtcaaccttccttttttcttagccacagtcataatgagctccgctactctgtggtagctacattttcacagcaataaaacacagcgaaggaacccaaacataaaagacggtggtgctttgttccgggaaacaatgattacccaaccttagggaaagtgattgataatggagcaattcccttctgtcttctgagatggtctggatggcataacatttattgttgcctttctcaagtaaagcagatcataatgtagtcccacactggttgcttgagagaactgcagcctcttcagcatgtcccacatgggggaatccctggaggtcttaaggggatgggatgggtgtactaatcaaaatacctggctgctgacctcagagaccaacatgccccaaggtaaactaaggcagcaatagctcagagaatttgagaacaagagacatttgaaataggggttagattatgggttctgaggtcaaattgcctaaatacaaatgggagctctccttaaatgtgaccttggacaagctgcctggcctctctgcactctctgtgacttaaggaggtaaaagct

SEQ ID NO: 916792 - DNA, 4001 bp, Homo sapiens
aaaagtggctcttgaccgagtggaggattgtctgtgactgaatttgctgttccccttcttggctctgttctcagaatcacagactgcccccctccctgacaagcagactccagcacctggtaggggtaagagaagacaagagagaaaaaagggagacagagaaagataaaaaacatcaacagccatgttgccaaactaacaactaaatcaatgacatgaaagaaggaaattaacagcactaaccaagatagaaaagaataaaataggattacctcaagacaaaataggcctcctcccctttgacacactaaccaaataaaacagtaaccattggaaaagaaatttaactatgattatttttaaaattagagggttgcatactaaaatttaggaaataaatgttaaatctctgagaccggaatttcagagagtgttttattccaaatgaatatcttaaaagtattctcataattgcttttaagaaatcattttttaaaatagaagaaatgacctttaaggtacccaatattgtgaaagtaacaaaaatgagatttaaaaacatttcaatttaaatggttatagttaataattaagaacacccataaatataatgaacataccaagcccacaaaaaaaaatctgcatagtaggctgcccatatactttctatacctatttagagttgaacctaactccacaaagatgtggtaacaatatatataactaatgggaaaatgacagcatactgaaagaatttacatagcagttgcattgagcatggttagtgcaataacccctcacagaacagaattaccaccccatcgctattcgccaatacaaatgggataaaacagtgaaataacaaatgtgtgatcagagataaggacatattaataaggggagattgaaattattaccactctggtttgggttttttttgggggggggtgaggggcaagtagtgtaatatttacatcatgctcaaatttttaaagaatcaaaactggacaagcaattatttggtcatccccttctcattcagagactgtcaaaggaaaagatggaatgactgtcacactctctaaaatttacacgtaaggaggaaaacgtggaatcgaatacagtagctgcgggaccgcaccacgtgatcctcctcccgcggtcgctccatagaatttgtgggaaggggggggagggggagtgtcgccgcaatcccgaggacaggtcagcagcccgcgggtccgactccagccggcgttcccggggttaccacaccccctcgccggcggggaaaccatactccttacacgcccgaagtcgccgccccctcgacacggctcgcccggtcgcacgcacacgccacgggccggcgcctcccggcacacgcgcgaaggccgggccccgcctcgctccccaccgactccgcggagcggcgaccaccggcctcaactagccccggaccccgggcgcgctcgggccggtcccctccccggcccagcccccgctaatcgggggatccattccgctgaactcgcccactcgggagggcgcgccttcgcctcactgctctacacccgagggcaacagcggtcgtaccgctcacctgggtcggggggctcctccctcgctctcggccgactgagccgggctggggccttcgaggaagcgcgggccgccgggcggctggaagtgggggaaggagaggagggggagggggtcgggataccgggagccgcctcctttctcctccgccgactgcggctcccgcaggctggccgggcgtcctcgcacactcgcccagtttctcacagcctcgcgtcccgtcagcttctccctcaccccactcccacacactctcactcccacacactcacacccggccgctcctcgttccctcactcgcctgccgcgcgcgcgcgcgaccccgctcacacacagcgcgcgcgacgccggcggagaccgccccgctccctcagaccgaacgccgcccgcccgcttgctgaggagcggcgcgcgccccggccccgccctcctggcgccgcggcgcggcgggcggggggcggcggccggaggagctgggggccgggccagcgcgccgagcactgccgagcggatctgacacctgcgtcgagagccgccctcccagctcctcgcccgcacccgagccatcgctggcctcgggggaagagaggcgatggatcgcgcgcggggagcgaaaagggagcgcgagggcgctccgaggacgcgcctccccacccgcccccaaaccgtcttcactgagaaagggaaacggatggggggggtggggggcgaggtttgctcccaactcgaaaccgcgagattagtcccttccgttgtacgccctccccgccctcacattccctgcttaggccccatcaatctgcgcctggaaccccgacacgagccccctaccccctcgggcgcagggtcctgccggcatcccgacgcctcccgcccagcccttccgccggccgccgcccggagtctccgcttacggtggttcctccctccggtaggcaaagatatggagacaaagatcattcatacctagaaggtctttatccgggactggagtaaagacagtacctctgtatattgagaggcaaatttaaaaccacatgataaatttcctggctgaagcgggtttggagatacaggcggggtggatagcgccagctctgccccctagaaaccggcgtaaaccttggacaagttagttgctacgcttcctctgagcctttgttgtgaaaagataaaagagtacagtccggagtcgttgtgagaatgaaatgagatattttaagagcattttgtaaattctaaaactatgtataaaaaataaaagtatagcccaaaggaggctaagaatatgaatgttcaactacgctattacattttcttaaggagaaaaaaaaagggctacagacgacctcccaggtttacatggaagattcacttccaaataacttcagtcaccagagacaccaggtgtgaggtacggtaatgtgctcaccagtttgccttcttgctggtctcagccctgtctcagtgacctcagccaacaacttttcactgctcctctcccagtcaattgacaatataatttcattttctgcttttaaaaaattttttgactaatttccttcagcgtctcgagagtcctttaaaagatgtagcataacccagggtggtaacttctggatccagactgcccggattggatttatggttccactccctatgtgaacctctgcagtaacttaacctctctgtatctttatctgctgagctgtaaaagtgaggataaaaatagtcacctacttcatggagttgtcataaggagtaaatgagttaataagtatataatatttaacagctgacacagatcaagtgctgttcaaagtgtttagtgctattataatgttaggtcagtgagagtaacctaggataggcgtctagttggtttacaaaatttagaggaacaaacgccctataagatagatacactatcttgagaacaaaggggataaggtctacagaactaaattgttgctatttacttccactctgatattcagccccctgggacataaagtatattcaactccaagaccaagagaagcattttgtgatcaagggaagcttgagcacagagatactaacactgaaaatctgacaaaataaacacagtgaaattgacacagggaaaaaaatgtacagaggatcaataataatatttaattaacctattccttcagtcccactcttaaggaatccaattcgtggtaactgcatccccagaaaaagtgggttgtactggtgaaactgaggataggaagtatgactattaactcacttgccacttgcccttaaaagttgttattcagggcagggcgcggtggctcacgcctgtaatcccagcactttgggaggctgaggcaggcgaatcacctgaggtcgggagttttggaccagcctga

SEQ ID NO: 916793 - DNA, 4001 bp, Homo sapiens
tgatccgcctgcctcagcctcccaaagtgctgggattacaggtgtgagccaccgcacctggcccctgtaaaatctaaatgtagctatccaaaattcctaattaatgttttcgggttctcttaaaaaaaaaaaaaaaaagagatcaggcctgtgcttacttcccataacggtcatataactgatccagaaatgattagctttgttaacaaagttagaaaaaaaacaaaaacataatttcagaaagaagaaaaaagatataaacagatgggttccatgcagaccagcctctaggggagtagagctggctagctctgtggcttttgtcctccaagccaattttgagaggggaaaaaaaaaacactgaaaaagaaaacattaaaaataacaccatggcattagttaccatgaagccagaaagtcagtacttttctacaaacctaacatgtacacagatacatatggcatataaatctaaaatgtattacgtagatacttttggaggtactatcttatttaacaatccctcatatgacaagcagaaaattccgagacaattaagagacaatttccaacatctgtacgtaatctccctactcaacctcttgaaacaactgcacatatcagcacagctaacatttaaaaataatacttttttcactatcgcagtctcctcctccctcagattctaataacgtattacagtttcttttttctttttttttgagacagtcttgctctgttgcccaagctggagtgcagtgataaaatttcggctcaccgcaacctccacctcccaggttcaagcgattcttgtgcctcagcctcctgagtagctgtgactacaggtgtgcgtcaccatgcccagctactttttatatttttcacagagacagggtttcgccatgttggccaggctggtttcaaactcctgacctcaagtgatcagcttgcctcatcctcccaaagtgctgggattacaggtgtgagccactgcgccaggccacataattacaatttctagaggctcttttctcatttgcttgtgacttaatcccacttgcagaatactctttgtaaactaatctgccataaaacaaagtctttctatgaatgtatatcactgaagcgcccccaaaacagttgtcagcaagcaacatacaataaaactcaccctccttactttatgtttggttctctctcttcacatgttgttcgtgggtatagaagttcttcctccacccattttcactcagtttatgtctctatgcctgctccccagaggaagatgataaaagctactcctgcttcccaaagtgtggaacaactggctctgctctgtcccctttccccatcccctactagtgttcatggttggtcagtctttcagctcatagagaggggagctttgagaaataaatctagtgacttaccccagcagcaaatcctaggtggatacaaattgtgaaaagggtaattgggagatattttaaaagagatgtttctccatgtgccacaacaaaccaatgcctgaagctgggttcgtgttcactggtcaaataatgtccactttagtgtgtttcttcacagtatgactgagaaggggtggaagatttagaagagtttactggtaatttccctctggagaggaaaaggggcctgaatgacaagggaaaaaagaaggggctaatttattgtcactctccctgctactcctagatactactactgacaaaagtatattaaacagggattctaagaaaacatgggcaaaataagaaagctatccactagaaactaagataagtagaattttagctggtagccaaccggctaaagattaaacgctcagttccttaccccctgcgggggggcaaggcaggaagagaaaagtggctcttgaccgagtggaggattgtctgtgactgaatttgctgttccccttcttggctctgttctcagaatcacagactgcccccctccctgacaagcagactccagcacctggtaggggtaagagaagacaagagagaaaaaagggagacagagaaagataaaaaacatcaacagccatgttgccaaactaacaactaaatcaatgacatgaaagaaggaaattaacagcactaaccaagatagaaaagaataaaataggattacctcaagacaaaataggcctcctcccctttgacacactaaccaaataaaacagtaaccattggaaaagaaatttaactatgattatttttaaaattagagggttgcatactaaaatttaggaaataaatgttaaatctctgagaccggaatttcagagagtgttttattccaaatgaatatcttaaaagtattctcataattgcttttaagaaatcattttttaaaatagaagaaatgacctttaaggtacccaatattgtgaaagtaacaaaaatgagatttaaaaacatttcaatttaaatggttatagttaataattaagaacacccataaatataatgaacataccaagcccacaaaaaaaaatctgcatagtaggctgcccatatactttctatacctatttagagttgaacctaactccacaaagatgtggtaacaatatatataactaatgggaaaatgacagcatactgaaagaatttacatagcagttgcattgagcatggttagtgcaataacccctcacagaacagaattaccaccccatcgctattcgccaatacaaatgggataaaacagtgaaataacaaatgtgtgatcagagataaggacatattaataaggggagattgaaattattaccactctggtttgggttttttttgggggggggtgaggggcaagtagtgtaatatttacatcatgctcaaatttttaaagaatcaaaactggacaagcaattatttggtcatccccttctcattcagagactgtcaaaggaaaagatggaatgactgtcacactctctaaaatttacacgtaaggaggaaaacgtggaatcgaatacagtagctgcgggaccgcaccacgtgatcctcctcccgcggtcgctccatagaatttgtgggaaggggggggagggggagtgtcgccgcaatcccgaggacaggtcagcagcccgcgggtccgactccagccggcgttcccggggttaccacaccccctcgccggcggggaaaccatactccttacacgcccgaagtcgccgccccctcgacacggctcgcccggtcgcacgcacacgccacgggccggcgcctcccggcacacgcgcgaaggccgggccccgcctcgctccccaccgactccgcggagcggcgaccaccggcctcaactagccccggaccccgggcgcgctcgggccggtcccctccccggcccagcccccgctaatcgggggatccattccgctgaactcgcccactcgggagggcgcgccttcgcctcactgctctacacccgagggcaacagcggtcgtaccgctcacctgggtcggggggctcctccctcgctctcggccgactgagccgggctggggccttcgaggaagcgcgggccgccgggcggctggaagtgggggaaggagaggagggggagggggtcgggataccgggagccgcctcctttctcctccgccgactgcggctcccgcaggctggccgggcgtcctcgcacactcgcccagtttctcacagcctcgcgtcccgtcagcttctccctcaccccactcccacacactctcactcccacacactcacacccggccgctcctcgttccctcactcgcctgccgcgcgcgcgcgcgaccccgctcacacacagcgcgcgcgacgccggcggagaccgccccgctccctcagaccgaacgccgcccgcccgcttgctgaggagcggcgcgcgccccggccccgccctcctggcgccgcggcgcggcgggcggggggcggcggccggaggagctgggggccgggccagcgcgccgagcactgccgagcggatc

SEQ ID NO: 916794 - DNA, 4001 bp, Homo sapiens
aacctccaaacgttctgggattacaggcatgagctaccccatgtggccaaaacccattttcaaaatgacttcagaaacaccacatctatgtcatttcaaggatcgaacacattaatattaataagcttatgcaaatttctctgtgatcttatgcctcagctgactcctctgggcctcagatgcccagtttgtgacatttggggatagggagttcaccatcacaaccatcaacactaccatttattgacagctttctaagtattaggttactgtgcgaagcactgcagacccctctctcatttaatccatcaacaatccccctaggtaggaataattggtcctattttccacatgagtaaactggctcagagaggtcaagatgcttgcccaaggtcacagagcaggtgaacaccagagctgtaactggaatccaggtggctgcactgagtacaggatttgcatctccctaccccattacctgtatttgttcttcttccttggtgtgagggtgggggtgctgccccttgagggggtggtctcacagctcccctttgcccccaaggccttcgatgcctccttgcccacgcctctggttctgttagccttctccacccagggcggatcgaagtccggtggggtaggccgggtgcctgctgggctgccaaacagagtctcatccacatatgacgtcctggccttgacccggtagccacctcggcagcggtgctgaaggccgagggtctgcatcccactgacggccagctccacgggggtcttcatgctgcctgtggtccctggtgacagcaggtgtgctctgccggccaggccctgcttccgaggctccctgtgagaggaggtcagagtagcacccctgagccacagaagtgctaatggaggaagaccggtagtgtctgaagttctcatcccaagggtttagttctctctcaaccagtctctcaaaggggagctgtcaacttcagggggcattttggaaatttctttggcttttttttagttgtcataatggtggtgaaaggggggctactggcaattatttacagaatgactctggcggtgaaggagagatgacacctgtgtctatttaggcaccaaccagaaaacacactatggtggtaggggagacaggcactttcctatgtgtactgatgggggtgggggcaatgacagccagcgtggatcccatgcctacctcctgcaaagagctttacaagcattgtttcatttaatcctctcaacagcactgtgaagtagcttcgaatttgtccattttacggatcacaaaactgaggtgaagtcacatgtgtaggtcacacctataaagctaaaacggtggaagtgaaatctgagtccagagcttgtgtacttggctacactgctatcgggagatcaccgccgcccccaccgccccacattctgcgactcccaaatcaatgacccgattaaaaagtgcccgaggtccctgcatttttgggttgttctcctacctgagcatcttggctcgtaggcatcgggatcctcagggacccgtccccgcaccttcttcccaccaggtctggacccgtcggtgagggcgcgggggcgcgcggtgcatccgggatccccgtcaatctgcagcccggaatgcctggggccccggacccccggcagcctaggccgtcccggggcaccgcgcgcggacggactcacccgaggagccggcacaggctacgtgtgaacggcccgcgaatccagaaacccagaacccagcactttgcacccagcaaccagggagcagccagcagcactgcggacgcggcccggaccattcgcgcccgcggatggggggagtccgcccaggggcgggcgccacgctcctgaggcccaggaggtccctaaacatggagagggtcctctggtgccactcactcaggtgcgtgtgtactaggccgccgagggccgcaggcactggcgaaagctcagcggaggtcacgtggtcaccgcacctcccccccccccacgcagttggtgcgctcctcaggccacgcccccttctgcgttcccagcgcgcggcccgaatggcggccgacaagggcccggcggctggacctcggtcgcgagctgccatggcccagtggaggaagaagaaagggctccggaagcgccgaggcgcggcctcccaggcccgcggcagcgactcggaggacggcgagtttgagatccaggcggaagatgacgcccgggcccggaaggtaggcgcgtggggctgggacgcatgttcgggcccgagacccggctccgggcagcgcctcgaggcctcagtttccccagctggggattgggctccgcagagtgtggggagggaggctgccgacccgaggaccggtcttgggaccgccggcctgagcacgtgtctcggggcttgtcaggctcagggttccgcggccagagccttgggatcccggggctggagcctgcgggccttcctgccgggttttggtcgcgcgtctctcattggctgcctcctgctcgtggggcggatcctggctccctttcgcccaatgaaaagtgcgggtgcagaagatctgactttgagagtttggagcgttcttgggaggttgaattaaggggaggccagactgcgtggcttgagacagtgtgacgcctccaaacctctgggaaacgaattaaaacaattttttttgagacagagtcttgctctgttgctcatgccggagtgcagttgtgtagccacgccttgctacagcctccgcctcctgggctcaagcgatcctcccacgtcagcctctccggtagctgagaccacagacatgcgccaccacgcccggataatttttaaattttttgtagagacgggggtctccctatgttgcccaggatggtctcgaacttctggcctcaagcagtcctcccacttctgcttcccaaagtgttgggattaacaggcgtgagcccggccagtttgtgtttgttgaccgtttactatgtgccaggctccatgctaagagctgtacgagccttattatttaatcctcacaccaacgttgtgctaacaccaccagcaactgtcatcttcatttttctacaggaggaaactgaggcctagagggttaagaaatagtcaaaggcctggtgtagtggctacacgcctgtaaacccagcacttagggaggctgaggtgggaggattgcttgaggtcaggagttcaagatcagcctgggcaacataggcagaccccgtctctacaaaaaattaaaaaattaggatggccgcggtggctcacgcctgtaatcccagcactttaggaggctgaggcaggcggatcacctgaggtcgggagttcaagaccagcctggccaacatggtgaaaccctgtctctactaaaaatacaaaaatagccaggtgtggtggcatgtgcctgtaatcccagctactcgggaggctgaggcaggagaatcgcttgaaactgggagtcagaggttgcagtgagccgatattgcaccactgcactccagcctgggtgacagagcaagactctgtctcaaaaaataaaaattagcctggcttggtggcgcccacctgtggtcccacctcctggagaggcaatgtgggaggatcacttaaacctgggcggcggagagtacagtgagctgtggctacacaactgcactccatcataagcaacagagcaagactctgtctccaaaaaaagaaaaaaaaaaaaaagggagatcccatctttacaaaaaaagagagaaagcagcttgaccaagacctcacagcttgtgagtacaagagccaggagattcaaacttgagactgtctgattccaaggcctgtgccgtttccattactgaatgtcatgtgtatgcacatgaagggatgggtgtgagcaccaatggggcagaagggctgcgcccattatttcccacagtcctgttcccagcgggtgcctggcaccaggtaggctcagggcaagatg

SEQ ID NO: 916795 - DNA, 4001 bp, Homo sapiens
ctcttattcccggcttttactccttaattatgactctgagccagtctattgaaaaaggtctggggtaaagagataatgggaaggggtcagaatcaaggcaaaggatagcctagcactaagggcttggggctgagaggctggaaaaacattgtttctacattctagagagacagggcatattctacctcaccccagtagagggaaaacagtcagagccaacctcccctctgccctgccggccactattcacaactgactatgccctatattaagccatctcccccaacttccaaaacatcgatgatgcattgcttcatccccgagctgcagcggtgtgacgagtggggctgagctgcggcaggaggacagcagtggcccaagatggaatgcaggagacaaaactgagtctgagcaacctttccccaaagcagacttgtctctccgccccaaccacgctgcctccagcagcactgcctcttgcctcttatttggctttgctctggggaagtaaaaggtgtgtgtgtgtgtgtgtgtgtgtgtgtgtgtgcgcgcgcgcgcgtgtgtgtgcatgtgtgtacgcgtgcatgttgggtggtagggaatggaaatggagaagtcctgttttactgcccacccccaggactattcatgggtcccttcacctcaccatcccagccctctaaagggtggaaccagacccagggaagagagtggctcctggggttcacccactctgcacccttggaccatgcaactgagtccaccaactgtcagccctccccacaactaatgagtcttcagatcctcttttttcacttctccccaccaaaggggaaaacaatttctaaaagacagcagctacacagcagaccagtaggggtgggaaaggggtatttggagcagaattcttacctgaggtatcccagagactaagctccaccctctgttcctctgtctccaaacaggctgtgtaattttcgaacacggtgggcacataggtctgtgaaaagagaggaaacattcaccccatgcacccctaccctcagatcccctggttagtgctggctacacacgcactcaccagagagacagtaaagtcacaggagacaagaaaccagaggagatgcctggggcaggagggaagggactgtggaggaccaggcactttgctctgcagcagtgagaaatgtgaatgacacccccccacaccaccacaccaggggtaagccccccatatcctaggcgatcagggacacacacacacacagattcctcccatccccagatttgtgtttcccaatttgagagagccacaggccaaagccaatcctagctcatctcctctcaaacccctcccggccaggtgaacagaggggctgcagaagcctgcctgaaggcacaggcatagagcctttgaggagcaggtgagcggataggcagggattacgtcaagaagaaaccccagactttcaaatgcctccagtgccctcacctgagagcagactccagggacgcaggaaggtggaggggatctgatgggtcctctgggtgaagaggtgaggaggagccagcggggcggcagaagtggaacaggtctcaggggaagctaaggcagggcagtcctccagccaaaaagcagctgaggatggtaaagcctcagaaagcggctgaggatgggctggggctgggggagccacgtctcctgagcaggtggaaatctaccccaaggcgggcaggcagggagaaaagccggccagcgggcgggcgggcagctcacctctggatagcaatccttcgctaacacttgcaacatcgcggtcttcccacactgcacgtccccgaccagaacgagcttacatctggccacgactggctggggggcccgtctctccttcatggttgcagtgtccgcgggacttgaacttcgattcagaagggagggttgcgccaggtgcgtctcagcacgccaatcaagccagattccctgcctccctccaactgaggaggaggccggcacagccgccttttatttttctggctgagccaatcacaagaggaggcggactctgttacgcccaatccctgaggtgggattccctccagcagccaatggatctgaggatctgagtcagcgcccccttcctcccttctctttctcttaaagctgcaccgttgtttccccctgaaaggggattcccaggttgttttgcatttgtattaggaagtggaaagggtactggaagcaaaatgaaatgatctggagtgtctaccaataagtgtcagaaaaacaaactagctatggaagcaggaagtgaggtcaggctggagttgcagggactgtcccgggtgggttacaaaagcaggacctgcttagactatagacaggtgtgtgtgtgtgtgtgtgttttggaggagtaggggatgggggaggtggcccagaacttctctgacattttttttcttttttttccttacatcttttgttttaaatagagacaggggtctcaccatgttatccaggctggtcttgaacttctgggctcaagcaatccgcctgtctcagcctcccaaagtgctgggactacagacatgagccacagcgcctggcctgatgtctgacttttttgttttttctaattcccatccaaaccagttcttacttccctttatttcccctcccaatatcagctcctgctgtacctcttttatttatttatttatttatttatttatttatttatttatttatttatttattttgagatggagtttcgctcttgttgcccaggctggagtgcaatggcacgatctcagctcactgcaacctccatctcccggattcaagcgattctcctgcctcagcctcccgagtagctgggattacaggcatgcaccaccatgcccagctaatgttgtatttttagtagagacggggtttctccatgttggtcaggctggtctcgaactcccgacctcaggcgatccgcccgccttggcctcccaaagtgctgggattataggcgtcagccaccgtgcccggcctgtgccccttttaaagccttctcttcttcaagaatcaccttcaccaccaaagacagagagagagaaagagaaagagaaaactttctagagtcatccataaaaaaaacacacagcacctgacccagtgatgggcagagagaaatgagggactctggcaagtgggggtgggagagaggaagaagacaaagcaaacacagtcactgtttggccagacagcctctcacccatgcctagcagaagctgcttaggggtgtttgttctgcggcctaggctcagcttcctggatgaatcaggcacaggtccagttccatgttaacgcccactgaaactgacgcactaatgtgtgtcacctggttaaagtccagactgggcccaggattttgggattagaagctggaggacaatctaaggttgagatgaactacataaattttttttttttttttttttgagatggagtctcgctctgttacccgggctggagtgcagtggcttgatctcagttcactgcaacctctgcctcccgggttcaagcaattctcctgtctcagcctcccgagtagctgagactacaggcgcacgtcaccatgcctggctaatttttgtattttcagtagagacagggtttcaccatattggtcaggctggtctcaaactcctgaccttaagtgatccacccacatcggcctcccaaagtgctgggattacaggcgtgagccaccgcgcccagccgagcttcataacttcttaacagccctgactgatggggcccctgtattttggggagcctctactagacagaactatgggctgtccacagcttaaataaaccactgattgtccaggaatcaagaccgtacaaataagggctcctggagatttgtgattgaaggaagaccaactttgggcaaaattgagagtagtccctttcccttgtcaagcccagtgtctcctgggcc

SEQ ID NO: 916796 - DNA, 4001 bp, Homo sapiens
accttacccttccaagtaggtagggttacaggtgtgtgccaccacactcggctaattttttttttttcttatggagacgagggtcttactatcttgcccaagctggtgtgaaactcctgggctcaagctatcctcccacctcagcctcccaaagtgttcggattacaggcatgagccaccgcgcccggtctcactctaaacagtttttttaatcttgacaagttttaaactggacctccacatttagggacttcaaatatttccctctctgccacaacatccccactgtcgctgaaaacaccttcctattactgctaatgtgactgaaatacaaaagagagcagagattagtacaaacttcgaaataaaatgaagaacaccgggactctagcctctgccaactcctaacatcctacctgctcagtttattccttctttaaatatgaacaatttcaccctggtagacaagtcagtgactggcacagtgaaaacagaggtaaaaacttcacctagtacttggcacatggtaagccctcaattaaaggtagctattatcaacatggtcataatattgacagacttgattacagaaataaaaccttccctgttaaaggacaatcctatagtccaacacacaacaatagacattatgtgtatttggcgcaaaatagacgccagatatcctaagaccttagttcatttgttttgtttttaattagttttttaagtttatttaattatattacctccacctacctttacaagtaagtaaactcggggcactcactcaaggtctggcaaactgggacccaaaaagactgaattcatagtctgcgctcttaaccccacaatgaatagccactgaaggatgacttcctcttcgacagaggaatggatctgggaccaggttattaaataagagatctgagtttgaaaggtccttgggccctcacccacccatctaaacttgaacactatccaatgttaattcaacattaaagggtagaacaacttagtggttttaggagcgtggactgatgagtcacacaaaccaagtcttaaggcctgctgtgagccaaatactagctgggtgaccttaccctttctcatcatatgcaaaatggcgataagaacagcacctgcttaatcgagcagttttgagtattaatgtaaatgatccacgtaaaccacgcagcacagcgctcattaatgtaactgcaaatgagagccatggaaaagggcaggtaggagctataaaagaaagtggagcctgtccccgagtaacccagccgatgagagcaacgactctccccagcagcaggggcagtcgcccccgcccactgccgcaggcccgtccttaccgctcttgggtttagactcgccggctggccccgccgaggcggagcggggcggctgttgccctttgctgctgcccgaagaggcggaggagctgttggagccgctgttcttgtccatgtcggaggcggtggcggcggcgttgggggagctcagcggcatcaacgggggcctcggcggcgacggcagtcggagcggagcgggcgcggcggggacccaggctcatggcgttcagggccggcgggggtcggcggcggcagcggttctcggccttcatggcgacatttttccctgtttccttccttggcttctcaaactaggaagagaagcggcggacggggctgttaagcccggcggcagcggcgaccgaggacgaggaggccggggctcgggagtccgggccgggcctggcggggcggaggctgcgggggaaggggaggcgagggaggttgcgcgagccccgccggccggccggccggacacgctctcccgccgcgaggcaggggagagggctggctgtctcggtgtcggggactagtgtctccgacacagcaacggatactcgcccctgggccgaggccgacctgctccgggaatggcgacgagtcgccaaacagcatctcaaagaacccggatggactgtatatatagtggagagggggtgaggtattctgggaaatgtagtttttgcctacatccgggtctcgtggtttgttttttggtttttgtttgtttgtttgttttggttttgttttttttatttcctcccccacctccgccccaaccccactgtgagggcattcaaaataatgggacttgcagttgctccaagtccaggtttttcacttagtacactaaaaatacagtaacaataataatatacactgataataatgtagccaaacattggaatacctgtggaactcctttatagactcgtttgatttatggttctttttttttttttttgaggcggagtcgctctgtcgcccaggctagagtgcagtggcgcgatctgggctgactgcaagctccgcctcccgggttcacgccattctcctgcctcagcctcccgagtagctgggaccacaggcgcccgccaccacgcccggctaattttctgtatttttagtagagacacggtttcaccgtgttagccaggatggtcttgatctcctgacctcgtgatctgcccacctcggcctcccaaagtgctgggattacagacgtgagccaccgcgcccggccaatttatggttcttattctagcgttaataccaattgatttatggcctttagtctatctcatattaggaataataataataacgttaataatgacaataccttacatttaatatcactttacggcacttcttcatacagtacatcactttatttctttagcctggcgtggcggtgcgcacctgtggtccccattacccaggagacagaggcggaaacaggccataagcagtgtttcatgcgtgtaatcccaacactttgggaggcagaggtggaaggatccttggaggccaggagttccagaccagcctggggaatatagcgagacccctgtctctaaagaataaaaatattttttaaaaaattagttgggcagccgggcgtggtggctcacacctgtaattccagccctttgggagtctgaggagggggcagatcacttgaggccaggagttcaagaccagcctggccaacatagcaaaatcccgaccctattaaaaatacaaaaattagctgggctctgaataaaatagtttgaataaaactaactttaatttaaaagagagaaagaaaaaaaaattagccaagcatagtggctgtggctgcacacctgtagttctagctactcaggaaactgaggtgggaggatcacctgagcccagcagttggaggttgcagtgagatacgatcgtgccagtgcactccagtatgagtgacagagagggagaccctgtctaaacttttttttaaaaagtagaaacagagaacaaaaagcagattagtcatttcaaaattacttttcttgtaaaggtttaagcagaatggacttccttatgtggggtaaaactgaccagtttggggatttgatgatttctcagaaggtcagataaacaatttcgtttaggcgtggttgggtagaaattcaccttgagtaactctgttttggtttggtctactgtgctgaagctcagtgcaaaacaatgggctcctataaattgtatttaacagctgttaacattatcacatttaatcttctcaataactaaattttagactaagtgtgcctgtagtcccagctactcaggaggctgaggagggatgatcacttgagcccaagagtatgaatccagcctgggtaacacaacaagactctgtccctaaataaataaaatttaaagatgagtaaatggactccaaaagtccagataatttgcctattatcacatagctaacaagtgatgttcttacctatgagacaagcagttcctcattttacagatacagactgagatttagaaaatcatgcatatggggccgggcacggtggctcacacctgtaaccccagcactttgggaggccaagccgggtggatcaacaggtcaggagatcgagaccagcc

SEQ ID NO: 916797 - DNA, 4001 bp, Homo sapiens
atgttagcattccatgacatcaggaatcagtctctgcccagaaatctacagatgagcatacccacaattaaacaatttcaatataaatcaacattaagttaaataataaacatttaacagcccaaatcctcaatggtgtaaatccagtttcacaaaaacaaaagcatcatttataactgtcatctggcacaggctgatgtctattcaggtccatattttgcttctgaaaatacgtatcttttctataatttcaattgccaccaaactttgtttctaaaatttcatcttagaaagtagtaccttccacttcaattcaaaacacacgtctgttttcaaagaacttgtttaaaaatttcaacactggacctgtctctaattctttccttcgatagctagttccttaatgggccacaaatttaatattaataaagatactgattcttcgaggcattatatataaagatccctgctttgtttttggatcttaacacagcagagggtggttttcaggaaataaagctacttctagatactttaatagatatttcaagctgtaataatattttataactaaactggaaagttaaaaataagcttttacaatatcctcatacttcaaggcacagttccaaagttacctattccaaaaatattccttgctttctgtagccagaagtatcctttctggctcctgtgttttgtccctgccttttttttttttttttttttgatacctatagccttctgccttgtaatatggttacttacaaataactcttcttttgaatggtaaactgccttcctaagggatgagactgtattttgaattacttctcttcaccatgtctccctcttggctaacgcacagaaaacgttcaacaaaacatgtgctgaatttctgtgaccagctgacactctttttcaatcttctatagtaaatctttgacgctttatggagacagcgttaatctagcagctcacctgctagattacccacccccagcacacctctgcactgagattaacgaaaccatctaggtctgaaagttatcatcaccttatgactcatcccacttggtttgagttcggcaaatgaatcaataccctgaactgactgctgttcacaaagctcttcagaactctcagtgatcgggttgagaatcatctctcagaagtaggccggaaaccccgctcccctttccccttttcttcaacttctcatcagtaatgctcccacgctctcactcccaccttggagaactcaagctgccaaattccttgctgcgtttacctagtggcgatggaggcacatccagccttctctagttcgcggccccgacgtgcagcctacgaagcaccccttccgggtggcatccccaccctgagagttctttaacccgttagcctggccctagcctcaccaccccctgcacccctcctgttctcctcggtcccacgatgtccccaacacttgggttagttcaaggactcggggcgggaaagggcacgccgcgcgccaagggaccgaggctcaggcgagccctggcggctctgcctcaggcccccgaggaggcgcacagggcccggcgcagagaggggcccacccggcgcgaacgctagggacgcccggcttctccccaccgctcgggtcgctgacgggggtggcactggaggagctcgagagggtccggcagcctgccctggctcggttggggcacctgaagccgggcaagcgacccccctcagcgcagctctccgagatgacgactaggtaaccgctaaggcggaaagaaaggaggcgcttcaggtgccctggcaggataggattggcgaggagggtctgtccggctccaccggcccctcaccttcatggccgcgaccgcctcagctcggccggctctaccaggaaactcagcaccatagcagctcctcacactgccgacctccttccctctgggcggtgattaccgcgccccgggaggcgaccgagcgtccggacgtaaggggcgtggtcacgctcgccgcgtgccccggtaaaagcgcagagcggcggccacgacgaccaataggaagccgactttcgggaggccggtcaccagagccaatgaagcgacagggattgggcggggcctctggcgttcctcctggctgggagtgcgcggggaggattcttttccgccccgagcgaagacctgcggacctgggcgtggcggaaggcgcgctgcggcgctgctttctcggttgggtgtttgaaatgggagatagcgtccctgaggaagctgctgcggctttctgggctaggtggtcaagtttccggggaggggagcgcgggaagggccgtggtgaatttgaacacgccggttggctcgaaggcctttgttatgaccgtcagagcagggcctcagatttccttcccagacgttcccgcgttcatgctcggtgatgacctcggggctcctcactcgtgggtccggtaaggagcggcagctgcactcgctaggacgcggcctttaaaaacaagacttattgaaaacacttagaaaaccaagggctctcaaatcccaagggctctttgaaaagctgtattcaaaataaccaaaatcgtagcataataaaagaatttgctcgagtcttggaattgcctttggacagagaaactgaggttgtaaattaaggtatcgatttcttcagctgtactggatgacagtttattttcctacaccttttttttatttttgacaaggtcttgctcttgcccaggctggagtgcaatagtgtgatctcggctcactgcaacctccgtctcccgggttcaaaggattctcctgcctcagcctccctagtagctgggacttcgtgcgcccgccccacacccggctaattttttctatttttagtagagactggttttcactgtgttggccaggctggtctagaactcctggcctcaggtgagccgcccacctcggccttccaaagtgctgagattagccaccgggcccagccgattttcctacactttttaatctcacctctaacttaaccagtatttaagattttaaacataaaaaagtcagttcgctcttcatgaggacctaagactgttctgttatttatatacattatagatttgcttcgacaagttgtgctatattagattaaaacacacggagagagagagagtgcgtggcaggccacttccttagactgaaataatgcatcagagtatgtatttctcttgcttcaagtgctgctcagataatgtcacttcttatccataatagtcctaggttttttttggaaaaatgtacagaaagcctttcattcacgatgtaggacgcagctgagcttcattggaagagaaagtattaattaattctcctaatgatctagacacaaagcaactcaataaaaatgttcttggggtacaaagccatggttgtccctcattagaaaaggcctggcaggtctacctccagagttaataagcacatgaaagatgctcaacatcattaactatcaaggaaatgcacatcaaatccatggataccgctgtgcgcctgcaaggatgggtaacattaaaaagaaagaaaatagatggtgaggatgtggagaatttggaatcttcatacatgaatggtgggaatgtaaaatgatgcagctgctatgaaaatgcctgacaattcttaaaaaaaaaaatttttttttttttgagacggagtctcgctctgtcgcccaggctggagtgcaatggcgcgatttctgctcactgcaagctccgtctcctgggttcacgccattctcctgcctcagcctcccaagtagctgggactacaggcgcccgccaccgcgcccggctagttttttgtatttttagtagagacgggtttcaccgtgttagccaggatggtctcgatctcctgacctcgtgatccgcccacctcggcctcccaaagtgctgggattacaggcgtgagccaccgcgcccggcccaaaaatgt

SEQ ID NO: 916798 - DNA, 4001 bp, Homo sapiens
cacagaaagaagtatttccttacatgaacattcacatgttagcattccatgacatcaggaatcagtctctgcccagaaatctacagatgagcatacccacaattaaacaatttcaatataaatcaacattaagttaaataataaacatttaacagcccaaatcctcaatggtgtaaatccagtttcacaaaaacaaaagcatcatttataactgtcatctggcacaggctgatgtctattcaggtccatattttgcttctgaaaatacgtatcttttctataatttcaattgccaccaaactttgtttctaaaatttcatcttagaaagtagtaccttccacttcaattcaaaacacacgtctgttttcaaagaacttgtttaaaaatttcaacactggacctgtctctaattctttccttcgatagctagttccttaatgggccacaaatttaatattaataaagatactgattcttcgaggcattatatataaagatccctgctttgtttttggatcttaacacagcagagggtggttttcaggaaataaagctacttctagatactttaatagatatttcaagctgtaataatattttataactaaactggaaagttaaaaataagcttttacaatatcctcatacttcaaggcacagttccaaagttacctattccaaaaatattccttgctttctgtagccagaagtatcctttctggctcctgtgttttgtccctgccttttttttttttttttttttgatacctatagccttctgccttgtaatatggttacttacaaataactcttcttttgaatggtaaactgccttcctaagggatgagactgtattttgaattacttctcttcaccatgtctccctcttggctaacgcacagaaaacgttcaacaaaacatgtgctgaatttctgtgaccagctgacactctttttcaatcttctatagtaaatctttgacgctttatggagacagcgttaatctagcagctcacctgctagattacccacccccagcacacctctgcactgagattaacgaaaccatctaggtctgaaagttatcatcaccttatgactcatcccacttggtttgagttcggcaaatgaatcaataccctgaactgactgctgttcacaaagctcttcagaactctcagtgatcgggttgagaatcatctctcagaagtaggccggaaaccccgctcccctttccccttttcttcaacttctcatcagtaatgctcccacgctctcactcccaccttggagaactcaagctgccaaattccttgctgcgtttacctagtggcgatggaggcacatccagccttctctagttcgcggccccgacgtgcagcctacgaagcaccccttccgggtggcatccccaccctgagagttctttaacccgttagcctggccctagcctcaccaccccctgcacccctcctgttctcctcggtcccacgatgtccccaacacttgggttagttcaaggactcggggcgggaaagggcacgccgcgcgccaagggaccgaggctcaggcgagccctggcggctctgcctcaggcccccgaggaggcgcacagggcccggcgcagagaggggcccacccggcgcgaacgctagggacgcccggcttctccccaccgctcgggtcgctgacgggggtggcactggaggagctcgagagggtccggcagcctgccctggctcggttggggcacctgaagccgggcaagcgacccccctcagcgcagctctccgagatgacgactaggtaaccgctaaggcggaaagaaaggaggcgcttcaggtgccctggcaggataggattggcgaggagggtctgtccggctccaccggcccctcaccttcatggccgcgaccgcctcagctcggccggctctaccaggaaactcagcaccatagcagctcctcacactgccgacctccttccctctgggcggtgattaccgcgccccgggaggcgaccgagcgtccggacgtaaggggcgtggtcacgctcgccgcgtgccccggtaaaagcgcagagcggcggccacgacgaccaataggaagccgactttcgggaggccggtcaccagagccaatgaagcgacagggattgggcggggcctctggcgttcctcctggctgggagtgcgcggggaggattcttttccgccccgagcgaagacctgcggacctgggcgtggcggaaggcgcgctgcggcgctgctttctcggttgggtgtttgaaatgggagatagcgtccctgaggaagctgctgcggctttctgggctaggtggtcaagtttccggggaggggagcgcgggaagggccgtggtgaatttgaacacgccggttggctcgaaggcctttgttatgaccgtcagagcagggcctcagatttccttcccagacgttcccgcgttcatgctcggtgatgacctcggggctcctcactcgtgggtccggtaaggagcggcagctgcactcgctaggacgcggcctttaaaaacaagacttattgaaaacacttagaaaaccaagggctctcaaatcccaagggctctttgaaaagctgtattcaaaataaccaaaatcgtagcataataaaagaatttgctcgagtcttggaattgcctttggacagagaaactgaggttgtaaattaaggtatcgatttcttcagctgtactggatgacagtttattttcctacaccttttttttatttttgacaaggtcttgctcttgcccaggctggagtgcaatagtgtgatctcggctcactgcaacctccgtctcccgggttcaaaggattctcctgcctcagcctccctagtagctgggacttcgtgcgcccgccccacacccggctaattttttctatttttagtagagactggttttcactgtgttggccaggctggtctagaactcctggcctcaggtgagccgcccacctcggccttccaaagtgctgagattagccaccgggcccagccgattttcctacactttttaatctcacctctaacttaaccagtatttaagattttaaacataaaaaagtcagttcgctcttcatgaggacctaagactgttctgttatttatatacattatagatttgcttcgacaagttgtgctatattagattaaaacacacggagagagagagagtgcgtggcaggccacttccttagactgaaataatgcatcagagtatgtatttctcttgcttcaagtgctgctcagataatgtcacttcttatccataatagtcctaggttttttttggaaaaatgtacagaaagcctttcattcacgatgtaggacgcagctgagcttcattggaagagaaagtattaattaattctcctaatgatctagacacaaagcaactcaataaaaatgttcttggggtacaaagccatggttgtccctcattagaaaaggcctggcaggtctacctccagagttaataagcacatgaaagatgctcaacatcattaactatcaaggaaatgcacatcaaatccatggataccgctgtgcgcctgcaaggatgggtaacattaaaaagaaagaaaatagatggtgaggatgtggagaatttggaatcttcatacatgaatggtgggaatgtaaaatgatgcagctgctatgaaaatgcctgacaattcttaaaaaaaaaaatttttttttttttgagacggagtctcgctctgtcgcccaggctggagtgcaatggcgcgatttctgctcactgcaagctccgtctcctgggttcacgccattctcctgcctcagcctcccaagtagctgggactacaggcgcccgccaccgcgcccggctagttttttgtatttttagtagagacgggtttcaccgtgttagccaggatggtctcgatctcctgacctcgtgatccgcccacctcggcctcccaaagtgctgggatt

SEQ ID NO: 916799 - DNA, 4001 bp, Homo sapiens
caaatcaaatgaaataataaatacgaaaggaggctggacgcagtggctcacacccgtaatcccagcactttgggaggccgaagtgagtggatcacctgagtccaagagtttgagaccagcctgggcaacatagtgaaaccttgtctctacaaaaaatacaaaaattagccgggcatgatggcgtgagtgcctgtagtcccggctactgaggaggctgaagggggaaggtcaactgagccgaggaggcagaggttgcagtgagcagagatcgcagcaccgcactccggcctgggtgacagagtgagaccctgtctcaaaaataaataaataaataaataaataaataaataaataaatatgaaaggatactgaatactgttatcctcaagtaagattatttgtagcaacagaatacaaaataaggctgggtgcagtggctcatgcctgtaatcctagcactttgggaagccgagatggaccaatcacctgaggtcagggttttgttttgttttttttggcggggggtgtggggagacagagtctcactctgttgcccaggttggagttcagtggtggaatctcagctcactgcaacctctgcctcctgggttcaagcaattctcctgcctcagcttcccaagtagctgggactacaggtgcatgcagccatgccccggctaattttttatatttttagtagagacggggtttcactgtgttgcccaggctggtctcgaacttttgagctcaggcaatccgcccgcctcgtcctcccaaagtgctaggattacaggcgtgagccaccgcgcccggctacagtcagaggtttgagaccagcctggccaacatggtgaaaccccatctcaactaaaaatacaaaaaattagccaggcatggtggcaggtacctgtaatcccagctattcaagaggctgaggcaggagaatcgcttgaacccagaaagaggtggcactgagccgagattgtgccactgcactccagcgtgggtgacagagtgagactccgtttcaaaaaaaaaaaaaaacaagaatgcaaaataaatttagagtactgagagtcggagaggaaatgcttgacaaaagcttgttccttctttttactagaaggcagggctagccacaggtcggtcggcttaacattgcatcactcacattccctaccactagtccactacattcttatttggggcaaaactatcagccaacaacactatcagtctcttgccctattgtcagactctaaaacccctgtatagaaagggataacactatcacgggccagtccccaagaacagtggcctcaataacagccccacttgctattaaatgaaatgaagtttctgaacggggaagcagtctgtcaatccctcaagcaaaacgccttcacccctcctggctttctgctcttcctctagccccctcctccccactacccaatttcccaaagtcctgagttagggaaggccttccagtgtgtggtgtgtgaaccctgccagagagccaggctgcaaaccaagcgcagggatgtgaagaatgtgagattccttcatggagggctgggagggggtgaggagcggggaaggaatgagaggacaaggctgccaacgacaaggcatgggagaggagccaagctatggcgcttcgagggcgggggtttaggttccaccgcccctgcccaggctggcccccggaatgctcccttcctccccttctggcccgtcaatcattgcccatttaaacaccacgctgttcccccagttctgcaggtgccggtcctccagctagccccggccccctcccgcacttctcaaagctcccctattccaatggaccttccccaacaacccgttctccagagcccccttctcacctcccgactcctcgccagtgctgctcccttctcacatttttatctctaccaccatccctcctcctgaaccccagttatttcaaccccccgccccaatacccctgggacatcacctcctcccctcccacaccctcttttaggtggaagatcgcgcaggcgcagtacgcaccgccctggaagcggcctggagtctccgcaacctgacccagtcggagctgaggccgcagcggccacagtactgccctggtgccgggtcccagcctctcccgggaagggaagggaaaggggaaggaggggaaagaagactcctaccactcgtcgccgcctcagacggatcctttgccccgcccaccgctgctacgcaacccggcggaagctcgtcaccaaaccccgcctctttgtttaactcagcccctacaccagcagccaggagctgcctacgaggagggacgaaggctggccaggcctccactctagacaggaagtctagtctagagtctatatggtcccagccaggactatgtagccatttaggagggagaactctatgttcttcccggcaaaaacgtgtgggcctggccggccacgcttcgctttggaggggtgcaggtgacttgtgtcttagagctgacgcagattgttgcgagatcattgcggagaggcaggcctgcagcgtgacctgctgcgggtccggcccctctcccttttccagagccctggtcagcatcccagagcttcgtaaccccttgactcctgtcatgggaatggatattgcagttaacaaggcggccgcggggtggggagtgagggagtctgaccgcaaagcttagatctggggtgctcaacgggttgtctgcctctctcccaggcgctctcctgccgtatccacgatggctccccgaacacttgtggagttccctgaaacacctaagaggaaggaagggagaaaaaatttccctcttcctgagttggggtttgatttccttagcttacaacaccgtggtgttggggatgtgggcggtagagaacgtgggatccaagggaagtcaatgtggagcctaaagagctccgtgagcagataagggattaattaagcaaaccaaggcattacaatcacatgacttcctagactaatctggtattaaatagtatggtatttattgtggacattggctaagcaaatgctaatgcacattaatacacacatacacacatatctttatgtaatttgtttatacacaacaatacagagctagctaccttttgtggacaatttgacaggtcccaaaaggaactaaagtttcaggcctcctttctgctgtcttctagcgggactctgagataagtaagataagagtagtatggccgggcgcggtggttcatgcctttaatcccaacactttgggagaccgaggctggtggatcacgaggtcaggagtttgagcccaggctggccaacgtggtgaaaccccgtctctactaaaaatacaaaaaaagtagccgggcgtggtggcgggcgcctgtaatcccagctactcgggaggctgagacaggagaatcgcttgaacccgggaggcagaggttgcattgcagtgagccgagatcgcgccactgcactccaacctgggcgacagagcaagactcctttgccggggtggagcggtggggcggggcggggaagagtagtatggccaggtgcagcggctcacgcctgtaatcctagcactttgggaggacgaggtgggcggatcccttgaggtcatgagtccgagaccagcctgggaaacatggcgaaactgtctctacaaaaaaaatacagaaattagccgagggtggtagtgcgaacctgtagtaccagctactacggaggctgtggtgggaggttgcagtaagccaagattgcaccactacactccagcctgggttacacagcgagaccctgtttcaaaaaaaaaaaaaaaagggactaacaatgtttctctctttgtcgcaggttccatttcttccaagaagggtgagcctgccttttgtctctggtgtaaatgccacttttcccagagaccttgaccaagctgggtagtgcattaaagatgagaaccccaaatcaggaac

SEQ ID NO: 916800 - DNA, 4001 bp, Homo sapiens
aactgagccgaggaggcagaggttgcagtgagcagagatcgcagcaccgcactccggcctgggtgacagagtgagaccctgtctcaaaaataaataaataaataaataaataaataaataaataaatatgaaaggatactgaatactgttatcctcaagtaagattatttgtagcaacagaatacaaaataaggctgggtgcagtggctcatgcctgtaatcctagcactttgggaagccgagatggaccaatcacctgaggtcagggttttgttttgttttttttggcggggggtgtggggagacagagtctcactctgttgcccaggttggagttcagtggtggaatctcagctcactgcaacctctgcctcctgggttcaagcaattctcctgcctcagcttcccaagtagctgggactacaggtgcatgcagccatgccccggctaattttttatatttttagtagagacggggtttcactgtgttgcccaggctggtctcgaacttttgagctcaggcaatccgcccgcctcgtcctcccaaagtgctaggattacaggcgtgagccaccgcgcccggctacagtcagaggtttgagaccagcctggccaacatggtgaaaccccatctcaactaaaaatacaaaaaattagccaggcatggtggcaggtacctgtaatcccagctattcaagaggctgaggcaggagaatcgcttgaacccagaaagaggtggcactgagccgagattgtgccactgcactccagcgtgggtgacagagtgagactccgtttcaaaaaaaaaaaaaaacaagaatgcaaaataaatttagagtactgagagtcggagaggaaatgcttgacaaaagcttgttccttctttttactagaaggcagggctagccacaggtcggtcggcttaacattgcatcactcacattccctaccactagtccactacattcttatttggggcaaaactatcagccaacaacactatcagtctcttgccctattgtcagactctaaaacccctgtatagaaagggataacactatcacgggccagtccccaagaacagtggcctcaataacagccccacttgctattaaatgaaatgaagtttctgaacggggaagcagtctgtcaatccctcaagcaaaacgccttcacccctcctggctttctgctcttcctctagccccctcctccccactacccaatttcccaaagtcctgagttagggaaggccttccagtgtgtggtgtgtgaaccctgccagagagccaggctgcaaaccaagcgcagggatgtgaagaatgtgagattccttcatggagggctgggagggggtgaggagcggggaaggaatgagaggacaaggctgccaacgacaaggcatgggagaggagccaagctatggcgcttcgagggcgggggtttaggttccaccgcccctgcccaggctggcccccggaatgctcccttcctccccttctggcccgtcaatcattgcccatttaaacaccacgctgttcccccagttctgcaggtgccggtcctccagctagccccggccccctcccgcacttctcaaagctcccctattccaatggaccttccccaacaacccgttctccagagcccccttctcacctcccgactcctcgccagtgctgctcccttctcacatttttatctctaccaccatccctcctcctgaaccccagttatttcaaccccccgccccaatacccctgggacatcacctcctcccctcccacaccctcttttaggtggaagatcgcgcaggcgcagtacgcaccgccctggaagcggcctggagtctccgcaacctgacccagtcggagctgaggccgcagcggccacagtactgccctggtgccgggtcccagcctctcccgggaagggaagggaaaggggaaggaggggaaagaagactcctaccactcgtcgccgcctcagacggatcctttgccccgcccaccgctgctacgcaacccggcggaagctcgtcaccaaaccccgcctctttgtttaactcagcccctacaccagcagccaggagctgcctacgaggagggacgaaggctggccaggcctccactctagacaggaagtctagtctagagtctatatggtcccagccaggactatgtagccatttaggagggagaactctatgttcttcccggcaaaaacgtgtgggcctggccggccacgcttcgctttggaggggtgcaggtgacttgtgtcttagagctgacgcagattgttgcgagatcattgcggagaggcaggcctgcagcgtgacctgctgcgggtccggcccctctcccttttccagagccctggtcagcatcccagagcttcgtaaccccttgactcctgtcatgggaatggatattgcagttaacaaggcggccgcggggtggggagtgagggagtctgaccgcaaagcttagatctggggtgctcaacgggttgtctgcctctctcccaggcgctctcctgccgtatccacgatggctccccgaacacttgtggagttccctgaaacacctaagaggaaggaagggagaaaaaatttccctcttcctgagttggggtttgatttccttagcttacaacaccgtggtgttggggatgtgggcggtagagaacgtgggatccaagggaagtcaatgtggagcctaaagagctccgtgagcagataagggattaattaagcaaaccaaggcattacaatcacatgacttcctagactaatctggtattaaatagtatggtatttattgtggacattggctaagcaaatgctaatgcacattaatacacacatacacacatatctttatgtaatttgtttatacacaacaatacagagctagctaccttttgtggacaatttgacaggtcccaaaaggaactaaagtttcaggcctcctttctgctgtcttctagcgggactctgagataagtaagataagagtagtatggccgggcgcggtggttcatgcctttaatcccaacactttgggagaccgaggctggtggatcacgaggtcaggagtttgagcccaggctggccaacgtggtgaaaccccgtctctactaaaaatacaaaaaaagtagccgggcgtggtggcgggcgcctgtaatcccagctactcgggaggctgagacaggagaatcgcttgaacccgggaggcagaggttgcattgcagtgagccgagatcgcgccactgcactccaacctgggcgacagagcaagactcctttgccggggtggagcggtggggcggggcggggaagagtagtatggccaggtgcagcggctcacgcctgtaatcctagcactttgggaggacgaggtgggcggatcccttgaggtcatgagtccgagaccagcctgggaaacatggcgaaactgtctctacaaaaaaaatacagaaattagccgagggtggtagtgcgaacctgtagtaccagctactacggaggctgtggtgggaggttgcagtaagccaagattgcaccactacactccagcctgggttacacagcgagaccctgtttcaaaaaaaaaaaaaaaagggactaacaatgtttctctctttgtcgcaggttccatttcttccaagaagggtgagcctgccttttgtctctggtgtaaatgccacttttcccagagaccttgaccaagctgggtagtgcattaaagatgagaaccccaaatcaggaacaaagataacggttagagcaataaaaagggaggaaaccgtgtgtgcctactgtgtgcaaggcacttttttaaatataacttccgttttctcgtaagatggaattacatattttttgtctttttttccctttttgtggagaatggggtctcgttatattgcccaggcaggtctggaactcctggactcatgctatcctccagcctatgcctccctacgtgctgggattacag

SEQ ID NO: 916801 - DNA, 4001 bp, Homo sapiens
tcgcagcaccgcactccggcctgggtgacagagtgagaccctgtctcaaaaataaataaataaataaataaataaataaataaataaatatgaaaggatactgaatactgttatcctcaagtaagattatttgtagcaacagaatacaaaataaggctgggtgcagtggctcatgcctgtaatcctagcactttgggaagccgagatggaccaatcacctgaggtcagggttttgttttgttttttttggcggggggtgtggggagacagagtctcactctgttgcccaggttggagttcagtggtggaatctcagctcactgcaacctctgcctcctgggttcaagcaattctcctgcctcagcttcccaagtagctgggactacaggtgcatgcagccatgccccggctaattttttatatttttagtagagacggggtttcactgtgttgcccaggctggtctcgaacttttgagctcaggcaatccgcccgcctcgtcctcccaaagtgctaggattacaggcgtgagccaccgcgcccggctacagtcagaggtttgagaccagcctggccaacatggtgaaaccccatctcaactaaaaatacaaaaaattagccaggcatggtggcaggtacctgtaatcccagctattcaagaggctgaggcaggagaatcgcttgaacccagaaagaggtggcactgagccgagattgtgccactgcactccagcgtgggtgacagagtgagactccgtttcaaaaaaaaaaaaaaacaagaatgcaaaataaatttagagtactgagagtcggagaggaaatgcttgacaaaagcttgttccttctttttactagaaggcagggctagccacaggtcggtcggcttaacattgcatcactcacattccctaccactagtccactacattcttatttggggcaaaactatcagccaacaacactatcagtctcttgccctattgtcagactctaaaacccctgtatagaaagggataacactatcacgggccagtccccaagaacagtggcctcaataacagccccacttgctattaaatgaaatgaagtttctgaacggggaagcagtctgtcaatccctcaagcaaaacgccttcacccctcctggctttctgctcttcctctagccccctcctccccactacccaatttcccaaagtcctgagttagggaaggccttccagtgtgtggtgtgtgaaccctgccagagagccaggctgcaaaccaagcgcagggatgtgaagaatgtgagattccttcatggagggctgggagggggtgaggagcggggaaggaatgagaggacaaggctgccaacgacaaggcatgggagaggagccaagctatggcgcttcgagggcgggggtttaggttccaccgcccctgcccaggctggcccccggaatgctcccttcctccccttctggcccgtcaatcattgcccatttaaacaccacgctgttcccccagttctgcaggtgccggtcctccagctagccccggccccctcccgcacttctcaaagctcccctattccaatggaccttccccaacaacccgttctccagagcccccttctcacctcccgactcctcgccagtgctgctcccttctcacatttttatctctaccaccatccctcctcctgaaccccagttatttcaaccccccgccccaatacccctgggacatcacctcctcccctcccacaccctcttttaggtggaagatcgcgcaggcgcagtacgcaccgccctggaagcggcctggagtctccgcaacctgacccagtcggagctgaggccgcagcggccacagtactgccctggtgccgggtcccagcctctcccgggaagggaagggaaaggggaaggaggggaaagaagactcctaccactcgtcgccgcctcagacggatcctttgccccgcccaccgctgctacgcaacccggcggaagctcgtcaccaaaccccgcctctttgtttaactcagcccctacaccagcagccaggagctgcctacgaggagggacgaaggctggccaggcctccactctagacaggaagtctagtctagagtctatatggtcccagccaggactatgtagccatttaggagggagaactctatgttcttcccggcaaaaacgtgtgggcctggccggccacgcttcgctttggaggggtgcaggtgacttgtgtcttagagctgacgcagattgttgcgagatcattgcggagaggcaggcctgcagcgtgacctgctgcgggtccggcccctctcccttttccagagccctggtcagcatcccagagcttcgtaaccccttgactcctgtcatgggaatggatattgcagttaacaaggcggccgcggggtggggagtgagggagtctgaccgcaaagcttagatctggggtgctcaacgggttgtctgcctctctcccaggcgctctcctgccgtatccacgatggctccccgaacacttgtggagttccctgaaacacctaagaggaaggaagggagaaaaaatttccctcttcctgagttggggtttgatttccttagcttacaacaccgtggtgttggggatgtgggcggtagagaacgtgggatccaagggaagtcaatgtggagcctaaagagctccgtgagcagataagggattaattaagcaaaccaaggcattacaatcacatgacttcctagactaatctggtattaaatagtatggtatttattgtggacattggctaagcaaatgctaatgcacattaatacacacatacacacatatctttatgtaatttgtttatacacaacaatacagagctagctaccttttgtggacaatttgacaggtcccaaaaggaactaaagtttcaggcctcctttctgctgtcttctagcgggactctgagataagtaagataagagtagtatggccgggcgcggtggttcatgcctttaatcccaacactttgggagaccgaggctggtggatcacgaggtcaggagtttgagcccaggctggccaacgtggtgaaaccccgtctctactaaaaatacaaaaaaagtagccgggcgtggtggcgggcgcctgtaatcccagctactcgggaggctgagacaggagaatcgcttgaacccgggaggcagaggttgcattgcagtgagccgagatcgcgccactgcactccaacctgggcgacagagcaagactcctttgccggggtggagcggtggggcggggcggggaagagtagtatggccaggtgcagcggctcacgcctgtaatcctagcactttgggaggacgaggtgggcggatcccttgaggtcatgagtccgagaccagcctgggaaacatggcgaaactgtctctacaaaaaaaatacagaaattagccgagggtggtagtgcgaacctgtagtaccagctactacggaggctgtggtgggaggttgcagtaagccaagattgcaccactacactccagcctgggttacacagcgagaccctgtttcaaaaaaaaaaaaaaaagggactaacaatgtttctctctttgtcgcaggttccatttcttccaagaagggtgagcctgccttttgtctctggtgtaaatgccacttttcccagagaccttgaccaagctgggtagtgcattaaagatgagaaccccaaatcaggaacaaagataacggttagagcaataaaaagggaggaaaccgtgtgtgcctactgtgtgcaaggcacttttttaaatataacttccgttttctcgtaagatggaattacatattttttgtctttttttccctttttgtggagaatggggtctcgttatattgcccaggcaggtctggaactcctggactcatgctatcctccagcctatgcctccctacgtgctgggattacaggcgtgagccaccgcgccttgcggaattggaattacata

SEQ ID NO: 916802 - DNA, 4001 bp, Homo sapiens
taagaagccttaggacattgttggtagctataagcagatgattccatctgctcagtatctctgggtagcctctcagtgatccccccttgaaactccttttttttttttaagacggagtggtgcgatcttggctcactgcaacctctgcctcccaggttcaagcgattctcctgcctcagcctcctgagtggctgaaattacaggcttacaggcatgcgacaccacgcccacccaatttttgtatttttagtagagatgggatttcaccatattggccaggctggtctcaaacttctgacctcaagtgatccgcctgccttggcctcccaaagtgctgggattacaggcataagccaccatgcccggccctctttgaaactcttaaggtattgtatttcatcctattgtcaaactaagagtcctgattggggaagccagaaaatatgttttaaaccctccaacggctgcccagtgcaatcagaatcaaacccgagctctgtccatagcctacgggttcttcctgatgtagcatcatctgtttccaactgcatttcctcccattctcccttttcccactcctgtccacccacagtggcccttctgttcctctaatgtgtcagcgtgtccctgcctcagggcctttgcacttgctgtgccctccccttggaatactttctcctctaaatgtggcagggcttggtcccgcagggcaaatgtcgtctcttcccagaggccttctcttctcattctcctgactccccgtaatattgccctgttttatattattcatagcacttatttgttcatgtttgcttatttatttatgatttgtcctccccattagaatataaatgccattcctgaaagtagggatcctgtctacttggatcacccctctgcctcagcatccaggacactgtttggcacagagtggcgctcaacaagtatttactcaatgaataaaacatctatgggtctcccagttccccttttctagatcccttgctccctgtcccacctttcaccctagcaaggtaataagggccatctacttcccatgaaaaggtttagcctccgtgaatatcttcttgtctctggaggcagagccaatattgtggatatagggtgtctatatcagtcagatggtgtctgacttcagtttagggcacgattattggctgttgaatgacttcctaatcctgaccaggcttcttgagggggcagcaatggtgtcactagggccactgattaaaaatgacccgccagtgaagcctcctttctcttttgaaaaattaggtaacaaaccggtcagcagcagcatcttcatatatcaagaaaaggtcattatataaatatttttcaagaatttgcaatctcaacttaatcctcctctcgcccctccctccattatcccacattgcaaatccttgggggaaaataaaattcatattccaaagttctcatccacacatttaactcctaaatcgaatgctcgaaactctactttcggatgcttgtattggaagaggcttcggattctttgtcggaagcaggccgtacataattctggaataaatttttgcacgcgggatgcatctgaatgaatgaaacgctttttaatcctctgctctgtacatcccactatgtccctttgaaggaccgcaccgagacttttcgatgcttgcgatggttcaagttgcgcccctggggcccgttacaggactgcaccgaaatgcactcagaggagcatcgcctgcatcacttggactggaagccggcaggtgcacttcgggaacaacgtcgcgagcgcttttcatccctgcaaccaacacacagcgcaaaacgctctgggactgcaagggcaggagactacacagaccatgatgggagaaaagaaaaaaaaatcgcgttctctttttacctgcccagacaattcagcaatcacagccgcatcattcaggtccagccaagccaatcacccgcgcagcctgggcagcatgtgacttccgatgcttccggcctcctattgggtggtttcttggcgtcgccgggtccggcgctaggacccgggcacagctacgcccgcagcactcacgcgattgtccgccccctttcccggcacttaaccaataggaggccgccgttccttagggaccaatggtgagaagatcttgcgcgactagcccttgtcgctgcggagcggaggcggggcgtagggcggggtcacgtggggctgcgcccaaggctgccgggagcagactgggctgcgggcggcggggccggcgcctgcctggagggatggggctgccgggcgcgtaggggccatgccgcccgggacccgggcctgccgcgttccgcgccccggccgccgcgccccacgtccgcgccgggatggtgaacctggcggccatggtgtggcgccggcttctgcggaagaggtgggtgctcgccctggtcttcgggctgtcgctcgtctacttcctcagcagcaccttcaagcaggtcagtggccgcccttcccctcctccccttcccttcttccttccttcctcccccttactttactttctccttccttccttcgttaccttcctccttttttccttcctccctgtcttcctaccccttcccttcctttctttctccccttcccttccttcctccttccttcccttcttcctacctcccctccttccttatcttcctccttccttcccctctccctgcctcccttccttccttaccttcctcaccttcctcctccttccttcctccccctttccttcctcccccttccctttcttctttcctcccctttttcctctcccttcccttccgtctttcttccttcccttcctccttccgtcctcctcctttctgtccccctctcccttccttcttcctttactccctttcttccctgacatcctctttcctcacttcgttcttcctccttccttcccttcctcctctttttccttactcctcgcgtttgtccgacctcccgacttctgcagcggcgccgccggggcgtccgagggtggggagaggtgcgcattcctgtcccggtctcagcacgggtgagggacctgcccaccgccttggtccctgcagcgggaaggggttgctaggccagggcagagctgggactagaaccccgagttgaggacccttcagcggtggggactgcttttatgaacacctccctgcttttcacctgcccggtccagagctaagagagggcgtgcatttgctggcttcatcttcgcagcaggcctgggagaagtggggttcccagtattacagtgggggaaaccaagacataggtggcgagggtcggccagccctcgcatgggtgcccttcgtttaatttgggggctctgtgtcctcctgggtgactcaaaaggacccacagttccttttatgctttttgtgcataacttgattggtagaattccacccctccaacacactgcaccctttcatttttcttccatgtgagaatttctgggagaaacagcaaggagcacgggtggggaaatcttacccaaagcattaataagtttgtctagaagtccaggttgagtgcttagttgtgtagaaagggtggttacaccccagggtgcacccaggataatgggttatgctgttgtcctgacatggttataaaaagctctcctttttactctcaaagctcaagtgtgtaaataaaatatataagtgaatagaacattgataaaactatgtggtcactctacatttagtggattggcaggggagctgtgaaaagggaagaatagggaattgtacgtgacctgccaccttaggcaaacagagaggctgagtgttgtaagtcccttttattggccgggatgtctgggcaatcatgtgactaccagacttctgtgacttgtgttttctgccacctcagacacctcctcacagtcgcgtgttgtcccttctctgtcttgtgacccctgagtggtggggtgcgccaggac

SEQ ID NO: 916803 - DNA, 4001 bp, Homo sapiens
gctatgtaggaatagagataaattccggtgtcactagcagaaaggtagaagctagaatcaaggatgtggccatgtttaaccattgtgacaactggggaatggggtgaacctggagaacactaaacggagaaagagatgccaaggaagaaaaaagtaggcagtagcacctagacagttgggagaaaaacctagagtgtactgttacagatgacaaaaaatgagttgaagaaagtgagaggttagcagtgccaaatgccacagagggaaagaaagtgcattatatttagtcataaaaagactattcagagtttttgttttttttcttgagacagagtcttgctctgtcgcccaggctggagtgcagtggcgcaaactcagctcactgcaacctccacctcctaggttcaagtgattctcctgcctcagcctcccgagcagctgggattacaggtgcaggccaccacgcccggctaatttttgtattttttttttttttagtagagacggggtttcaccacgttggccaggctggtctcgaactcctgacctcaagtgatccgcccacctcggcctcccaaagtgctgggattataggcatgagccaccgcgcctgacctctatttagagtttcaataagattttttttaaagggtggaaggccaaccgcaggtggctcatgcctgtaatcccggcactttgggaggcagaggttggggggcagggggaatagcttgggctcaggagttcctagatcagcctgggcaacacttcgagatccccatctctactaaaaacacaaaaattagccaggcgtggtggagggtgcctatagttccagctactcaggaggctgaggtgggaggatcgggagatcgaggccacagtgggcggtgacgggcccactacactccagcctgggaccaaaaaaaaaggaggggggggaatgaaatgagttacgtaaatgagattatatggagattacagtacatttgcctttgataatataagacttgttcttgagcatagtctggggaaaaagcaacaaagtaaaagatacaggaaaaaggatgagtgatggggcaaaatctccaaaaaggtaggagaagagtcaaagctttaggcggagggaagagaagtaaggtgggagggagagagacggaattagaaaaacatttgtttaggacagtgaaaaatacctcactaagaagggacagttgcagatgcagataggtcttctgactcgtagcctcaacaactaaattaggtttaagcttctttcaggcagtgtccatgtttgaccatatatgcacaactcattcaaaaacaaaactagtacaacgctttgttgggaactcaaataaatgaataaaagcgcaacaagtcagtgagatgctgacgggggttagatgcttttccatttcacccatcaccgctgctgctcgagcaggcccaaaaactctcccagggaccctgcgatggggcgggggtgcgagccagcaatcaaaaacttccagcgctgggggtatcactttcacacccgctgtcccggcgaacaccgcacacccacgccgcaagggggcgggccccacctcggtctttgcgggagggcggctctgccttcccgagcactgcaaaatcgcagcagggtggagggtccgcctgcaaagcagagcgcgcaggcccgggttgcgggggcgagcccctccgggaacgcgcgacccgagacgccgctgccctggacaccgacgcgccgcctcaacgcgcgcctccaccgccagccccggcccgccccgcctcaccggtacccataaccgctacccctcctcccaccggccaccccaaggatctcctacgctgctccgggcagcgagaaccgcaacgcccgctcacctgaccaggccgtaacccgccgcactgccaccccgtcagccccgcagcgactcacgccgagcccggcagtgactcacgcaaagccccgcctcctgcgcttccccacaagcccccgcggcctcgccccgccccctttagcctgggcttgagcgcgcgcagaagtcagcttcgtgacttccttctcaggatggaaccagcttggtggcttgagggtatgtaaaagcaatatctgagccttctgcctgcttccaatatgactaagcttaaaaggagataacccaaaaactgcaggatcatcctgattttctgatctccaaaacaataaaaccttgaatatttccctggactcccttaaacagtttaatccctaatatttaccttgctaatctctgacctttgtgacattaatttgtctgacctttgtgagtataataaccatgtgagaaagttactgtttttccaccatgaacagactactgtcaaccggtaatcctggtaattttaggggatttttttttccctttaagtactggttggcaaactagtccttccgtctaactcctcgcatcttttgcaagtaaaccccttttctaagtgaatctatctctgagtctttctttgacatgtgccagtgttacaatctgtctttagatatgctctggcttacagagaaaaaagaacgaaacttttaacactttttgcttctgcttcccgtgtgagggagtcttcgttgcaatgacaactcttaaacgaaagcaaaacaaaaataattgcagaagtccacagaagcaaacacaaacaaatgaaactttccatttaaaacaggactgtaacctcaaatatcctcaaaatccagatcggtggttctcagtcttgactgagctttggaatcacttagggagtatatacatatacacgtgtgtgtgtgtgtgtgtttgtgtctgtgtgtgtgtgtgtgtgtgtgtgtgtgtgtgtgtgtgtgtgtatactgatttctgtgtcctatcccagagattctgatgtaactagtcttgagtgaagccaatcagaattttttaaagcataggatacggctgtgcatttgaagctggaagccactaacccaggcgctgatcaatgaagaactaggctggagtgctgtcttacaaggtcatatcattagcacatccttcccattgcttaattattggtatctttatattttaaaatcatagtagtcaaatcattaagtgtacgtcaaaatatttactaatgaaatgattctttggttgtattagggagatagagaactgacttttaataatttttttattaagtatttaaaagcaaatattgatttactggtgtttttaacaaaagcaaccacatttgttttattaattctgacagagttgattgagaagagagataagggggctagctggctgctctagtaaaacctcatagacccttaggtgaccctgcttttctctctctttttctctctcaaaccatacaataatcagaagtagcttagtgaatatagagtcaaagtgagaaaagttaatcaaatggttttgatggtcatcatcacctaattctgaggctcctgctgtcccacaaaacctgtgcctgcaatggcagccttctctcctgtgagctcagacctaggccaccttaagttctttcctagattccttgcagacctccccacttctattggcagttatctttaaatggatttcaacaaaatgtgtaaataatgcctttcttttaagtctcttttattcatttactccagtcatctcaattgaacttatcattaatacctgaagagttattttcaaagagacaaacctctttatgtgttttatgtgttgcagttgtaatggtcagtggaaataaacaggagtgtttattattgcaacaataaaatgctgcaattaatgattgtaaatgctattaattttaatatccaaaacaattattgggctctttcaaatagttaaagagtctgacagttaatgtaaatcttaagaaaggaagtattagctaagtaactttaggaagaaaatgaaccttgggacttcctgttatggagatactatgttaagtttggttgcatgtgacag

SEQ ID NO: 916804 - DNA, 4001 bp, Homo sapiens
aaatatcacccatagccagatatgtggttctttttttgaacaaaatttccacacattcattattcacactcaagtcttcccagtgaggaatctaaggcaacttcctcctcaaggtcacccagcaagagaagctaggaagagaagttagggattttgagaaccaaatctttgacactaaccaccagacaaccctcctcttctgcctcatatgtcctgcctgagcaggcacatgctgtgggatttcagcatctcttcttagctatggggctagagaaaaaaagaatgagtgaaccctgcttatatttcaggcttgccaatctctgactgttgttttattcctcccacctccaagagcaagaatctaaaaaggaaatccttgggggtgcagaacactgaggtggcccctgagataatagcaaaaatgctaaaaacaagggcattcatttccagaaaagtagatgtaatcaaagcagaaagcaaagtgaaatccccttttgatgggtagcagattagcatcaaaagcatttcaaaattaaatgtgagcttttggattcaatttcaaggtacttccacttcccactcactaacaggttggtgcagcctttccccatcaggatcttggaaaaagaaactagtgcagggggacggtctaccctggaacaaaactgaagctgaagcctggaatctttccccagaatttgaacaagctttgttcccctccttccttctgagatgaactcaaggatagaatctcccaagctagtgccaggacgctcccccatacaatcacttacaggttacgccacctgtgaaaataaaacatcatctcctctgcaggcagtggctgctcccttctggccagcctgaccactcatcccaggcatagtgtggccctttcctggctcccaggtcttccatctcaggaaagcgtgaacagccaacctcgcaaaaatcaccacaattaaattactcagctgttcctagaagagggtacaatctaagctctgtcctgtgcaaatcttacccagtgtgcccaggcaaaagttacccttccagtctcaggtgaccccctcccctccagggataagcactcacttgctaagtcagagtacccagagtccctccatgctagactagccagccccacgaagggttaactctctcagagaactgccggctactttcaccagcttctgctgcaaaggagagggcaaattgggcagaagccacaatcttgatcgcattgcctacaacatgagcacattttaccccctccctgggcactaagccaaaatctcatttggctttgggatgccgcttaggtgataaaacactgcaggatgtaggcaaataagcatagtcgttcctcgatacccttctcctcccaactaccctttaccccaccagctcatgaacacacatcacaattgggattccaacacccctagcccatctgcacaacccgggagaatatcacttaccgcgacgctggaggcttgcagggggaatgggtgagccaaattcttgccaactcctcccttccctgccgggtagaaagacgctaagtcccaatgacttggtttaaaagctcagcggaggtgcctgaaagaaaattgttcatttgactctcctactcttcccaaaataaaatcaaagcaccagtgcacacacgtagacacacagacacatcaactacccctaaatcatgcaggaccaagacaaaaagaaataccactgccagaagcggagaaaactcggaccagccagtgagtcagtggacaagggacagtggctccctcagactgtcctccacatggatgaaggttttagctctgtgagtctctctctctctctctctctctctctctctctctctcccttctcccttcctttccagtccgcgtaggcaactccgggctgctggcagtagacgaatcaattgcttccccagagccagtttctgccgcggctgccaccactactgcaaagccctgtgtgagcaagggaagcggggcggcagcttcccagtgcagggggaaccaagcgggaaccaagcctgcctcccacccgtgatttatgtgtgcggtgcctggagaaagaaaggtgggaggccgggaggggaggttgggcgcaccagagatcccagctggtcgaaacggcaaccaggggattggcggtcagcaccacggacagcgctaagatgccttggaggaggggatgggtgggaagcgaacccctaggcagagaagttaagtaattggatggttaaagcagagaaggggggagtccggaggggtgggggacgggacttctcgacatcacacagtctagtcagtgacagcttacctaccacacactttttctaatactgtcgctcactctcagagcaaaggaactataacttcacagcccctgtctcccacacgcccccagtcctgcattgctcctctctgctcagacaagagcttggcaccggtgtggggggctccctaagtggttttgcccctcaaagtttcgcccagatgacctgtcctcacccccattgctgcagatttttgacctgtacctggagtttctcagaattcagagcagaaaagctgaggcttaagaaatggaaatttctaaggggcagggtggcttagttgaataagcacttgatggttttctggaagtcagatccagcccccttacaactctggaaaagtcatttaatgtttccaagtcccatctgtgaaaatgataacataatgaccttatttttcctaaagataggaagcaagaggttaaaatgcaacaataagaatacccaagctgtgaactgccatgatttcatggtccataacctgtcctaaaacacaaatgtttggacagagtgataaaggaattgacagcccagctaggatggcatgtgccaacctcacccttcagcaggtggtttgagtagaatgaagggaaattttaggtctaaatcagaccattgagccttggccaaagagccttccccgaaagatccagactggctttctgaagtgaattcactatatggacaatgaaataaaagtatcaaaaggggaaatatataaagatgaatggattcccatggctcccagtgctccatatctcaagagtcctattcctcctaactttgggaaagggctcaaattggaaaaaggccaggaaatctcaaacagaccaagatctgcttagaacttctctgcaaagtgaaggagaactctctctattggagactcatatctaaagcttcccatccagatggcccagggttaactactacatttgtcacttacttctccccatgagacccaggagttaaaatgagaacatttagagctcatttaaaaaacaattttttaaagacagtgtctctgccaggcgcggtggctcatgcctgtaatcccagcactttgggaggccgaggcaggtggattacctaaggtcaggagttcgagatcagcctggccaacatggtgaaaccccatctctactaaaaatacaaaaaaatagctgggcatggtggtgtgcacctgtaatcccagctactcgggaggtggaggcaggagaatcacatgaacctggaaggcagaggctgcagtgagccgaggttgcaccattacactccaacctgggcaacgagagtgaaactccatctcaaaaaaaaaaagaaaaagacagtgtctcactctgtcacccaagctggagcgcagtggtgcaatcatagctcactgaaaccttgaactcctgggcttaagtgatcctcccaccccagcctgtccagtagctaggactcaaggtgcacacgaatataccctgctaattttttttttttttttttttttgcagagatgggtctcactatattgccccagctggtcttgaactcctcgcctcaaatgaaccacctgcctcagtggtggtggtggtggtggtggtagtaattgtcatcatgatggtaatcatagtgatgattatagtgatggtgt

SEQ ID NO: 916805 - DNA, 4001 bp, Homo sapiens
tgaatgggacactaagggcgcgcgaagtgaagcggggagctggagctccaggtgtcatcaagctgaggggatgggcagggttgtgacgtcacgaagctggcgtttgctcgcgatgcggggtcactcagaaaaggggcactgccctggggtgtgaggacgagccagctcggttctggggggccttctgtggcctggccgagcccagccgctgggccggccccgactcctcccctccgggcgcggcctccacctaagtctcccgcctccctcacctgccgccgccgccgtagttgctgctgccgcctgccggtcctctagcttcgacaaagagccgcctacccgatcgctcttccgcttcctgcggaagaagtgacgctctagccagcagacccggaaccatactctatggtgtatgaagtacgcgtgcgacatgccgcagggcgttcccagcacgctttgcgtgtcactatggcaacccaacccaaaggcacgacatggtctaagcggtagtcgccaaggcagccctcctggaaaggggcggtaccagcattggcccctaataacccgcgaaacctaaaacctgcctccagagacgtaccatatcccatccaactccagcgagatgcaaaccacaccacgtaacccgggctgttgcctttatagctttgataccctccatagcacaggtagtgacagggcaaactctaatgacagaaaacccccacccgatggaaccataaaaaacataatagacaagatgatttaattcttcagctaaaacagcggaagaggtgatttattatatggttgttacactcggccacaaataaacacagaaatagtccagaatgtcacaggtccagggcagaggaccaacatgggcattttgtttatgagcaaggtgggtctcagaggtgatcggcgatcagagggcgatgaagttctagatccattgagacaagctctagacagtagcatgcagtcccacaacttgtaccagcatccccagcgtctggcattccatgtttctgctcctgtggcctccacggtgcaacaagctagcggtttacttggacctctgcctcatctttcttcttttgcgcttcagcctgaaaagcagacacaggaatggaatacacctcaaaccagagttgcctttccctcccacattaaatcaaacgtccacataaagaatgaggtggtaaaatgaacaagcactacggttctatcgttctctgttctgttaaatcctggctccagggagaaaacactcaaacgtttttctcctaaagatcttttaagatttccaaaccaaatgtttctcctaagttttgtccaaggaacttccctcctcctgggctggcaaagtctcaacgtacctgcgcattcgcttcttcctccactagcaaccgatcacaagcagcagataattaaaaaaaaaaaaaaaaaaaagggatgaagcttattagtaggcttagcaaggatatgaaatgcactctttagaaccggacagattcttaaccaagaagtatgaaagattggtcgtaacaactacatcagtaacttggacaccctcccaacataagatcagaattccacccttttctaagcccaccctctctacccatagcacttaaccgctagctctctcacaaactaccttctctctcccaccagctcttgggcacccttgaaacccagtagttcaggaggtatggcggacttgccttcgtctcctcgctactactcgccaactcctacctcccaagcttactaccaggaaccgctcaccttggctctcatggcgcagaggtttctacagggaaagagagaaaggctacagttagtttgctgtgatgatgctaagtgccgaggtcagatgtctatggattgtacacggaatcccaacgcaggaaccaaaaaacactcacccaaaaaaatggcgctaaggccgagagaaaggcgaagttccgtctacggctatttaatggagcgccgggtgtcgtcacttccgctttcacgccctttgccccccccaagggcggggctacccaatgggcgtaacagtggttttcggaccctcttgtagaagggtaggttgagttagttctttcggaagaccgagtatttggttttcgagttaccagttcccccccagatttagtatgaggacgctgtgttatttaaacgtcagcacctatttccaatattggacctagaggtgcagacggggaaaaaatagtgaccgccaccttccctcgcattgcttcttgggagttgcagttccctggagaagtcctccattttgctatggataggcgcggactgtacagaaattcttgttttactggtttgccttcttttctttctttctttctttctttctttctttctttctttctttctttctttctttctttcttttctttctttctttctttttttcttttttgagacaggatctcactgtgtcacccaggctggagtgcagtgacgcgatctcggctcaccgcaatttccgcctcctgaatacaagcgattctcccgcctcagcttcccgagcagctgggacaacaggcgcgcgccacttggctaatttttgtatttttagtagagacgaggtttcgctgtgttgcccaggctggtctcgaactcctgagctcaagcgatccgcccgcctcggcctctcaaagtgctgggattacaagcatgaaccaccgcgcccagccggtttgccttattttctaaaataaattgctgcagggtgattcgattccggaaccatcgaaggtcctaagatttcagaacataggaagatataaagtggggattcgggaaagctgccatacttcaaaaaatattttctcactgtttaagatagagcaattatttttcctaaatttcaagaataaaatagctgattatggtcttcccccacgatgcccgaagcaaaatatcactagagattcctggctacaatgcatcatttgttcagaaaatacgtcagcgggctgggcacggtggctcatgcctgtaatcccagcgctttgggaggctgaggtgggggaatctcgagcccaggaagtcgaggctgcagtgacctatgcagtgattctctaggggtgaagagcgaaccaacggacatagggagaaaattacctaaatctagggaaagtatgacatttggtgttaagataaagaacttcccagtttgattgtatgctcaggtgagaagcactggaaaacaaccagatcccctaagatttggctacaggaaacttttgagttaatgggggatgaaaaagaaccctttccctatagagacttcatcttacagttttaaaatactgtaacattttgtatgtgattgttacaatccctctttttttgtggtttccctttattatattccaggatagcatttcactttcaatccctgaaaaacgtttttaaaattaggttccttctaagtagttgtagtattgtcaccacccaaatatatatgacaatttttttgaaacaaaaaaaatcctagcagaattattttgtatcagttccaccaagatttcaactgatgattgccaactagtttataagctctttgagggaaattttgtttgcttgtttttgatacggaatggaatctcactcctgtcacccaggctggagtgcagtggcgcgatcttggctcactgcaacctccgcctcctgggttcaagcgattctcctgcctcagcctcccaagtagctgggattacaggcgcccgccactaagcctggctttttatatttttagtagagatggggtttcaccatgttggccaggctggtcttgatctcctgacctcaggtgatctgcctgcgtcggcctcccaaagtgctggaattacaggtataagccaccgcacttggctgtttttttctttttttaatagacttaattttttagaacagttttaggttcacagcaaaattgagaaaggtatagacatttcccacac

SEQ ID NO: 916806 - DNA, 4001 bp, Homo sapiens
aaagggggccaagaaacactgctctagtgggaaatgttctatagaacaggctatgtattatttcatttaatctccataaaaactctttgaggtaaaccctcattcccatcttatctttttttgagatgaagcctccctctgtcgcccaggctggagtgcagtagtgcaatctctgcctcccgggttcaagcgattcttctgcctcagcctccagagcagctgggactacaggcacgcaaccagctaatttgtatatttttactagagatgtggtttcaccatgttggccaggctggtcttgaactcctgacctcaggtgatctgctcgcctcagcctcccaaagtgctgggattacaggcattagccaccacactcagcctcattcccatattatatgcaaaggaacaaagcacagacgagtaatttaaattacttaagattaacagtaaatgttgaagccaagttacaaacccagagccctttattttctatcagaaattctccggtatgcagaaacttacagtatctaagtattcaaaaacatcttcacagtattcaagcataaacagaaaatccaatttacagtccccacatcttaccattttgcgaagtttaaccacccgggtaccgccgttcttgtcaccaccaactggttttgtaacagttgcgagaaccttctccttctttttcttttcaacctacaaggacacaaatgcatcaacagtaagagaatgccaattaaggttaagacataatggtccgtggtcctcttcccttaccttggatttagcggctgagtacttcctcttgtacatggcctttctggaatacatggcagatcgggaatacctgccaattcctctgacaaggacagggttgcggctgcaatggggcttccccttcttgggctttttagctttgaggttaccctttttcaccttgccaccagcatcaaccttcttggcttcgggtttcttctctttagtatctggcttctcaactttttcacccgccatctaaaaatatttttttgtagataaaaaaaggcatttcaccagtcatctctctaacaagacaataatgaacctgtacatgaatgggctgggctccccagactacaatccctcccccggtaagatacaggccttcctctcaaactctacccattctactccaaccttcactatgactcatttggggtttgtctccccaatacactataaactttttttttgagaatttgaaactacctcacacctattaggttttttgccaaatactgagcggtcagaagtccgtacaaccattattttttattactgttttgcgaattagaaaacttagatgcagaatgtgtccacaggttagaagcaccaagaccagaacttgaaatcccttactttcagtacctttcgtcttaacccttaagaccagtgtctcttttcaagaaactcgatttaggaattgcggacacaaacggaatcagcccaaattgagccagagaaaaagatcgcaaagaccaagaggcgacttccggtcggggacgctgggagacgcgaaaccttttggcttcagtgcggaaccccaacgtggctgcgacaggctcagtgtcatcctctggaacccaggaccaggaacacagtgcacgcgccgtctccccgcttcctctaacacccaccagtctgctacgggtccccgaaagggcctcgttcccccagcccaagagagtggcgaagaaccggagggagccactacggcattctacctcaccctctttgtgccctgccgcaaacccaaacaacaaaaatgaagcgtctggaaggcctctcagttagccttggacatgtccgacccctgtaggtgtcgactggatgccctccaggttcggatggcgaaggattgggagtcctgaactcaagtcttgcagacaggcccgcgattcttaccttgcaagatgggaaagagaattaaggtcccggcttccggtctataagcaatcatgggaagtgcgagtctcacttccttccggatctggggcatcatggggaatgtagtatttccccgttaagaaaaaagtagtaaatcctaggccgggtgcggtggctcacgcctgtaatcccagccctttgggaggccgaggcaggaggatcctctgaggttggcagttcgagaccagcctggccaacatggtgaaatcccgtctctactaaaaatacaaaaggtagccgggcgtgggtggtgcgtgtctgtaatgacagccagtcgaggcgcggaggcaggagaatcacttgaatctggaggtggagattgcagtgagccaagatcgcgacactgcgctctaggcaacagagcaagattctcaaaaaagaaaaaaaaaaaaaaaagggccggacacggtggctcacgcctgtaatcccagcactccaaagatcgtgccactgcgtgccaccgcactccagcctgggaaatagagccagactcagtctcaaaacaataacaacaacaaaaaaaagaaaaaaagaaaaaaaattagccgagtgtggttgttagtgcctgtagtcccagctattcgggaggctaaggcgggaggatcacttgagtcttggaggtctgggctgcagtgcagtgaactctaatcttgtcacttgagattaggtcagtggtcccctcttcccttaccttggatttagcggctgactacttcctcttgtacatggcctttctcattcccgtcctccggcctggcctacagaatgagactctgtcttaaaaaaagtaaaaaaaaattaaagtgaggataacaatagtaacttacttcataaggatgttgggaacattaaataatatatacaacagtactgagaagcatatttgattatttgatggatggtaaatgctacataagtgttagctctttttttttttttttttttttttttttttttttttttgagatggagtctcgctctgtcacccaggctggagtgtggtggcacgatcttggctcacggcaacctctgcctcctgggttcaagtgattctcctgcctcagcctcccaagtagcagggattacaggcgcacaccaccatgcccagctaattttttgtatttttagtagagacagagtttcaccatgatggccaagctggttttgaactcctgacctcaagtaatccacccgcctcagcctcccaaagtgctaggattacaggcgtgagccaccgcacctggcgaactgttagctcttgttattgtcaccatcaccactacaatcatctgatcatcaacatcctagttgttgtcaagtattctgctaaagtttatgcatgggagataataggcaatattgcatacaatgtgccttgctttatttcatttaattctcccaacaacctgtgaatgatactattatgaggaaactgagtctcaaggacattaagtaacttgctcacagcatagatctgattccaaagattgcactcttaaccattaggctgcaagattaaagagatgattaatgaagatgcatgagagttttgctcatgttagaattaaaaataagaatatttattatcttttacaaaatacacaacacagtatatgtgatagttctttactgcttcaaagcccttaagccaacatgtacacatttgtaataccttctagcttgcgttttccattttcctccattcgtttctttctggttgctagagcttttcaccttgattttttcagatcgaaaccacctgcttcatggctgtgtctctgggaatcatttagcctttttctggttctgattcactgaggatacaaatacaatgatcagatgaacactgcccttttttttgagaatgggaatgtcagcagctttatttgtttagcttcctcagcaaagcacctcttagaaacttcaactgcagaaaatgtaccacaatgaatgaatgagatgcacagttgcttacgtgggcccctcaaaattgctggcaatctcagataatt

SEQ ID NO: 916807 - DNA, 4001 bp, Homo sapiens
agagaagtttatgggagacaatcacctttcagcaccattctccaggaagagggagacgggcactggggagaaaggacaaaactgccaggggaactgacttctccagagctgggttgttttccaggtgccctcggatggccttgcgcatcatggtgttcttgcccatcagcaccacagccttcccgcgaagggacatgcggatctgctgcatctgcttggagcccacattgtctgctcccacaatgaaacatttcggataatcatccaatagttgctacaaaaaacaagccagaggagccaagtttaacaggaagagagagggaaaaaatgccagaagaaactgaaccccacaatttgtttccatcccactccctttcttctaagcttttgaagtcagagggagattgggagctacgttgtaacactgccaaactggatgattggctagctgggtatgaacgctgaaaattaggtttctacattcaatcaaggagttttttctttttttacttagtttttaatttttcccaattaccaggcatgcttctgattcactaaaatggttaacaggataaaaaaggaatgttccaagtaagttggtcaagaggagggctagattcacagcattaaaagcaccacgttaagcaaatatagcaacattattatttgtaaaaacaatctaggcgtgtttatccggattgttacacaattcctttgggttttgtgtctgaaaaccttctaagtgtgggaaaatgtaatacaagctatgctctacaatgctgcctaattgcttaagcgcagtacagtcagcatttctgggcaagggagacccacctcaaaggccatccaaaagtcattggacacttaagtttcttggctgacaggtcctaaatatgcaacagcttgcttccttacaatgagtcattcctgacctcagaccttctcaaaaatggagtaaaactgtaatgtgcggccgggcgcggtggctcacacctgtaatcctagcacttagggaggccgaggaaggtggatcatgaagtcaagagatcgagaccatcctggccaacatggtgaatccctgtctctattgaaaatacaaaaattagctgggtgtggtgtcgcgcccctgtaatcccagctactcgggaggctgaagcaggagaatcgcttgaacctgggaagcggaggttgcagtaagccaagatcaagccactgcactccagcctggacaacagagcgagactccgtttaaaaaaaaaaaagtataaagcgcgctcttttagaagccagacagacctggatacgaatgctgtcatcttaggacccacttaacttgcctgagcccgtttatctgcaacagaagggacctatctcaggaaattgttaactaaacagtattttcccaaaaatggcctaattcagtagccggtgtgagtagaccctcagcacatagcagctgactgtccctatttgcgctggggcaacatgaagagcagaggcgacccaccctgcacttacgatgatcttaaggaagtagttggacttccaggtcgccctgtcttccctgggcatcacggcggtgcgtcagggattgccacgcagggtttaaagacgatgtcactgaggagagacagggagctcaggcctggtcacgccgacacccatcccgcggtcccgggcctaagaggagcaggacacgcgcaatcgcccgccggccctgcctagggcagcggccgtcatctcggggcgtgcaagccgccaccgaggccccaggcggaacagaataggactccatgttcccaaaggcccccaaagacccctccatgcttcccgccggcgacccctggcgcccatctaactagcacacgaaccttccacgaggacgcctggcgagagaagggcctcgcgcccgcgcgtgccttttataatgcgaacaaagtagccaatcagaaaccgcggatagcgctcctgtctattggctgcgccatcgcccgtcagacaaagctgaacgaatacaggcaaccattggataatatcgctgccactccagccaacggaaagccgcctttaagtagggtcgcgaaggaaggcgctgcctcgcgttggaggagcttgctctgagctgctgccacctgctgggctggagctggagctggagctgcgaattcggagtcccggttccctgtgccacctggcgagctcagcaaactaaaaggtatgacgtggagctgagacataattgcacatgcttagaaacagaatggtttctctttttttttttttttttgagacggagtgtcgctctgtcgcccaggctggagcgcagtggcgccatctcggctgactgcaagctccgcctcccgggttcacgccattctcctgcctcagcctccggagtagctgggactacaggcgcccgccaccgtgctcggctaattttttttttgtatttttagtagagacggggtttcatcatgttctccaggatggtctcgatctcctgacctcgtgatctgcccgcctcggcctcccaaagtgctgggattacaggcgtgacccgccgcgcccggcctcagaatggtctctcgtcttctctagtttttccgcctaccaaaacagagggatcctttaaaacctggccgggcgcggtggctcacgcctatactcccagcacttcgggaggacgaggcgggtggatcacctgaggtcaggagttcgagactagcctggccaacatggcaaaaccccgtctctactaaaaatacaaaaattagccaggtggggtggcgcatgcccgtaatcccagctactcaggaggccgaggcagaagaatcgcttgaacccgggagctgtgagctctgcagtgagctaagatcacaccattgcactctagcctgggtgacagagagggactccatctcaaaaaaaaaaaaaaaaaaaaaaaaacctaagtcagctcatctccttatctgcttaaaactttccgtttcctacagagtaaaaatctaaaacctaaagtacctacaaggcccttacctatctgtccctcacgcccactctgatcatctcagatgttttcctcctcacttacttgctttctacccagatgatgctctgctgcttttccagagcaggctttacttgggggcttttgcattagccattccctcttcctagaaaactagccaacaaacatccatagaataattcacctccatcaaatcttttttttttttttttttttttttttttttttttgagaagcagtctcactccgttgcccaggctagagtgtagtggagcaatctcagttcattgcagacttgacctcccaggctgaagtgatcctcccacctcagcctcccaagtagctaggactacaggcacacaccaccacgccaagctaattttttgtactttttgtatagatggggtcttgccatgttgcctaggctgatgtcaaacttctgggctcaagcaatcctcccaccctggcctcctaaattgctgggattacaagaatgagacaccttgcccaaccctgagatctctttttttttttttttttcactgaaacctatggaattatgtattaaatgatccccaaagaatcagctatttcaaaattaaaaattattacaaagagcttcatacatcatgttatatcctatatcacacaccataaaactgtcagaagtaggccgggtgcgggggctcatgcctgtaatcccagcactttgggaggctgaggtgggcagatcacgaggtcaggagatccagaccatcctggctaacacagtgaaaccccgtctctactaaaaaataccaaaagttagccaggagtggtggcgggctcctgtaattccagctacttgggaggctgaggcaggagaattgcttgagcccaggaggcagaggttgcagtgagctgagattgcgccactgtactccagcctaggtgacagagcaagattccgtctcaaaaaaaaaaaaaaaagtta

SEQ ID NO: 916808 - DNA, 4001 bp, Homo sapiens
gggtctcacctgccttacagcttaacctgaggcacagaccttaatttgataccccctgcaccacaggaggaagcaacttttttttttttttaagagacaaggtctcacttttgccctggctggagcgcaagtggtataatcatagctcactgcaacctcaaactcctgggctcaagtgatcctcctgcctcagcctctcgagcagccagactataggttcacactatcatgcttggcttccttctcaatattttttgaagagatggggtcttgaactgctggtttctagcaatcttcttgtcccagcctcccaaagtgttgaggttacaggtataggacaccctgaccctccaggatgaaattttaaccatcactcccctggcttccattctccttttaaaatactcaccgcaggtctaaatcggggtgggggtgttcggtccttgcgggcttcacgagatcgattcctgactactttgctgtgaattgcacaactcacacagtaatgtagcttcacatacagcttgggaagcacataggctaaggaatagaaaatagagttatactggtattatatacctaccttgcttttttgttacatgaatgaagagcaccttacatgtttacgtcaattaaaactaaacctatttaaatgcctgtcgggcacataaaagcacccccaaagcacctgttcagcccaatacctgagcacatatgtataaccctcagttttacaagtgaattaacatcccacgtgagttcatcttgacaccgcaaggaccagactgacattctaaatgcaataaaccaataatccagttccttctacacctacacccgccctaatgcctaccctgaaccttgctctttctataaaaggaaaaaaacaaagcgacgttcttattgctccaaacatcatccttgcacaccaaactagacggcctccattctcgaaacgttgaagacattcttcctcacctgtatattttcacaaatattcaaataatcaatagcacaagaattgtcaaatttaccaagtttctagtttttgcaatctcataaccgaaacaggcaaacctttacctcagagtaaaggctgtgcactctatcacaaagtcaccctctgcccagaaaagaatcaaaacggcaaacaagagaattctcttctaccagtaacaaccttaaatacgtggaaattgcctgagaggctccaaagaacagagcctccaaaagggcgaagttgggcgaaggctttaagatactgggatcctcacacagttcgcgccggtgacccacttaccatcgaagacgctcgcttcagaaatgtccctgactgctgcggcctccactatgtttcgaatgacgaatttcttaatggccttgtccttgggcacgcatcgggcacagttagtgcagcgaataggctgcacgtggccgcggccctttttggcacgaccattgttccttcttttctttgtctgcgacaggatgggaaaactgttaggaaaacggcgcaactcacccagcctcagtccctttccggccacaagccgcaccggcagcctccaggaaggcgccgctcggatctcctgtttctccgcaaatcccgccgacccccagagcaaatgaaatgtacactcggtccacccctcagccgtgctccaggctctcacttccccacaatcccagagtctgcacccgaacccccaccctcaccacgcaagaagactcaccatcttggaggcacggaccggagagaggagacggtgcctggcagggccctcctatatagcatgagatccctacgcggacaccgggagaatccttaggagacgggcttcaagaacggcaactcactttactcaaatattcctttacattcagcatttctgctgaaatctagggtggaaatgcgttcctagtgtttatttatccatggaacaaagtgcacatgggactatttagccggatggcggaagaaaatcgaggttatgtgtctcccagcaagccttgcgccgcgccgactcggaagcaattctggacgatgcagttttccggtatacgcgacgctaggcgtgaaagttgccagacgctggaccacaaggcgcactcgttattagaggccagagagggacagatgcttggtgggaattgtagtgcgaagccaagaggctcccccctcccccccttcccccctgccccaagtgcttagaccgaaggcggcgctgcgccaccgggggacgccctgggctcatttctctgacagtccttctactaggtaggtgtaggattacgaagaggaaggcctgagaggaaacaagcattttgtgaatccctccttccaatatggagaaaatcccacaatgaagtgcattgaggctggggctatttctcattcatctttttatctctggcacagtgcctggccctgtggtaagcgtctttataaatattaactcatttaactttgagcaagcctataggtagctactattattatcctcactttaaagattgaagaatttagcccggcctggtggtgggcgcctgtaatcccaggtactcaggaggctaagacaggagaatcttgaacctgggaggcggagtttccagtgagccgagatcgcgccactgcactctagcctgggtaaaaagatcgaaactctgtctcaaaaataaataaatcaattaaaaaaaaagattgaagaactgacgtgcagtaggtattctggctccgctgtactatgctgtatgtcacctaacaaatggatggaggaatagcctggactaatgacttaaacgtttttcacccagattcatagcacgaatacattttacattggtacccagtacacacacaaacacgattacatgcacatgcaaaactgaaacacaagctttatgaaacgatacttacccttgtcataggtgtgctggtatgttctattctttatttttacttaatctttctgttctctattttaataaatgctgatcaaaaaccacgaaaattatttcaccactcattagtgaatctgacccctaattgaaagattatgtgtaagctccatttacctctgaagagccatcggaaagacttaagccttaggctgggtgcagtggctcacgcctgtaatcccaacactttgggaggccaaggcaggcggatcacctgaggtcaggagttcaagaccagcctagtcaacatagtgacaccccacctctactaaaaatataaaaattaggcctggtggcgcacacctgtaatcccagctactcgggagactgagacaggagaattgcttgcacccgggaggcagaagttgcagtgagctgagattgggctactgtgctacagtctgggcaatagagcgaaactctgtctcaaaaaaaaaaaaaaaaaaagcaagcaagcttcagcctggcaggaatggctgtccacagccaaccacccagttgtctccaaagttgaagacactagggtggcaaggggacctcctagcattcagacccaggatggtacagatggaaaccattgttcatttatgactcactctagagtttgaacacaccagattcaccttccctccagcaacccatcatggtttcttttaacctttaacccacttcttggggctaaaatctgttttcttactttcttttttcttttcctttctttttttatttttatttttgagacagactcttgctctgtcacccaggctggagtgcagtggtgccatctcagctcacagcaacctctgcctcccgggttcaagcgattcttctgcctcagcctcccgagtaggtgggactacaggtgggcgccaccatgcccagctaatttttgtatttttagtagagacagggtttcaccatgttggctgggacagtcccgatctcttgacctcgtgatccatccacctcagcctcccaaagtgctgggattataggtgtgagccactgcacccggccccagctaatttttgtatttttagtag

SEQ ID NO: 916809 - DNA, 4001 bp, Homo sapiens
tctaggggactgtctttttattgaacaaggcacggcataaataaatgtttaaattcactttttaaaatactagaacccggccgggcgcggtggctcactcctgtaatcccagcactttgggaggccgaggcgggtggatcatctgaggtcaggagttcgagaccagcctggccgacgtggtgaaaccccgtctctaccaaaaatataaaaaaattagccgggtgtggtggtgggcgcctgtaatcccagctactcgggagtctgaggcaggagaatcgcttgaacccgggaggcggaggttgcagtgagccaagatcgcgccatcgcactccagcctgggcgacaagagcaaaactccgtctcgaaaaaatacaaaaaaacctgcaacccaagaaaaatagtattactctttaagtatactgaggcccaaaacactaaacaaaggaagacagtaaaagaaacgggtttaaactcaatcacctaaataatagaggggtatgggggaaaaagaaaatcatctgcctaatcccaggcattccaatcgttaggaagagcaaactttaaaactatcactatgtttaagagtcataattattatcgaaaatgatgtaattttttagtcagtaaaaaggaatgcaaaatctttacattttccttttaacggaataaaaatgaggtaagcacaaaataatgtggatccgtcagaattgggtatcttatacacacgcaggcttattgttcagaatagataatttacgaactgtagctcctctggggtcaacgaagagttttttttttttttttttttttttttttttttttttttgagacggagtctcgctctgtcacccaggctggagtgcagtggcgggatctcggttcactgcaagctccgcctcccgggttcacgccattctcctgcctcagcctcccaagtagctgggactacaggcgtccgccactacgcccggctaatttttttgtatttttagtagagacagggtttcaccgttttagccgggatggtctcgatctcctgacctcgtgatccgcccgcctcggcctcccaaagtgctgggattacaggcgtgagccaccgcgcccggccaacgaagggtttaaatttaaaggaacaaggtcagtgacaagacttaactgtaacgcttctcggacttcaaattgattacatcacgggccacttcggaaaccgcgcatcagtcagaattggtagttccacaaccttttaagttgaattttcactccctttcagcaataccttcctagctcgttaatacacaataataaggtttacacggacgaacactaattgaaattatgcaactagaagcatctcattgagcgtacaaaaaaaaaaatagctacaagtcgctctcttctcccacactaccctttacagacactgcctttttgacccaatacttttcagagaccactcctgatcgtctttctcttccccagcccctttctccaccgcaaattctcaggccctaaaaaaaacttagaataaatcactagccagggtgaataagcgaaaatggaggaagttcagtgaggcgaaaggaacgtagggttggggaagagaggaggaaagttctggaaaaaaaaaggcactccctgcggctccccacccccaccaacaccgccttacttccccctccctacagcaggcagccatgatggcgggcgcagaagaaggccgcggcgccattttgtctacacacatacacacgaacaaggttctgggagccgttcacccactgttggaacgtagcagaaaaatatccctggctttaaactcagattcggtacctaccgccatagttcagagtcccggccgctagagcggcgcctccacttgtcgctttcaacagtaccggccgctccgaagcttcgcctcagactaaatcgctcgcgcgagagacccggatggcacaaaggcgaggaggcccggcgcgtcgcacagcttgctgggagaaaaaggggcggtaacaaaagtttctataacaacgcaattcgaggcggtgattgggtgttctttcataggggagtgtaaagaccgtgaagagggcggggccaagaatacacccccggaatgcgcagtcgggagaacggaatgggcggaactcagggtggggcaacttcctatttcgagtctaaagtaatcttggtctcttccggccgccgtaaaggggttgggtttagtgttctcccgccaatttaagcctgtggcatggaacctaaagactagaggcggttgtgtgagtcaggaagaggggccagatatctgagtgttcctctttagtttcttcaattgcaggtgaggacggggagctgcgctgtgtagggaactgggggtgggttcaggacgaagtagctgcagcctctgctcagttcctgttgttttccccttgacgctggcaggagagaggttggagtcggtttttgctggcggcgatgtccagcggagagcgtttaagtatggaggcctaactgacaagtgtttcatcttgctcattctctcgtattcgcgaatctgttctgcattccgccgccagagtgatctcaaaattataaaatcagaccactcgtttgctgagttccccttctaccccttgtactgagaataaaattcaatcttgaggtcgaggttttattggactccactgctctctccctcactgtcttctgcttttgctttgacccggcagcagcatcaaacgcttcctacccagcctccgagtctttgcactctgttccctctgcctacgtcgcgttccgcctaagttttgcgtacttcttgttattcaggtctcagctcagatgtcacctccttcccttcccaaacaaatccttcttcagcgacgcctcaccttatccatttaatcactgtttccttcaaatcatttagcactttttgtaattatttgtgcagttgcttttttgtggaggtagcataacaagatacgtattaacaattttatttttgtccgtttttcccgcaaaaacataaacttcataatggcaaagacattttgtgttctgttcaagctatattcccagttcctagaaaggtgtctggcacatagtaaataggtattcaataaacatttgttgaataagtaaatatggcagttacgggcggtttctctatttcacagatgtgggaaattgagacccataaaggtattcattccaacctgtccctccttcttcatctcctcactcccacccaaacaccagccactgaaacttctctattctccaaacatgttttgtttctgttcccttgcttatgctcttaggaagaactctttaaacatttataaaactatgatcttcaattctcagcccaataacaaattagctaacacctaaaattgaatgtttgccatcaaccaagcattgttctgtgaacatttaaaactcaaaacatttggaggctgaagcagaaggattgcttgagcccaggagatcaaggccagccagggcaaaatagtgagaccctcgtctctcaaaaaaccagaagtgaaaaatagaaaactccttcaggtgggtacaactaaattagtcccttggtattggtatccatgggagattggttccaggacctcccacagataccaaaaccctaggatgcttaagtccctgtcattaaatggcatagtatttgcatgtagcctaggaacatctgcctgtatactttaaatcatctcttgatttcttatcttgcgtaacagtgtaaatgtgctatgcctgtaggtgcaatctagggatgtggaacacatggatattgacggcaaactgtatatatatattttttttccaagacggagtttcactcttgttgcccaagctggagtgcaagtggcacgatctcgacttactgcaacctccgcctcccgggttcaagcaattctacagcctcagcctcctgagtagctgggattacaggcgcacaccaccacgcccggctaattttt

SEQ ID NO: 916810 - DNA, 4001 bp, Homo sapiens
cccagctaaaggcatgagttcttaaccagaggtccatggactcctcggggctacaaggtagttttatgaagcccctcaaactgcatgcaaaatatgtgtacatgcctttttctggggagagggtccatacctttcatcagagtttcaaagatatctgtgacctccaaaaggttaagaagtgctctagagaaaaagcaaagacaagcaaatgtgattaaagagcaagtcctttttaggctgtcaggagtgcctaatgttctcttagactgtaacactgaaatcaggtcagaggactttacgtaaaagttacttatccaatcaaatacaaattttatatagacctgacaaatacagatttgatggaaggaggaactccataaaccaacacaatctataaatgcaagtaagtcatcgggcagctggtgacttactccagggatttcaaaaataggacaaataggaagaaaatattagctcttctatatatagttcctttttatctcattcaaaaattccttttctgtgttatattttataacagtccagaagtatacaatttctataagtacagtatatataaacaaagtggagatgattgctcaattttttttaactcatcacaataaagatcaagagaccgctgatatagtctatgcatttcagtatcatcaagttaacaataactccagaataacacaaaaacccactaacagagtttagaatccaagagtaagaaaaacatcagtttcacagaaagactaattggggtcaactaataagtgactaaagaagggtcctctccctacccttactacccttaagctttcttaacagcaacaaaaacaaaaaaaaacttttcgagctttaaaggatcacttttcagtttcagctatatcagcctggtttgtccaaaacatctaatgggaaaactacttgtgaaaccacaaacagacaattactcaagatatcttaatttaccctaaaagaaaatactttttaaaatgttcttctttttaatatatttttttaacttttttatatatctaagtgtgaaaaaactaccaagagtctcataagacaatttaaaatagcttctgtgattcagtgtcagccaatggtaacaccaggagatgcagggcccacccgagatatgaaatggaacagagataatcttaaccttggaattgtttttcccaaatattgcaggtgtgagttctctctggtggttggagatggtgtgtgaggaaggctggcgggccgagagccgcgtgacagaactcgaaaacttttaaatctgaggtgtctgtacttctactattctcaagacctcctcaaccccaggcttctaaggcgagaccgatcttctgagaggcctctccctgtttcaaaattcggcttggggcgtaatcccacctagaaaaggggagtggaagtattttctgagtgtctggtacctatttagacagaaatacacaaaaatgccaccatttgctaacagggaaatctcagcttcggacgacagactggaaacatcatcccagggaagaaaaacggatcctggctccgacatggggcaaaaaggagggaccaactgacgtaatgcagccctgaaaagcaacgaagagtataacaggtagaaggcacttacacaacccagtggggaagggtgacggacgatacaatgatgaaggaagcagaaataacaaataaatatagcagtaaagccgtgaggagaaatgggaaattagggaaggcgtagtgtggaagggtggcacaaaagagctacggcgggagccgagaaacgaagtggaaaaggctgcacggagaagacgtaggagaaggcgcaagctaccctgtagaattcagttcctagaaaagtccaactcagcccttccccgattcacggtacctttagcttatggagctccaccgtctcggtcgccatcttgttacccctcactccactaggcccccacccgcggcctccgcctccaggagctcccgccttaggcgtagagatgcaaggctgaccaatcgttgtcactcttgctcccacgccataccatcagctcttcccattggtcaatagctgacgtcgctctcacttctctaggcagcttgccccacctctttcaaaaggtggaactgggagaggggcgggcactgtatcttgcgaacgacagaaatggcaaccaactgtgcttctgcattacagaccaccaaccaatgggtggtggcagcgctgattctgttcctccaataggaaaggggcagaaggagaggcgttacttcctggagacttcaggtgtggtagccggcgccgcgcccatagccggacggggatctgagctggcaggtaggagctgcaaagactgtaagggttgctgaggaaaaatggtgggaggcgaaaggggcgccgagggagtggtgacctaaatactgagaggggagcgctgaagggagccctgaaaaaaccgatgaacatgaggaggaagctgggaggggcatggggcgggcttaaggaactggcggtggggctggggcgggcaagagccgcttcctaaccagacatcatcagctttagagctaccacaattttaaagatccgagttcagataatcactgctgcccctggagtcagagccaaggctccacctttcgaggtattgagctcaggtcccttcctaacccagtccagaagccgtgggcaagttgttgtcgtgccccacgcttgagagaagtaatggggatgcagactgtttacatgccacggaggtgagagagagggtggacaagccccagagaacaaagtggggaccagagtgagctttactctgtcatcccttcttagtggttctttgatgattccatgactttcgcctggaattctgggtgtacgtgacctcttcatggttattaacttcttcagcaaagtcagatactcctatttcccttgctccctgaagtgagtgccccaagcctacacatacaccttcatgttacagttgacgtgtaaagatcagagcaataatgactatgtctctgaaatgtagtgaggactcttcttgtcttttaaagttttccccaagtcttcagtttttattttctgcgtgatgggtaagttcttcattcccaatagagttcaggggattggggctatctgagagacaactgggagatagctcaagaggggttgagaaaaaactgagctggactcctgcctgatcccccattacggctaggatgaatgtgggggtggcacacagcgaagtaaaccccaacacccgagtgatgaatagccgaggcatctggctggcctacatcatcttggtaggattgctgcatatggttctactcagcatccccttcttcagcattcctgttgtctggaccctgaccaacgtcatccataacctggtgagcactaaaccacgcccttgtacccaccccagggtttcccaaccaaaagcaaaataaaatcaccaattgtttggggatttatgtgttccttttgggatcttaacataattctttgactgaaaaactactttctgcccctcacactgccaccttccctgttcccaggctacgtatgtcttccttcatacggtgaaagggacaccctttgagactcctgaccaaggaaaggctcggctactgacacactgggagcaaatggactatgggctccagtttacctcttcccgcaagttcctcagcatctctcctattgtgctgtgagtctatgggggaaatgagatatgctgggttagaaagagctccaagagccaggtagaaaggcccatagggaagctgttaaaaagcagacttctcatctaaaaccctttgaagatattatggtatactagttctaagcctacagagagcagtaaaatgtagattacagtcaatactgtaatcaagcattccttgctgcctccttggtagtaaggaaatgaagggactgagaaaagataagtgccaaataaaaccaaatgatt

SEQ ID NO: 916811 - DNA, 4001 bp, Homo sapiens
gcgtagcggctcacacctgtaatctcagcactacgggaggccaaggtgggtggatcacctgaggtcaggaattcaagagcagcctgaccaacatggtgaaaccccgtctctactaaaaatacagaaatcagccgggcgcaatggtgcgtgcctggatcccagctactggggaggctgaggcaggagaatcgcttgaaccagggcggcagaggttgcagtgacacgagatggtgccattgcactccagtctgggtgacagggcgagactctgtctcaaaaaaaaaaaaaaaaaaaaaaagagagaatgtgctccatctcttctgtttgccccctccaaaaaacaccctaccctctcctccctgccctgtgtccccgagtatagacctcatgcacaggtttcctggctctccagcttccagatgggtctgcccagcaggaggcaccagcagaagtttggtgggaggaagaaagagaggtcagggtatttcttcccccacctcaatccttgacaggaaactggggctgcttcccttgaacaaagttatcagcaggtctcaggtgccctctccacacaattcagatcacacccttcaccccttccggcccaaagatggacaccaggttctggagttaccagctatgggatactaaaccttcactcccgatttccctacccacacctttattgagtttctctcagatcatcctaatttaaatgtgccacctatttcctgctgagatcctggattatacagtagatatcaccacctcataaggttacaagtgagagaccatgttatgactagatgctaggcactgagctatagttactgttacaacaattatattatgcagaaattgttgctcccaatctgcagataaggaagtcgagagggtgagagaaattaagaaattcttacaagcacatacaagagttgaacagctagaactgaggccttaacctccagaaccagaaacctttccatttctattatcaccatcgcggtcaatatttttcttaccacaagtttcatcatcgccgtcattcctacataacaaaataacactctcttgcgaatgagtttatttctactgttggacgtgtggttaagagtgggagttctggaatgggatcaaagtacaaggcctgacttgcaggaagtgttatcttgagcaagaaactttcctccacgagcctcagtttcctccagtaaaatggggatagataacagggcttccttcacagggtcgtggcgaggattcaatgagataacgtttgcaaggcaatgggcaggcagtaagcactcaaatccgacaggagctactgtcacgaaaagcgggtttgcagccttggcggctttatcgccgccgaggactagggaggcgggccaggacatggggacccgaggacctgaaagactggaagatgcccgctgcccacccccgggcccacctgctcctccagtctctcaatctccagctggtttttctcctcctcttcgtcatattcccactcgtactccccgggggagctctccgcggaggaagccatggcgtactcatccccatcgctctcgctcacgccttcctcctgctgatcccacgctggccccatggtcttgtatgtcgcagcggccacagcccgcgataacaccttcctccttgtcctagccgccttaacctcatcctcctctccgtcagccttgggcccagccttggactcagcctcgggttctgaagccgaggtttcggccgcagtcgccatcttgcgcttctaatgactctcgggtcttcccgcggccgccgaagacccgctgaggcagaagctgcccgcggcgcgcgccttatcaaaaacccgttttcttgccattgaaagagaaactgggaacttagataacaggaaaatctccacatacactaaattcacattattttataccctgtaaaagctcccaccagatataaaaactcattataatggcatgcgttccgtcacaacttcggacagaagttgggtctttgggcaggaagtggaagccatagaggaagtcatggagcgagagtgatgtctgtagtgaagaatttggcgccatcttgagaaggtcaaagtgattcttcgattaaatgccttacttatcgcctagtgtgacctggcgcttgggtttactctccccagcaactgcgcctcaaacgcaaagaaaactgcaggtcctcggggaaggatcgatttcaccattcaagagaaaaatccatttcccagattcctcccctttatgtaaacgtctggtacctagtagacgttaaatacacgtgagttttccggttttataagatcacatactgcaaaccaacagtaaattacattaatacgcatttctttagaaattcttaattgctaggcactgacatataaattgagtttgctgttgttttagagagaaaaatagacatattcattttttttcaatcaggacatggtattcgtttccttcttaagcttcccatttttgaggtaggaaagtattggtgtgtgtctctatctctaccttgctccctcattagcaggcttaatgggcaggaattatgtctgttttgctttccgttggatccccgggtctagtagagcgccttgacacatagtaggtactcgacacagatgctggcttcatgatgaagcaattgtcctcgaattaatacaaaagggaagattcagactcagcgagccggtaccattcgtctagggacacacagccaggaaggaaccgaaccaggattctaacccaggattacccaagttcgaattctaattgaacataagtccttagcgaccttggacggacttactaaactgccctgaatctcggcttccttagctgcaaaatagggttaggaaaagtggactcggtgctcctctgcgccgcattcccgcagcgggatttgtgaaagcgaacttgagccccacactgcagaagccctgaggtcctgtctcaaccagaatccagcacccaggacaagccctccagcgacttcagaccttcccgctcccgaccccgcccgcccccgagaggcgtggtcaaggcggggccagaaggcggacgcgtgcacggagcggtaaagcgcaggcgcaaagcttcggtgacgtcagagaggcgcgctcccagctcggagccgactcgcagacgcgccccgcccctcggcgtcgctctggactggcgcaggcgcaagccggcaagatggcggcggctggggctttccgtctgaggcgggcggcatcggctctgctgctgcggagcccccgcctgcccgcccgggagctgtcggccccggcccgactctatcacaagaaggtagggacaaaagagggacgcgcggaatgccgactcagcggaggcctgggctggaggggcggccgcggggttctgcgcagctaggactgggagctgtcccctcccacgtctttgccctgactcgctttcccttgctgcgcagtgaggctcactgcaactgataaacaacagttaccgctcatcgggcggcgacttccagggggccccgccgctggccgcgacttcgtgcgtcccaattttaaattcgccaacagcccaggaggcagggtcctgttgggacttgtctttctgagtccagggacagacacacccccggagcgggctccggcttcagccactccgctgccctggccagatgaccttgggctagtcactgcgcctctctgaacctgtttccccaggtgtaaatggggggctctcagctgtcccttacaaaggatactgtgcgtggagtcctggcatggttcctggcacataggccccagcacgaggagaccgtttctgttactgctttaggagtgcataggggagtcaggcttgtaaccaacatgcgtaatgtttttgttttgtttggggggttttttggcggggaaggagggatagattcatagtctgcagccccttgctgtctggtggcacaaagtcccccagacg

SEQ ID NO: 916812 - DNA, 4001 bp, Homo sapiens
tgaaaccccatctctactaaaacacaaaaaattagctgggcttggccaggcgcagtggctcacgcctgtaatcccagcactttgggaggccaaggcaggaggatcacaaggtcaggagatcgagaccatcctggctaatgtggtgaaaccctgtctctactaaaaatacaaaaaattcaccgagtgtggtggtgggcgcctgtagtcccagctacttgggaagctgaggcaggagaatggcgtgaacctgggaggcggaggttgcagtgagtggagattgcaccactgcactctggactgggtgacagagcgagactcggtctcaaaaaaaacaaataaataaaacaaataactaaataaataaaaacattagctgggcttggcggcggccccctgtaatcccagctactcgggaggctgaggtgggagaactgcttgaacctgagaggtggaggttgcagtgagccaagatcgtgccactgcactccagcctgggtgacagagtgagactctgtctcaagaaaaaaaaattttttttagtctttttttttttttttttaaggctagtcaggtgaagcagtcggagtagaggagaaacaaagaaatctgtaactggctgtgatcaattacctgtaaacaacactgcactcggaccagtctatttttttatttttcagaaacaaggtcttgctctgtcacccaggctaaagtgcagtggcacgataacaattcacaacagcctcaaactcctgagctcaagcgatcctcccacctcagcctcctgggtagctgggacatcaagtgcacacaaccacggccacctaattttatttaactttttgtagagacaaggtcttgctacgttgcccaggctggtctcaaactcctgggctcaagcaatccttcagcctcagcctccctaagtgctgggattactggcatgagacactatgcccagccagaatcttacgtttttgctttcagagaatgtatataatgaaatcacagaagaatatccctaaataattaaacaactattaaggaaattaaagatactcccacaagaacactaaacatctcttacactatctatacgtttataataacatcaaagcagaaaataatgttttggttttcattattattttctgcctcataaatcaaaatgaatactcaacataaaaataacatttggccgggcacagtggctcacgcctataaccccagcactttgggaggctgaggcaggcagatcacaaggtcaggagttcgagaccagcctgaacaacatggtgaaaccccatctctactaaaaatataaaaattagccaggcgtcgtggcccatgcctgtaatcccaactactcaggaggctgaggcaagagaattgtgaacccaggaggcagaggttgcagtgagctgagattgcgccactgcactccagcctgggtgacagagcaagactccgtctcagaaaaaaaaaaaaattaacacatgtatttaaaattaaggcttcacatgtatatttaaaattgggccaagcttggctcgcacctgtaatcccaacactctgggaggccgaggttggcaatcgcttgagctcaggagttcaagaccagcctgggcaacatggcaaaccctgtctctacaaaaaagacaaaaaattagcgggatgtggtggcacgtgcctatagtcccagctacttggggggctgaggcagaaggatggtttgagcctgggaggttgaggcttcagtaagccatgactgcaccactgcaccccagcctgggccacagagtgagactatcttaaaaaaaaatactgtaagcggaaatcactaagaaagagaggctttggaaaactcttacctgctgaactgacggggtaggcattggagttgcaagccctgcatctccaccatcaatatcaaagaggtcattcggactaattccactctcactcaaagcagcaagcagtaaatcttgccctggctccaccatctttaaagggaaatattaaatattaacataaaaaacaaaaagtgacaaatattaactcccctctaaatataaacaatccaacaatctctattagacccattcattcagtattaatgaagaacctgccatgtctcagacaaagaggataaaagagaaatagtcttggatcccaagctcactctaaaatagaaaggatagagaagtacataaatcatagcacaagtatgcatctacaaaaggctacgggaacagagaaggaaataatgaactttgtggaagcagagatgttataaagatgacaatgcagcagagcatcagggaatcatcaggtggacaaggatcctctcgactatgcattcaaaacatagaggtatgaaagaatttgacacactttaaaaactatggctggaggccagatgcctgtaatcccagcacgccaggaagcaaagccaggtggatcacctaagttcagaagtttgagaccagcccggccaaaatggtgaaaccttgcctctactaaaaatacaaaaattagccacatgtggtggcgggtgcctgtaatcccagcttctctggaggctgaggcaggaaaaaccacttgaaccaagaggtggaggttgcagtgagccaagattgtgccactgcactccagcctgggtgacagagcgagactccatctcaaaaaaaaaaaaaaagaaaaagaaaacctctggagttaattcaacaagggtatggaagctcagaacagaagtatggggctcaggcaggaaacggcaagaggtgaaggtatcacctacagccctgtacaccatgctggagagttcacttgctcttgtgggaaacagggattactaacaagttttccgattgaggactacctgacacggcagatttgtgatttagaaagattacaagtctgggcactgtggctcaagtctgtaatcccagcaccaaagtggaggtgcaagaggttagcttgaggccagcagttcaagacctgcctagagaccccgtatctacaaaaaaatttttttaattagccaagtgtggtggtgcacgcctgtagtcccagctacttgggaggatggcttaagcccaggagttggagactgcagggagctgtgattgcacaactgcactccagcctgggttacagagtaagacccccaactcaactcagtaaagatagaaaaaaatagaaggattactcaacagcaatgtggaaacaaactaagagggagcagaagaccaggagcagaatgacatcttgggaaactgacatagctgaccaggagagagatgtattataactgcatggggcagagagaaagaaggggaaatggaatccaagatacttagggagctaaatccatcacatttagcttaaatacaaactcagaatggaagcgagaatatgaagcacgtcagagaaaaagtatgagctgatgaatggttagagtcaggccaagagaaaataaaaaataaacaccgagcccagaagacctaaaggatgagttctatggagtttgccggggtggggggctaaagccaatttaaagcaagtagacagattttagtttggaagtttttccaactataatctcaggggccaaactattctgctgccatggatttttacccattttataggggggaaaaagagctttctaaattttaacttttctcattaatttccctgaaataaccaatttacatatacaaacatacttatgaaaaatctgtactcttctcagaaaactaatttcatgttacataaatatactaattttcagctagtccatttgttctcagactgtgataaaattaagtgtcagtgtttcatgatgtcctacaaaaatggcattagccaagagtacgatcagcatgactacgcagtttcgctcttgttgcccaaggtggagtacaatggcgcggtctcggctcactgcaaccactgcctcccgggctgatgctcctgcctcaccctcccaagtagcgccc

SEQ ID NO: 916813 - DNA, 4001 bp, Homo sapiens
catgacatgttttctggcaacatatttagaaactttaaattttcttctacagttttcttcccctttatactgaagaatgtctttaaagcatgagtatacttacagtaagcaaacattcaaattttaccccagtgaaatcttaaaatgtactcaaactctcaggcaaaaagttcactatctgaatgtgaaaaactgaatgactgttaaaatatctgcaagcaccaaaaaatattatagctaaaatgcagctaccctaagaactgtttttaaaaaactcacattgcataaaaaatataaattcagattatccgataggataatataaaacaaaagaaatccaaagacagtttcaagatttcatttctcttgcttagttaaaacaacaaaaacaaaaggcccatgaactttttcttgcatcttttaaccaaaatagtgacatgatcaagccaactgccaaagaaacaggaaagagaaagcaattgtttagaaacagacttgattacatgtcaaaattttaatacaattactaataaaatacaaaaaccaaccgttattttaaaatgtactgccctgatattctgctgctgaggtaggtggtgatatgtagaaattaatttttcttttaaaacgaaaaaataatgcatttattaatatgcttttcccaaaattcggggaaaattcccaaatcggagaaaaaaatttaacatcagcatctactacacaaagcattaaaaacatttttcagcagttttgcttaagtatcttaggtcagtggtagcatgttagccaaaatgtaatccaaaatgaatgaacaacagtcagctggtagacactgtatgtaatacaatacggaaatatattggaagtatttcaaaattcaacatttgaatccgtgaatgtctaaatcaagtactctaaatcaggcgtctacttttgaaacaatacttcaaaatacgtgttggtggcaagaccgccagccatctgtaggaaatctttttaatggttcaaaattcctaggtctcagaaggggcgactgattaggctaaatttatatctcccggccccgtagttgtcagcccaggtagcgaatttaaaacactgggggtggatgagtagtttgaagttcagatcaaggagtgaaaaaggctgatgcttagaagcgccggctcttccccattcgcgcactcgagaggtcacggcgtagtaaagtttggtttcactagcgggcttggacgctcgcgaccaaagtctcccaagaaaagccgacaccgcggtcgggagcgcccggaagctcagcaggacacgtttccactgcagggaggagggtgtctgtggcggttctggcgtggagccccttcccccccccccgtaggaccctgcacccggacggggacaggcttcgccagctaaggcggcgggagacgcgtaggccacaaggaggaaatgggacagagtgcgacagagaggcggcggcggcccagggccgggccgagcctccctcgcggggcagcgagagggaaaggggccctcccggccgcagcctcccccacttcgagaggtagctccaactttcctcccagcgcacgacgtcgcacgggccgcgcgagattccgaaactttgtcagccctcgcgtcgccctaggcccgctccagcgctctgcgccggccgctaaccctcgtctctcccagacagctgcccaagcccatccaccccgcgggtcgaccagtgtttacctcagaccgaggtcgaggcgctcggtccggccgcggccccacagtaggttcccaggtcccagtcactccgctgccaagttccccaacatggactccttcgtccgctttgtggtgttacagggtctctaggacactgactccgctggctcggtccggaggcggcggcgaagcagggagcgacccaggttgcgctgctccgcgcggcttaagccaccgctactcccccttcccccgccttgtctagcctcctccctcccctcccctccctgcgcgtctccctcctcctcccttccctcgctgtcggcgcgctaaggtgacgacggcggcagccggactcgccacattctgcttactcgctcgctctggccctgagtgcatgttcgtagtacccagttgggccgcaggggggcgctggcaaactgctgtttgagaccgagaagcgtggtgggtggagtcacgtcacgcggcctgtgagcgggaggaagggcagctgcgctggaggggccttctgggaaacgtccttccagcaccgcccttcgcccacactgcggatggtgcgcatgcgcagcgcgtggactttggcctctgccctcctttggcagttttacaggctgcgtcgcggaggacaatgaaagaggctttaagggaactggacaggaaggattttgcgcagggtgtgctccttatctttatggtaatctgatattgaaaagagtgtccgcatgtttgcggtggattgagtgttcacctggctgcgctgcccacctgaaatgcagcctgtggagtgaagagtcggcaatttggaagcccacctttcctcctttctggtgggcatttttttagatgccagggggagagctttcccgcctgactccccgagcctaggggctttcccatgtcttaaccccacatcacaaaattaaatttgggccaggtgcgcggtggctcacgccggtaatcccagcgctttgggaggccgaggctggcggatcgcttgagctcagcagttcgagaccagcttgagcgacgtattaagatctcgtttctacaaaaaataaaattaaccggccgtggtggcgcgcacctgcggtcccagctcctcgggaagatgaggtgggagaatcgcttgaacccgggaggcggaggttgcagtgagccgagatcgttccactgcactccagcctgggcgacagagcgagaccctgtctcaaacaacaacaaaaactttatcattatttacttaaaaggcctccgcgttgtggttagatagtgacgtgtgtgccatcctccactttttcccccggcgggttgttaaatgttttgttttacctcggaggtattttgactttttcaaagtcactgattatttaacctcctagtttctcttctcgtcgactgcagcaagcttccggttgctctgcctgccctcagtgtcccccatctaccagctgaccttccagtcctcccacccacgcccttgtcctgcttgcggctcccgcaggactaagctctgctccccgcgcgcggctcacccaggtcccagtcgctttcagccgcgcgctcacacgttttcctgtcgcctgcccccgttctgttcgcgcgtgctgcgctctccagccaccctgacgcctgcccgggatgagtttcctccccactttgccgcggccccgccgaccgaccgcttcactgccgccttcctgcattctcgcagactacgttgcggcgtcccctgctcccgccctgaggacgtcgcttttctggcactttcatcctatgcattctgttgagtctgctcactgtctcacactgtgaggattgggacagtgtcttatcactttcataacagcgtctggcacttgctgaaggaacacatgaatggcggtcttgtcgctgtcaaagtctttggagtttttcagtgtactgtttttgatatggggtttgggaatttaggtggctttactgtatttgggatatttgaggggaaaatgagctagaggcgttaaaatgctttcttctgatggaacaacaaaattcttatgaaggacctttccctgtcaaaatcagagcaaatagtaaaggatatatactatttggatataaagaatgattataaaggatgattgttaagagaaatagtgaaaattagtgtggaaagctataaccagatcaacatttatgagccatccaacagaataagggtgtagcttttttatgtatacaatctctaggattcactctagagagtgtaactcctgatatggactcct

SEQ ID NO: 916814 - DNA, 4001 bp, Homo sapiens
agactctttacctggcataagtccccacactcccatagcaagagaccaggtgctcactcacagcacagggtcacatgcttgaactgcctgagtgatagcccctctagggaccctgcatacacacagtggggtcctggcactgcagcagccacaaggctgtcactgacacacacgtttcagtatgagtaggccacagaaaaataaagctccctcagtgtaacagagaaagcctctgagctgtcatgggggagaagaggccattctgctgattttcctgccatccccagagacagtgtcaccatccaccgggacctctttgcagtcagattacaggctttggcgggacaagatttgaaaaatcaaaaatagacacaacgtggctaagatgccctagacaactgctcacccagagaccttgagagagaccatatgttgctccatctttaaggccagctagctgggtcccaagaagtgtggcagccagatctaagcagatccttcattcattcactcattcattcgctctgtgaatgagggaacagacatgaaatgtggacaaggaaccattcttaagaaacccagtccaaagaggcaggccaaggggaaaagacgtccattagagtgacaatgtccacatcttcaccccagctctgcatctggctagaactttgataagagtgagccccagtttcccctccccgccactgcatgtgtgggttcccagggcttcaaaactctaaatggcttttagttcaaatgtgatactctgcaatctcccagcccttccctaactccaggctcattcaaacaggccacccaggcacccagggcagagtctgtccgtctgcagaccagctgaccgcctaatctgtctccctggttgaaagggcaatggtatgcaaagttaggatcagaggaaagacctaaggctgcgtgcactcagaggaccttgggctgctgcctgcctctgcatgaatctggggagaaaagcggcttatagtttccagactgaatcatggaggcagtgagcagggagaacagagtcgcgcattctgcctctgggagagggttcctatggggagattctgggcagtggaggatgctcagctgagcacctaccatgtgagctgggcacccacgtgggtctcacagaaggttcctgtcctcctgggctcacaggatacaagcaaagtgcagctctaattttaccggaccctgctaccggctgctgtgaaagcagacgttcacacactcttgggctccttcgggcggcaccacggaagcaacctgtccacactcctgatccgtcgtgggcgcccagaccctttagggcgggtcaggcgcccgggtggtctcccgtccaggcctccccaaccctggcctgcgcctccagcaaagcccctgggttcccccctagcctcagtctggggcggtgagggtggtggggaggcgggcagcagcccctcccgaagcgcctggcctccctcgtgctctgcggcgccaggcccgggcgccgattccgctgcggtcgcccacccaccgcaacgcgcgggtcctcccggcgcccagcgcccaacagcccgggtccgtgcgcggaccccctggggtctccctcacccaccttaaggacctgctgcttgatgagcgacggcaccatcacgatcatgacagcgcccagcacagcgcacagtagccccgcgacgcccagcgccccggcagcccagcgcgctttggcggagcagcccatgtctgcgcgcctggggcccacccgcggctcgcagggctccgcgcctggcaggagacggggacggcgacagagacgacacaggcggggactccgggcacgcaggccgcagaggcacggtggatccgggacggcagcgcacgcaggagcagcccggcaggtggccagtggttttatgccccatcgccggcgccgccggaccgcccccgggcagccttgggcttcaggattccggcggcaggggcggggcctgagcgggcccggggcggggtcggggcggggacggggcggggcgctgatcggacgggcagggggcggggccatggccgccaagacaagccccgccatgctgccgctgcccccacggcctcgcttccgttttggggcgggagctgaggaggcctcgtggccgctgagccaaaacgtctatggggcctggtgcccctcaccctcttgctcccttcccctttctcctaccccttcccccacctatgtctcccctcctcccagctctcccctctgagcccctcacccttccttttccctcctcctccctctcctcctctatcgggaccatcatcatggttggtcactgtgagtaggacttcgccagcccacccaggaaccccagagcccttacaacggtccacatgccccgccaccaccttctagaccctcatctccgcagtccatctccagcctcactgtccctggaagaagccccgcaggctccagccccagggcctccatacaccctgcacaggcaattctgttctcccaggtatccgcctggccctatccttcgtaacgctggtgccaccatcaccctatgactgagcaccccctggcaggttcacgttcatttgcgtccttgcattctgaccatgtgctccaactgggatgccaacccgtgaggcgggcccccccccccacgcgtcctgagctctagaacgtggcctggcagggaatgcctgctcacagtaaatattctagaatgaatgactgaggagccttctaggtgctggcccctgtcctgagtgctttgcacacaatggctccattttacaataagaaaactgggaggtggctcacgcctgtaatcccagcactttgggaggccgaggcgggtggacttcatggatcacctgaggtcgggagttggagaccagcctgaccaacatggcgaaaccccgtctctactaacaatacaaaattagccaggcgtagtggcgcatgcctgtaatctcagctactcgggaggctgaggcaggagaatcgcttgaacccgggaggcggaggttgtggcgagccgagatagcgccattgcactccagcctgggcaacaagagcgaaactccatctcaaaaaaaaaaaaaaagaaaagaaaaagaaaaagaaagaaagaaatgaaaactgatgcacagggaagcttagttaacccaaaccaagtccccactttctaatgaagagggaaaccaatgatgagcacgtgagcaaatgaatgaaggataattgcaggcaagtgctccaagaaaacagaacaggcccggtgcatggtggcccacaactgtaatcccagcactttggaaggtccaggtgagggatcacttgaggccactagttggagaccagcctgggcaacatagtgagaccagtctctacagaaaatgaaaagattaaccagccacagtggcatgcgcttgtcgccccagctactcaggaggctgaggcagaaggatcccttgagtcccagagttcaaggctgcagtgagccctgatcttaccaccgcactccagcctgggtgacagcaagaccctgggggaaaaagaaaaaagaaaaaagggagagaagtgggctggcactaagtggcagttgcccttagatgggtgagtgtatccctgaagccctccacgcccccctgaagtcctccaccacaccccacctggcctgccttctggtccctgaagtgctggccagtcccctcattttctgaatgaagttactgagaagagactcctgggttacacagggacaggagggtggtgtccccagcacgtgggtaaggcaggctcagtccttgagtgctccgagggaggctttctaaacctcttatttaactccagaagaaagcagccttctcgcagggccatccttaagcaacatgtcttcgcctgaaccaatatttacagagcacctgctatgttctcgttagacagctttgcctggcactgccttcctctaaggaggccgaatatg

SEQ ID NO: 916815 - DNA, 4001 bp, Homo sapiens
ttctaggacagggaatgcgtgctgaacaccaaaggatcactacccacaaccaccacctcaccaaccagcaaccaaatcctctttcagggagaaatgaaggccttatgggtcatgagctccaaagaaaaatgctgcagtatttcaagaaccaggttacatgtaatgtgctataaagctttcagcattttaagtctgattcccccaagattcctaccaggatggtaccgtgtggtaatgttatccagccatttgcatcacaaatcaaaaaaaaaattttttttgagaaaagaataaaagcacaacatccccccctccacatcttctaatgcacgtggagaaaagagaagtgcagagggattttgagacagtgaaaaacctaccacacccgaaatctccattggaaagctaaaacatcccccagccctaacacactgctacctctctctaaaggctctccaggttcaaacttgggaaaacagttataaaaagcactctccccctttacccccatggcccccacccacacttcctgcttccatccctgactctctggtgcccactgtgcataaaaagcagttttccttgtgtggcagagcttgctccatgctaattatttctccctccccctgactttagccagatgcaatccaaagtttcttctaccctccccccaaacagatgacatccatttattatgaacgctgatgcagaaccttggaatctccggacataaaatgtattccctcatgcttcaaaaactgcagtgtaagtgaggaagagggcatagggtggagtagtcggatggaatgcatggtttgaagaatcctatttatcgggctgaaaaatggttcccattccatcccaactcgaagctggggcccctgaaagggtctgacagtcctggctaacccctggaaagttagccaagtctccaccggtggttgttgctggcaatggaggggatggagctgagctctcaggagaaactgcagaggctttgcggtgccccaaggtaccaagtgagaactagagaggagggtccaagcccacggagctgggcaaacagtcctgtaccccaacgctaacaagaagccaagggtgctgctgctgatggtaaggtgggggagggagaggagaggaacaagctctgcatcgggtggcgtgggggtggggggtgggggtgggggtgggatgggggaaggggatattctcaaagtgatgtgcttccaaatgcaggaatcctcgcctgccgaggaaggtcccgggagcccccatcacaactccagagcaccctgttgggagggggacgaacgcatccgagtaaaggacagagggagtcgggagtgctggctgcgggaagaacccaggagcccttggcttctgcagtttttagcagtgtgaagccggctgagggagaaggatgcagtaagacatgggggagggggagggctgaggggctgctgtaggaagatcccgacagcgctgcccttcccagtgcaagccggctaggggccccaactctgcccggcactgagggagggatggagggctgcaccgcggaaggggcaccaaggacgggccgtgtccctcactgtagccgagacggagaaagcagggtgtccggggtggggactggtggtcctcagttctcttaagagacccccggtacacacagtagaaggaagcaagagttccaaacacctgtccaaaacaaggagagcagagccccagctccacggcccctggagccccgccgcgcactctgcggcaaagcccctgactggagatgggcgagccccgctcaagggtcccgaggcgagaagggaaacccggagggcaggaagcagcgctagggcgggggctctggggcgacttacggcagcggcggcggcgagggaggcagcggcggccctaacgcggggcccgggaggcgcggccggactgcaaaggcgccgaggatgcggcgggcgggactgcggtgggcgccatcttggagcgctccccgcgcccgccccccgcaccgcccgagtccttgcataattgatgactcgcgcccgccgcgcgccaccgcgcgcgcgcccctactgccgggccccccgcccgccccgcccccgcgcctacccctccgcgcgcgccccctgcccgggccggccccggcccgcaagcgccgctgccaccgcccccgccccctccctgcgcttcgcgcccgcccgcccgcgcccccgcggcccacctacccctgcagggcgcgcccgctcgcccgctcgcctgcagcgcgccgcccgcccgcaggctctcagactcgcgtctccgcgccgccgggagcggatcaggggcaagagggaacagggcgccggcagggggcgccgcgcgggagcgccagcgagcgtccccgggcccgcctccactacgcccccgccgagccgccgggaggggccgcgggctgaggaccgggacccgccgcgagacgctggctggctgctcgccagcgccgggcggcgagacccgaaagctgtcgtggtgacccgcgtgctctgtggcccgcgtcagtgccaagtcttacctttctcctgccccccaacagtgccgcgctcagtgaagtttctgacatccaaaagcgcagggaactcaatttacaggatcttgggcccactgaaaaaacgagaagtcaatcagcggcaggtggaggctcgtgtttcagcccacagggacctgctgccaggagcggggaggcgctgcctccctgacagcccccaggccacctcagtctttccgatcctcagtctgtccatctgtaaagtaggcatgagcatttcgaccgctcactccaccctcgcgaggatctaggtaatgagtgccagagctcttggcactttactgtgtctctcctctacttaatattttcctaccaccaatcacaagagggaaaaagggtgtaacaacctctccaaacctcagtgttctcgtctgtaaaaggaaacagtcacagtagcaaccttataaacttcttgtttgtactaacggggagcatgcacttcacacattgctaacacagccaggcacatggtatgcttatcacataatgtgccctctacaatacatttaaaattagctttactggggtatatttgcgtgtgtttagattgtacaattttgagttatgtgtgcactcatgaaaccatcaccaccaaggtaatgaacacacccatcacctccaaaaatttctccgtgtgcttctttgtaatcactccctgcatcgctcgcccccacacaccctctccaggcaaccactgatcttctttctattactgtacattggtttgcattttccggaattttaaataaatggaatcatacagtacaaactctcttttttgtatggcttcttccactcggcataatcgttttgagattattcagtcgttgcctatcaagagttcttttttactgcttagtagtattctttatggggatacaccacaatgtgtttatccagtcacctgttgatgacatttaggttatttccaatgtttgtccgttacgaacaaagctgttatgagctttcgtgtgcaggtctttgtatggatatatatgctttcgtttctcgtgggtataaatatctaggaatggaataactgagtcctgtcttaggtgtatatttaacatattaagaaagggccaaactgccttccaaagtggttgtgcctttccattcctactagcagcacatgaatttcagttgttctacatcctcaccaacatttggagtgatcagtctttttaattttagccatttgaatagatgtgtagttttatctcgctgtgggtctgtcgtccatttcactagtgactaaagatgttgaacatcttttcatggacttgtcatctgtaaatcctcctggcgaagtgtctcttcaagtctttagcctatttaaaaattggtggggttttttcttgttaattgagttttacgagttgtttatatatcctggctgggctca

SEQ ID NO: 916816 - DNA, 4001 bp, Homo sapiens
tttgggggaagagcttcacaaggagctgctctctagcctgacccattctccttgttctgtaaggcccctgcccccagcctttgggctcacttgcagccctaacctccacgatccccctctttgctttctccataataaattccccttctaaacaaagactgacagcaccacctccacagcacctgcacggtctcgcctcccctcacctagcctcacccctccatcagactctcctgctgaggtggacgaggtcttatactttgctggcatcttgctccagaaaagggatgcagctgagcacacccctgcccttttgcaagcactccctcccacttgcaggagggagaagggaatgggagggaaggagaagagagggcaggggagggcaatgctgctccaacaaccacactctgggtgagcctggggtgctaggatggctccactgggcagggacgccagtccagtaagctggaggctcctcattttgccagcagtgagctctacctgggacaggggtgtcagttcccaccctcaggtctgaggctctgcctgcccagtgagcacctcagcaccctggaccacccttccaggcgcaggcaccagggaaggggcagagggactaaccgacctgtagggattgagggtgcagatggtcactgcggggaagacgagcttgtccgagttgaggttgatgttgaggctgacggggtagctgaagtactctccgaaaagcaggccgaattgccagtacatcatgccaaaggtgcagagccacagcactgcccagaaggccgtcttcatgcggttgtgctgggagcacaccaggcggatggcgccgtggatggtggtgttgttgcagaagaactcgaagagctctcggtaggagcggtggaactcgatcagggcctcctcctccgccgtgggctgctggggcgccgcaggttcggggcccagcccctgctcctcacgcttgttccccttcatgagccctggagtggactgtggagggctagagtcctgctcctccagcttgttcccctccatgagacctggtatgggctgcagaggtctagggtcctgctcctccagcttgttccccttcatgagccccggagtggattggggagagcaagggtcagggtcaaggctgagctctgggccctgagtgccctctcccatcacccctggaacccgagtgaggctgcccctggccatgcccatgtcccaccctgcgcccacattctcccactcctccctccctcctccacctttcctggagccagcagacctgcgggagttggggccaaaagtgccggagctgggcttccctagaacggcctctcctctgcttccctgatagggccacctttcgagttttgtcctagcacctccctttctgtctctgcccccttcctttggtcttcttcctccaggatctgtgtctcagctcctgcctctcactccctctctatctgccttctgtttctctttgggtctctcctgctctcctctttctggcctgcctcctctctctaatcctgcctctcttcctctcccccccttgccttgccccctctcactctaggccctcagctccagcctctggccctgacctcgagctgtgtcctgattctgtctctgccccaggactgcagggctccaggaggtctgggctgcctccagcttcccactcccaggttgcggctggactgggactggttcctttccagttgaatctggcagccaaacctctcctccccctcacctgacaggtgcagcggcctggctggggagcccgcccgctggccggccagggatggaagcgacaggaatctcattagcatctcaattaaaggtgagcagggcggggggaggggctgaggaggagtcagagccgggagttttccgaaggaaggagggctcccgagggcaggtgaactgggagtactggacctgagaaggcggactctgggcaggggctttagacgcagacaggcaaggaggctgggggacaggatggcaggtgaggggcaaagatctgaacaagtagaaggatcctgagcccacagctaggagggcaacacaaggagaaggggccagccaggctgagagggcctgggtggggaaccgggaggacaggagggcagaaagagggagacaatagagagggacagcgaaggacagagagatagggatggaggaggggcactgagtgagtagaggcaggtggggggcagtggtgggggcaaatagaaggagccagcaccaaagggagtctgtctccaggaaggagagcaaggggggagtcccaagtgtgcttccaggagctagaggctcagcaagtgggcagccctccaagggcacccacaggtcagcctcaccctcaggccctgcagagaagagagaagaggtctctgcaggtctcctccccgctcactaagtgggagcagcgcactcaggtgggatgcgtctgcctcctcctggtccctcctctttcctgctgattcctcgccaccccctccaaccttgtccagacccgggaggggcccaggtgaagctgggggctaggcggggccctaggacattctgttcttttttacactgttggctgccaggccaggaatgtgtaatcgcccctgctgtggtcacagagttgcaggaatgtgggcaaccagaggcagcgcgagggccacgcaggacactgtggacacagacccggagcccaggaagaggcagggaaagcaggcactgaaggtgcagggaggatgtggccagcgctggaaaggaagagggtgggcatggcacacgcctagacaggccctgggaggaggagaaattcgttgatgggctatattttctccaaaatctctttccaaacttaatgcagcaaaaggataaggagtggagtgccaagtggtgagcaaggagagagaggagggtcagagaatcagacccaaaaagggctggaggagactcgggagagccacccacacaacccaggccctgcacgcggcagggaaggctgccgcttcctcacgggccccacaggaggcagcccagagtgcaggaatgtggtcactggcttgtcctgcctccctccacaagccagcagacaaaggcccagcctgagcattgatacacaccgggggaggagataggcctgcaatacaataagataaggtttctatttgtacactttaaaagattgtctttaaaacggacttctaacaaaagtgcagatctcagatttctcagagataagacataagagccaagggctaggggagcctaggggctcactgcaggagactcaggaagccttcccagagaaggtgtcatctctgctgaatcttgacaagcaaggagtttagcaggcaaagaagagaaaaggcagtactccaggctcagggtccaacctggtctgtggcttcctctcttgcggcagtctcttgcgacttcttaaagtgaaagccggtgtcaaccaggattccaaaccaggttcccttgcttaccttgatactgctcatgatacctccccttggaagggacagctggatttttcttcattgtcctaatgaagaaactgacccttcccaaggataaatcagttttctgaggttagaaaacaaaataggagcagagctataaacagaattcagaattctcctcctcctctggggctatctacttagcgcttttgccatttacttcctgagacagactcatgggggatcggggctcaggtgcacctggatgtgaaagccgggaaggcctccctcactcccacacagagcccgtggattcgtctgctctctgggtgctgggttatctccttggctctgtgaaaaggtctctgcactgtccccactgccccacatatcccagagacccctagaaactccagtctcccttgagccaggtccttacattgggcatggtcctccctgcaataaggtgctcagcaccctggctgtttgatctcaaaggttctgaaaagcacc

SEQ ID NO: 916817 - DNA, 4001 bp, Homo sapiens
gctgtgtcctgattctgtctctgccccaggactgcagggctccaggaggtctgggctgcctccagcttcccactcccaggttgcggctggactgggactggttcctttccagttgaatctggcagccaaacctctcctccccctcacctgacaggtgcagcggcctggctggggagcccgcccgctggccggccagggatggaagcgacaggaatctcattagcatctcaattaaaggtgagcagggcggggggaggggctgaggaggagtcagagccgggagttttccgaaggaaggagggctcccgagggcaggtgaactgggagtactggacctgagaaggcggactctgggcaggggctttagacgcagacaggcaaggaggctgggggacaggatggcaggtgaggggcaaagatctgaacaagtagaaggatcctgagcccacagctaggagggcaacacaaggagaaggggccagccaggctgagagggcctgggtggggaaccgggaggacaggagggcagaaagagggagacaatagagagggacagcgaaggacagagagatagggatggaggaggggcactgagtgagtagaggcaggtggggggcagtggtgggggcaaatagaaggagccagcaccaaagggagtctgtctccaggaaggagagcaaggggggagtcccaagtgtgcttccaggagctagaggctcagcaagtgggcagccctccaagggcacccacaggtcagcctcaccctcaggccctgcagagaagagagaagaggtctctgcaggtctcctccccgctcactaagtgggagcagcgcactcaggtgggatgcgtctgcctcctcctggtccctcctctttcctgctgattcctcgccaccccctccaaccttgtccagacccgggaggggcccaggtgaagctgggggctaggcggggccctaggacattctgttcttttttacactgttggctgccaggccaggaatgtgtaatcgcccctgctgtggtcacagagttgcaggaatgtgggcaaccagaggcagcgcgagggccacgcaggacactgtggacacagacccggagcccaggaagaggcagggaaagcaggcactgaaggtgcagggaggatgtggccagcgctggaaaggaagagggtgggcatggcacacgcctagacaggccctgggaggaggagaaattcgttgatgggctatattttctccaaaatctctttccaaacttaatgcagcaaaaggataaggagtggagtgccaagtggtgagcaaggagagagaggagggtcagagaatcagacccaaaaagggctggaggagactcgggagagccacccacacaacccaggccctgcacgcggcagggaaggctgccgcttcctcacgggccccacaggaggcagcccagagtgcaggaatgtggtcactggcttgtcctgcctccctccacaagccagcagacaaaggcccagcctgagcattgatacacaccgggggaggagataggcctgcaatacaataagataaggtttctatttgtacactttaaaagattgtctttaaaacggacttctaacaaaagtgcagatctcagatttctcagagataagacataagagccaagggctaggggagcctaggggctcactgcaggagactcaggaagccttcccagagaaggtgtcatctctgctgaatcttgacaagcaaggagtttagcaggcaaagaagagaaaaggcagtactccaggctcagggtccaacctggtctgtggcttcctctcttgcggcagtctcttgcgacttcttaaagtgaaagccggtgtcaaccaggattccaaaccaggttcccttgcttaccttgatactgctcatgatacctccccttggaagggacagctggatttttcttcattgtcctaatgaagaaactgacccttcccaaggataaatcagttttctgaggttagaaaacaaaataggagcagagctataaacagaattcagaattctcctcctcctctggggctatctacttagcgcttttgccatttacttcctgagacagactcatgggggatcggggctcaggtgcacctggatgtgaaagccgggaaggcctccctcactcccacacagagcccgtggattcgtctgctctctgggtgctgggttatctccttggctctgtgaaaaggtctctgcactgtccccactgccccacatatcccagagacccctagaaactccagtctcccttgagccaggtccttacattgggcatggtcctccctgcaataaggtgctcagcaccctggctgtttgatctcaaaggttctgaaaagcacctccctgccttttctatttgccagctcatgcctgaaatccaaccactagcttaaggcagcatggcaaatagttttcatatcaagggctctgtgagaagaattgcaatgcctggtctgggctgagccaaagggtggtgaccctgccacgtcctgccgggtatgggagtggcaatgcgagcctagtgctgcagcattctagacctggagcgggctagaacaggcttggtgttgtgaggaaaatagaaatctgagacctggactttggtcagaagtccattttaaagatgatcttttaaagtgtacaaataatacacaaatatgtttttgtcacagtacaatttttcagcaatacagaagtatatagagcttcccttagtccccttcctttccctccccaaaggggagccaccataatttgtatatctgtctatatctttttgtgtgcctttataaacttacatgtatttttaaaaaacaaaatatatagttcttttttatgacagagaccatgctataggtatgtttctacaacttccatttttgcttttattttcttatttatcttagagacaggatcatgcactatcctctaggctggagtacagcagcatgatcatggctcactgcagcctccaactcctaggctcaagcagtcctcctgcctcagcctcccaaagtgctgggattacaagtgtgagccaccatactcagcccctatttttgcttttaaactatgtgactttgagaaaggcacttgacctctatgggccccggtgatcttacctgagaaaatgaaagggcaagaaggggtgggtaaggcaacccagatggacaaagactttttccagctgaccttgcatctagccccctgcttcatgcatgaggggactgaggcccacagaagcaaagtgacttggccacagtcacccaggagttaggggtggggtcagactgaaaaccaggccactcctttccaagcccagttctccttctctgactttgagagaagtacagttttgttctataagaagtcaagagctttgtagactctgtcttggaaggaccccctgccttcccaggactacccccagactcccccagagccccagcccttcccgccaacccagggctgccttcccctcccaacaccagctatcctctaaccctgtggtgtggccataaaatatgcacggctgcagggagagaagtgaaaccagaggggctgccatgggatgagggttatgagtgcaaagggtcttcctgcctcttgttctccgcggacaggagatgacggaagtaatcactccaccctcctagggagagcctatctctgcacttaccactgtttactattatttattattattatttactattatcctgatgtatgtgtgtttgtacgtatacatccgtttggggtccctgacttcccgcaacacaaggacagagaccaggcgtattcatcttggtgacctcagtgtctagcggtcactgtttgctgacccagtctgcagaagacagcagaactggcgtctttcctagtttatctttgacagagcgggatatgctacgaaaaagcatctgcaaaacttcaaacatcctaacttcctctgacaacc

SEQ ID NO: 916818 - DNA, 4001 bp, Homo sapiens
cacccacagcatgaccaatccccagcatccaaaatcgcacacataccaatatgtgcacacacacactcacacccacacccataaagattttgcactccttgaaggtacactaactcaccatttttatcatacttatcccagtgtgccacagttactggcttatatgcctgtctctgctatcttattttatctgtctccacaacacagcaaactacctggccttcaataaagggcttatgaattattcatgaatccattttgccaggtgcctagccctgtgtctggcttgaagcaggtgttcccaaggtgtggcatggctgagtgaatacaaataaaaggtatacaaaagcactcagccctgccctcctctcttctccacgcttaccacctgctccggtttccagacccaacattggcaaagagcaccgatgaaacccaaaagttcaggacacacccaagcacgtaaaggtcaggcacctgggcaggtcaacagtgcagcattttagcctgggtcttttgggggaagagcttcacaaggagctgctctctagcctgacccattctccttgttctgtaaggcccctgcccccagcctttgggctcacttgcagccctaacctccacgatccccctctttgctttctccataataaattccccttctaaacaaagactgacagcaccacctccacagcacctgcacggtctcgcctcccctcacctagcctcacccctccatcagactctcctgctgaggtggacgaggtcttatactttgctggcatcttgctccagaaaagggatgcagctgagcacacccctgcccttttgcaagcactccctcccacttgcaggagggagaagggaatgggagggaaggagaagagagggcaggggagggcaatgctgctccaacaaccacactctgggtgagcctggggtgctaggatggctccactgggcagggacgccagtccagtaagctggaggctcctcattttgccagcagtgagctctacctgggacaggggtgtcagttcccaccctcaggtctgaggctctgcctgcccagtgagcacctcagcaccctggaccacccttccaggcgcaggcaccagggaaggggcagagggactaaccgacctgtagggattgagggtgcagatggtcactgcggggaagacgagcttgtccgagttgaggttgatgttgaggctgacggggtagctgaagtactctccgaaaagcaggccgaattgccagtacatcatgccaaaggtgcagagccacagcactgcccagaaggccgtcttcatgcggttgtgctgggagcacaccaggcggatggcgccgtggatggtggtgttgttgcagaagaactcgaagagctctcggtaggagcggtggaactcgatcagggcctcctcctccgccgtgggctgctggggcgccgcaggttcggggcccagcccctgctcctcacgcttgttccccttcatgagccctggagtggactgtggagggctagagtcctgctcctccagcttgttcccctccatgagacctggtatgggctgcagaggtctagggtcctgctcctccagcttgttccccttcatgagccccggagtggattggggagagcaagggtcagggtcaaggctgagctctgggccctgagtgccctctcccatcacccctggaacccgagtgaggctgcccctggccatgcccatgtcccaccctgcgcccacattctcccactcctccctccctcctccacctttcctggagccagcagacctgcgggagttggggccaaaagtgccggagctgggcttccctagaacggcctctcctctgcttccctgatagggccacctttcgagttttgtcctagcacctccctttctgtctctgcccccttcctttggtcttcttcctccaggatctgtgtctcagctcctgcctctcactccctctctatctgccttctgtttctctttgggtctctcctgctctcctctttctggcctgcctcctctctctaatcctgcctctcttcctctcccccccttgccttgccccctctcactctaggccctcagctccagcctctggccctgacctcgagctgtgtcctgattctgtctctgccccaggactgcagggctccaggaggtctgggctgcctccagcttcccactcccaggttgcggctggactgggactggttcctttccagttgaatctggcagccaaacctctcctccccctcacctgacaggtgcagcggcctggctggggagcccgcccgctggccggccagggatggaagcgacaggaatctcattagcatctcaattaaaggtgagcagggcggggggaggggctgaggaggagtcagagccgggagttttccgaaggaaggagggctcccgagggcaggtgaactgggagtactggacctgagaaggcggactctgggcaggggctttagacgcagacaggcaaggaggctgggggacaggatggcaggtgaggggcaaagatctgaacaagtagaaggatcctgagcccacagctaggagggcaacacaaggagaaggggccagccaggctgagagggcctgggtggggaaccgggaggacaggagggcagaaagagggagacaatagagagggacagcgaaggacagagagatagggatggaggaggggcactgagtgagtagaggcaggtggggggcagtggtgggggcaaatagaaggagccagcaccaaagggagtctgtctccaggaaggagagcaaggggggagtcccaagtgtgcttccaggagctagaggctcagcaagtgggcagccctccaagggcacccacaggtcagcctcaccctcaggccctgcagagaagagagaagaggtctctgcaggtctcctccccgctcactaagtgggagcagcgcactcaggtgggatgcgtctgcctcctcctggtccctcctctttcctgctgattcctcgccaccccctccaaccttgtccagacccgggaggggcccaggtgaagctgggggctaggcggggccctaggacattctgttcttttttacactgttggctgccaggccaggaatgtgtaatcgcccctgctgtggtcacagagttgcaggaatgtgggcaaccagaggcagcgcgagggccacgcaggacactgtggacacagacccggagcccaggaagaggcagggaaagcaggcactgaaggtgcagggaggatgtggccagcgctggaaaggaagagggtgggcatggcacacgcctagacaggccctgggaggaggagaaattcgttgatgggctatattttctccaaaatctctttccaaacttaatgcagcaaaaggataaggagtggagtgccaagtggtgagcaaggagagagaggagggtcagagaatcagacccaaaaagggctggaggagactcgggagagccacccacacaacccaggccctgcacgcggcagggaaggctgccgcttcctcacgggccccacaggaggcagcccagagtgcaggaatgtggtcactggcttgtcctgcctccctccacaagccagcagacaaaggcccagcctgagcattgatacacaccgggggaggagataggcctgcaatacaataagataaggtttctatttgtacactttaaaagattgtctttaaaacggacttctaacaaaagtgcagatctcagatttctcagagataagacataagagccaagggctaggggagcctaggggctcactgcaggagactcaggaagccttcccagagaaggtgtcatctctgctgaatcttgacaagcaaggagtttagcaggcaaagaagagaaaaggcagtactccaggctcagggtccaacctggtctgtggcttcctctcttgcggcagtctcttgcgacttcttaaagtgaaagccggtgtcaaccagg

SEQ ID NO: 916819 - DNA, 4001 bp, Homo sapiens
cagcaaagtgttaaaattaagttacatggttaagtacacactcttcagtggtaaggaaatctgagttcaaatgccaattctaatatttactagagccatcaccaactaactacccaccctaacactatttctaatctacaaaaaggggaaaagctagctatacctcaagtgattgttataaggattaacagtgatgataagataaaatgtttagtacaattcttggcccattcagtaagcattaaatgaattcattcatttaataaacattcagcacttacacatcaggagatgaggaacatctaattaatttattaagtattaataaacatgacaactcttcaatggtgtggtaagaacatataatcaggagaatgtattctaatcaggaaagtcttccctgaagtgagctgaatgatgaataggcataattggctaaaaaaagaaaggaagggcatttccaagcagaggaagtagcataaccaaagccacatacttgaagcaggagaacagaaaagacagggtgactaggggagaaagggaatgtcagaaagcacagtggagatgagtttggaaaggggaccgactatgcagggcttgtagggcatgttaatgtgttcgatttacttaaaaatggtgagaagccactgaaagattttaaacactaagacaatgttattaggtctgcattttgaaaaagtcactaagtcttgtttggaaaactacaggagaccacagtagatgcaagcagaccataatcaggaggctacggaagtagtcaggatgagagatggtggtggcttggaacaggactactgttacagacgaagagcagacaagagtcaagagatattcaagaggcaaaatcaacaggacttcatgagaggctgagtatgaagcacgacagaggaattgtcaaacttcaacttctatacaaaggaatggatagtgatgctacccacggagttaaacacagtaagaggagctatttttcttcttggggtgggggaagggaggtatatcatgaatttcaaacatgtgaatatgagtagttattcccagtaacagggttgatctgtctagaaagtattccacagtatagaagtacaatgtgcctgtatttattttactgggtatttatgaatcttagagacaaaataggtttctgcatgtgagtaatgtaaatctaaagagaatgaaggcccttaccttccattaggttcccttcctttacacaatcccccaaaagcattctttatgattacagtttaatgttgcctcaagaagtaatttatatactcagctgatttcatttttaaatattttaaaaatatttgtgctaaagaataagacagcaaaccaaacaacaacaaacctgcaaagtccaaaaggaatcttcaagcacctgactttcaagccatcaccagaacataatggggttttacagtggcaggctgatttggagcatttttgctaaactatttatttttcagaacggagataggctacttagaaaactcactcatagtatccaatgtttttagaaagtgtcatcacaaataattcctgagtttgacgtactaaaaaatagttgacaccttccaatgaagtcactacaggcatagcgcttttaagcagcttgtctggagcctcctcgagtgccttagagggtggatttgataatatggcctccttaattacggatcacaggtatgtgctcaaagtccaataagtttttgcaagctttatcggtctaaaccctcctccatccgtattctcccgtttagaaaaacaagactgcaggagtaaccgtggggttttttctcttaacaaaacccctgccccacccacctcacacacaataaccttccattccagaactaaagctactgtcagagaaggacggcgggcggcagggccctggctggtgacccaggctaccggattccggacctcagaactgaggtgaactctctcacccggtcctagagtagtgtccaatgtccccgaaaggtactacgttctccaccaccgaaacccgagctctcgagccggcatggggggctctccctccggcagctgacttcgatcccgggtctcccgtcgcctcaaggcctctttcgaggactcggccctctcggatccgctccccggagctcgctgctcgtccagccccgctttgcgcgggcgccgaccgccgatcgcccggccggccgccggcaggcccgtcaccaggcaacacccaccagcctgagcggccctgggaggcctaacccgggcgcgagtcctccattccctcctcgccggctccgggagcccaggcgagagagccgccggtgagggaggtcggtcggtgccggcggccggtcacttacctcttccttcttccaggaggggcggtgctggggctctttccccccgcccccctaataaacgcctcctggctgttcctgctctgccttcgtgcctggccactgactctggctttactccatatcctccgccgcccccgcggccgcaaacgtcggagctagaaggaaaggggtggggaggggagggaccggggacgaagagtaagggagggggaaaaagactaaaagacctgccggccgggggcatgacgtcacttcctgccggttcggaagaggcggagccagtacttctctccgccccgggtgtcaggtggggcggggctatggtgccaggggaggagccagcgcgcgagcttatggcggttcttttgactccgaggttccgtagacttgtcagtcagaacgagcttccgggcccagggctgaacgggccaagttccaggaaccgtagagatggcttctgccggaaaaggaggacaggtagccctgtatatcctagccaaatgtgcagtgaaggtggagggggcagctgaagggagcaggcggctgggactctgctcctcattggtccagggccccgcccatttcctagccccgcccccttcctgccctaccaggcactggactgggggacccaggactgaggctttttaggggttactgtggtgaagtgcccttggagcgtgcaggaaagcgttttttctcaaactttaatatacatacgaatccctaggatcttgtgaaagtgcaaattctgattgaggagtagggtctgataatctgcgtttctaatacatgtccagatggcaccaatgctgctggtccctaggctacacttacagcaacaaggggttaatgtactagagggcaaattccttgagctagaggagttatttctttaatctagcctacttgtttaatgaaggttagagaggtagactgtctatggaaaacaggctgtaccgctgtattttccacctaccccgtcgagtaccctcctgcccacctccgcccatcactttctggcctcccctcctcagtctccgctctgcccacaatgtctggggataagatttcttgagtgattagacgggtaacttctgttacagaaggaatttgagggtggtggatttttatttctgtcattttatcgtaaacatatgtatagttgggcatacttttgcggttatgcatagttggagaagagagcttaagttcttggattctacccacttccccctgcaaatctagaaaaaacattctagaagttctaagttattcccttatcattctttaatttttttaattaattttaattaaatttaattttaattaaaattttactggggtacggaagaatgaagaatgactgcgaactataggtttctttgtggaatgatgcaatggtctgaaattagataatagtgatggctgcacaactttgtgaatgtactagaaacactgaattgtacactttaaaagggtacatcctctttcatcagccaccattacaatccttcttccccaaggttactcgtttgaagtttattcttccagatctttctatttatttacatacatttttacataggttgggaattcatttttacctaagtaggataataatat

SEQ ID NO: 916820 - DNA, 4001 bp, Homo sapiens
agacggattctcctctacagcctctagaaggaacacagctctgctgactttgattttagatcagtgaggcctattttagacattactcctccacaactacaagataatatgtttgtattgtcttcagaccccacagttgtgttatttgttacaatagcaacaggaaactcacatgctaagtgaggtattaaggcaagtggctcaaggctgaatgtagggaactggctgagacagcctgctgaagacagaggctcactcttgctgaattattaattaattagctcactcaaatctatttattcagtaccttactaggtgccagacattattctaggtactaaggatgtacagtaaataaaagggacaaaaatccttgtccccaggaagctttattctagcagaggaaacagacaataaataagtaaaatctattgtacattgactagtgataagtgctaaggagaagaatcaagcagggagttactgtctagatccccctggctccagggctctgttgccctgacctgcgcatgggctccagactagttcctttaggagggaggacttcctctagtctgctgcttctgcaactcagccatcctgttcctcctgttcctgggcccacaccctgtgtgctggaagtgcatgaggcaggtccccacacagtcctgggccagccccagtccacagcttcctttcccaataggagcagccactgtgacatacatacttgccctgaagtcaaatcaacacccaccatgatgtcaagaagagaccagatctctttctcccctgcctgacatagtcaaggagacaaactgcacccactcatgggatccagcctcctgtctcattccccctcccccatcctgatcccaacaagaaatgtgtttgtatttccccaggagctgatggttaggactgctgaaacatcagagaggcacatcctttttttttcttttttttctttttgagagggattcttgctctgtcacgaggctggagtgcagtggcgcaatcttggctcactgcaacctccgcctcccgggttcaagtgattctcctgcctcagcctcctgagtagctgggactacaggcacgtgccaccacacccaggtaatttttatactttttagtagagatggggtttcaccatgttggccgggatggtctcgatctcttgacctcatgatcctcccacttcggccttccaaagtgctgggctcataggcgtgagccaccacgcccagccaggcacgtccatttttagaggtttggacacacagaacacatcttcccccctcgcttcctattgagacctctttcccgtttctctgagtttccaggacagaaaacttccttgggaaatcaccccttcatgtgaacaggccaaaccatgcagtggcttccaatcagattgaggcaggggcctttccctacatcacccctcccacccaatctggacatcagggtctctgatactgtcagatgcttcgggagagaggaagaggaagaaggagaaaccaagaaagccaaagaatgtaattcgccccaccttgttcgcccactttgtccctcacccactgggccgccgccttgatgctttcgctcttggtgacatccagtagggtggtctgcagccgataggaggtatcccgctgaagtttctgggatccctcctcagtgaagcaagcagccagcacctgcatgccccgatcaaccagctgtttggccagcaggttcccgaagccagagtcacagcctgtgatgaagacgtacttctctgagaggttgccaaccagattgcagttcttgaaccagcgatacataaatgagaggtctgtgagggccgccatagggcaaggggaatgtgatggccaagagggactgggctcaggagacagcagggaagaagctggtcctctgagccctagcaggcagtctgcaggaaaccacctggaagaagaactctccttcctcccacagcttgcaacaaatctaggtccctgggtgagccacgctgtaatttttataggtggatgcatcaccacagcaattagcccagatgcaagaaattcaagtccaacctgaagccttgtcacctctgacagccctggtagctgcctccctctctccccctgccctgatgggtaaagctgccaagaattggaaataatccacttgtaatgttggtgatgagtggtggctcacccaggcggtgtaaggcaggcaaatgaaagatgaggactcaccccagacagctcccctagaaatcctgtccccaccctgcccccaacccagcctggggattttggtctccagggatcaaaatcatttgtcgtgagtgcaggtatgtaaataagtttattttcagggaaaatactcaagacaaatttattaatgtaaaacaaacaacattggttctgtaccttccaaaccccaagagaaacaagtcgcaggtcatcagctctctggaattcttaggtaagtctccatcatgagagaggatgaaaagcaatggatttctcctagggtggatgtacctccattgtcctgaggctagaggcagcagggccctcctataggggaggctggcatgtgaagcttagccaccagaaagcagaaagacctgggggactcaggcctgacaccctgtgggggtcatactcaggtcaccagtaagcagccctgggcaagatgatgaggagggatcatgagttcactgggcagctgagggaattgtctgggcagaggccttgactgtaagaggggatgagatataggaggagcagagaactggggccagagacatagaaaattctcagggtcgggacttggaggagaaacagagattctaggcaatttagcaaataatttacagaaagctaagaggtaaggtggtaaaggaaaggaaataaggaaaccagaggtgtgagtagtgaggggccacacccagaattgcataagatgcagggaatgatgctggagcctctgtggttctttggatcaacatctagggtcaccattccttgggatgagcctggtcctagctcacaccttcatggcttagcgagtctgacacagaaatgggaccacaaagttctctagtgtgaagggacaaaggatgtatctctgtgatccaccatttgccaagtctgaccagcgtggaatcacataaagcaggtgtcaccctgggaaagccccgcagggtttggccgttccttaacaaagtaggggagggggccagattatgaacccacccccaaagagcagacctaaagcttataggggatggaggtgggaaatggtagaaagcaaaccacacctacttcataaccaacctgaggcagagcacctcctatgcgggatctgggaacaatctcccagtctctgtctgcctcctgggtgaatgaacagagaagtcttggctgaaacaggtcagaccatgtcactcaagactgagcaggtccggggcattgggtatcccagtccttgaggacacaggtgaggtccaggagttgggtctgacttagcataaggataactcagaactgccccagcacaggcctgggcctgactcagcacctcctgggcctctatgctggcagtgttcccctggcctcaaactaaacacacagtccatgagggtggggggtgtgagggaggtaggaccacatagaaggctcttcttcccagggctagaaatgcctccctctctcagatgacagcattccttgccaagctggcccctaaggtctgataggtcaggttggtagctgcactccccatccccaccccatgcacacaggtatctcagaggagaggagccctctcctctgccaggccatttccctccagtgggagagcatagactgctgaggtccaagacacaccctgatgaggtagacaggaggaagagcaggtgtgggctcacccacccccagttgctcaagaccttccacaagtgtggattcttcaggttgacaggtgggccatgaagc

SEQ ID NO: 916821 - DNA, 4001 bp, Homo sapiens
ctctctggttccccctccctccaccatcccagaaggccaggcaagggtggctagccagagacccatctccaatgccaccttgtccagccccctgtcctgggcactcctagcttggacatccatcccccgctcccagaatgagccagacatcccttggtcagagggagaatgaggggtggggattccaactgccccgccagacttagcatcccctaaataggtcaccccttgtctatctgaattaactgacattcggggcctgggaggggaacttgaacagacaccctctctccgctggatctctcgaataaaaatcagagactggggcaaacttcaaaacaggacatccccaaatcggcatgaactttcagctcctggaggttaatccccaaacaatgggatcccggtttttatttagttatttttagagaacctccctctgtcacccaggctggagtgcagcggcatgatctcggctcactgcaacctccgccttctgggttcaagcgattttcctgcctcagcctcccaagtagctgggatcacagacgtgcaccaccacgcccgaataatttttgcatttttagtggagacaaggtttcaccatattgggcaggctggtctcgaactcctgacctcaagtcatctgcctgccttggcctcccaaagtgctgggattacaggcgtgagccaccacaccgactgacttgacattaaaggccggtgtaggtcaccaaggcctggcctcagggacaatcggggtgggagtcagaggagccggccacgaagacccttttcaggtgggtttggggcgcctctctcgccgtttgtcccaggcggtgccatgggatgccttcaggtaaaaggacagggctccctctgccgcggctttccgtgaagtgagcatccattaactgcatccagcctgccccaaggatccctgccccaaggatcgcaagacttcagaagaggttgtgcccggggaggaggagggagggagccctgaagccgctgtctgcccactccggcagtcggaagccaccttccctttcacttggttcacagtaagtgctcagtcgatatgaactattatgaaatctgggctggacaccttaagtgcaggtcatcctttcaccgtcacaaccacctgaggaggaaggcgctatgctcatccccattctacagatgtggaagctgaggcacagaactggacacaaactcagtgtttaggcccaaatggctgttttttaaaaatttgagacaaggtcttgctgtgtcacccaggctggagtgcaggggcgcaataattgctcactgcagactcgacctcttgggctccagcgatcctcccaactcagccttcccagtagctgggactacaggtgtgcaccaccacactatactaattaaattctttttttaggtcaggagttcgagaccagcctggccaacatggtgaaaccccatctctactaaaaatacaaaaattagccgggcgtggtggcacacgcctgtagtccaagctactcgggaggctgaggcaggagaatcgcttgaacccaggaggtggaggttgcagtgagcccagattgtgccattgcacttcagcctgggtgacagagtgagacctctgtcttaaaaaaaaaaaattttttttgtagagattggggggggtctcactctgttgcccagctcagtcttgaacttgtggcctcaagcaaccctcccacctcagccttccaaagtgttgggattacaggcatcagccaccatgcccagccttgacagactctttctatgtctccctcttcccctgggaaaccacaggctagcccgggacactccagtcctgaggtgggactgaggatggggccacttacccggcaaaggtgatgggtctgagcaggagtcagagccaagccagcgagggagggatcaactgagtagatagcccacgaagagagggggctgaggacgggtggacagtcttctgaatggtcccaggggctacttggtcctgggctttattcctctggcacctctgggcagccaatggggccctggggctggctacacccccccctccctcctgccaggacccacccccctggcttgaggccactgaggctgtcagaagggaggtggaatctggccaagctttcttctttggcagcttcctcctgcctttcccacaacccactcctcctccctctttccacttcccctttctgtcctcagtttcgtgaaaggaaaataaaaaattgggacccccaactcactatgccaaaagaaaaagaattaagctaaaagctgagtcatgtaagaaactgcctttcctttagttcctaagcagatagcttcagatgaaaggttaaatattggctccgcattttgggaggccgaggcgggtggatcacctgaggtcaggaattcgaaaccagcctggccaacatggtgaaatcccgtctctactaaaaatacaaaaatcagccgggtgtggtggcacgtgcctgtaatcctagctactcaggaggctgaggcacaagaattgcttgaacctgggaggcagaggttacagtgagactagatctcgccactgcactccagccttcacaacagaaagaaaaaaaaaagttaaatatctccacaggtcgctactctatgttcaccttatcttatgtaaagtgccgatttattgagatcaagacaaatacataattggctacttccctatctgcccctcttctcttacaaactgtggatttggtaatgtggccatagcctccttctttcccctccagcttgcttttctcctttaaatactgacacctaaagtcatctctggagaaaagcacagacctgtctcccaggtgcattcttaaccctggcgaaataaatttctaaatggattgagtcctgtctcaatctttttgattctttttgatttacagattggagactcatgaaagggaccctgggtggaggtggccctgacctttgacaagtctcctactggtgcttggtgggtcttgctctgtcaccctggctggagtgcaatggcatgatcttggctcactgcaacctccatctcctgggttcaagcgatgctcctgtttcaaccccccaaataactgggagtataggcatgtgccaccacactcagctaattttttgtatttttagtagagatggggtttcaccatgttagccaggctggtcttgaagtcctgacctcaagtgatccacccgcctcagtctcctagagtgctgggattacaggcgtgagccaccatgccggccttgagcgatcttgattgccctccaaaataggacagtttgctgaggcctgggagctccccacctccagagaactcctgatctcccacaattggttgatatctaagcttgatttccctgaacagctccttttctgcgttttactcacttccaacaaggaaggtgagttttctggcttccatgatgatggcaagcaggcagctcctttctggagtttcgcttgtgtccggcagggaaggcaagtttgagatttccccgcttctaggatggtagagagcggtcttcagcctgggccccatgactagaagttagggttaacaaccagctggtcttaatttctccctacttttagagcgtgcagtaatcgtataaattgcttgattgtttgtttcccttgcttaactgtttttgtttctgttgttgttttgttgcttctgtcttttccccattggactggaccaactccatttgacttggtcaaatctgaaggaaagtttcatattatggcgaacaaggtctcatgaattggctaaatacccacagctggaaaaaaaaaaaaaggaaaaagaaaaaacagccagcaaaagaaaaaagagagagagagacaaggattttgattacctgaggggcattatttacataacaaggccatcttttgctagccaagccaaactgaaagaggctacatggctgtcacctcacgc

SEQ ID NO: 916822 - DNA, 4001 bp, Homo sapiens
gtcctaaagagaagaacaaggggacctactttgggtatggaggtcaggaaagacctcttagaggaagtgaccattaaaactaagaactgagacagggcgcggtggctcatgcctgtaatcccagcactttgtgaggcagaggcaggcggatcacctgaggtcaagagttcaagaccagtctggccaacatggagaaaccccgtctctactaaaaatacaaaattagccgggcatggtggcgcatgcctgtaatcccagctactcgggaggctgaggcaggagaattgcttgaacctgagaggcgaggttgcggtgaggcgaggttgcagtgagccgagatcgcgccattgcactccagcctagagagtaagagggaaactctgtctcaaaaaaaataataaaaaattaaaaattagacccgaaaaatgagaaccaaccaaccacacaacaaactgcaagaagagcgtgtacatggcaggactattgtgaggattcaatgagcctgcatggtaagggcacccatgttgggtgtctgtccacttggaattgggtctctcttcctttttggtgaaatccccagatttttcccctggggatcctgggattgtcaggatgaactccccctactccataatccttccgctttcttgtttttttggtgtttgttttagagacaaggtctcactctgttgcctgggctggagtgcagtggcacgatcatggctcactgtaaccttgaagtcccgggctcaagcaatcctcccacctcagcttcctgagtagctggaactgtagacatgcaccactgtatccggctgatattttaatttttatagagatgcagttttgctgagttgtccaggctggtcttgaactcctggcctcaggtaaatctcttgtctctgcctctcaaaacactaggataacaggtgtgagccacctgttggctcacaacagatgagtcattaactcaccattgactccattttataaacagtgaacctgaggtccagagagattaagtaacttatccaagttcacacagttagaaacagcatagccagaattcacaccaggcagtgtctttggcatctgtgctattaaccgcgatgctatactttctctaatatactagtgttatcgttactattatgaaagctgcatgcatttaatatttattgccaattgtcctttggaaccaaatgctcctggctcagtttccaggcttccccagccctcttggttatactgactcacaagaggacagcaggcatcagttaaatgaaaaagccccaagttgccaacagccttatcaaccccagaccccatcaggcacctgaggtctgggactgagctgtcttggcccagggacacacacctcttgtcccgtatggcagccaccagggctgaaatgggggacctgggtctccctgctgtggaataacccaggggaaagcagggggctcaggctcaggtcccagtcatgccaaccttggccaagtcacttttgtcactgggccttacctgtcacatctatgagttgaggtaaggaccaccagtgctgtccacctcacttgtccccaaagcctttccccagaggccaccttggtggcactccacagccaaatccctggtgccagggctgggacacctcgggctggccccttggctggcagaatgcccaaccctgcccctctggcaggcagaacccactctcgcccttcagggtccccagcacaacactttcttctgcagggcaccctgaattcaatcgacattcccaggagggcctagaacacgctcaggccctctcactcccacctgctcagcttggactttgcccaaagcctcccaaactcctgcagcctctcatcagcctctcattcacacacacactgagccccaggggccccagctggccccagaccccttacctccctgcccaactatcccagaccagcgtggccccagctcctgccctccagcctgccagggaaccagctctttccaggaaccggctctgtccagcttcaggcagcttccggcaaccttggtccctcctcctttgttaaagagaaagctccagaccctaagcctccgggtgaagacggaggaggagaggggatgagagcaaccctcaccgctttcccgggcactgcctatgactcatgcaccaccctgtctcatttgacagatgagcaaactgaaactcagaaaagggaacttatttggccaaagcttcccagacagcaaggggcagagacagcctttacccctggccctgggccatctcttccgggatgcaggcatctccatgtcttctcattttaggtctagtgattgtcccggatgctgaaccactgttggggtcagcttaggtctgggatgggaaaacaaggacaagggaactttttttttttgagacacagtttcattcttgtcccccaggctggagtgcaatggtgcgatctcggctcactgttacctccgcctcctggattcaagcgattctcccacttcagcctcccaagtagccaggtttacaggcacccaccaccacgccagctaatttttgtatttttagtagggacagggtttgaccatgttggccaggccagtctcgaactcctgtcctcaggtgatctgcttgcctctgcctcccaaagtgctgggattacaggcgtgagccactgcacctggccaaggaaacaattattataattattatttgtgacatgggaaaggtatatttttgtctgaagcacctctccgtctcggatattttacacgcagcatgagaacccaagcaattatttgctactcagatgaatgactgaccattcattcattcattaaatgtttattggacacctactatgtgccaatccctggaactttggcctcaaacaaaatagcatgtcctctgccttcacaaagcccttagagagggccattagagagcacttattagtgctatcagatgttagcagctggcagggtggggcagggctgtggaacccagagcaggcaccccgcctggccctggggggctggggaggcttcctggaggaggggaagtctgagtggagccaggagtcaggcacagggagtgcaaaggtctggaaatgaaaaacatgatatattccagggtcagggtagtatccagtggggctgggagggagaaggcaggggtggggaagcaagtggggttgaggctggagatgtgggcagagatcagagtccacagggatgcctgtaccaatccagagtttggaccttacccaggggcactagggagccacagaaggctttaggtggggggaatgacatggtcaaattcatgtcttgtctctgcaccatctcactgggtgaacctgagcagctcgtgcccatctctgggcctcagtttccctatgtggaaagtgggaacaggaagacctggcatcacagatgttgtgtgtccttcttgggctgtttctgatctccccaggtttgatgattaactcccagccacttggggttagatggagctgcttggccgtgatccttaatgtggactctggcaagtttctacccatcctcgctttagacacacatccatccttgttgggtgccttgtcctggactgggtactggggacacagaggtgataaaatccagtttgtgccttgaagtggcccccagcatggaggggagaggaagacacccaattcggtagcaacaataacacttcctaagatgacagagggcagaaagtccccatagggtagctggggatggggcaagatcagggagggcttcttgaagtaggcagagactcagcacacagctcagactttgacaagaagcagactagctgcatttagtgcatgtctactgtacaccaacacgtgcatgctgtccagcgtaacccacactgtttatttgtttgtttgtttgtttgtttgtttgttttacaaacgaggtctcactgtgctgcccaggctgatcttgaactcctg

SEQ ID NO: 916823 - DNA, 4001 bp, Homo sapiens
cagtcccacagaagtggggccagggcagggctccgacagaggcgtctccagtgaccacgtcctatttgtctcaacacttgcctaacagagtaggtcagagactgctcgtttgcctctttcgccctaaaaccaggctgcttctggcccaggccccatctagaccccatatgggccccatctaggctgtgtggaggagcaggctgcagggggcccagactccagctccagagaacccgccgtgtggccgccctgagctgctcaggaaagatcctcgtggggctccacgccgctaggaaccttgcactgagaatcctgaaactggtggtcagagcgggcaggatcttggaatgctaaaattcaaaagactgagcatctcagggtttgggtcaagtagtcaccaagagaaggaaagaccccagataactgaggcacaggcagcagatctaagtctgggtagacaggacaggccctgccctgccctgctgtgccctgggagtcacatcaaaccaggtcaatccccagctctgtcccttagaagctgtgtgacctggggcaactcacctcacctctctgagctgtgggttccttagctggaatacaaggacaatggtagcacccgctttttatggggttgttgtgggttgaagagggccagggaaatgctgagtcctcccagaagcctttccagattgccccaggcacgattagtcacctcccgtgtttaaatcatttctgctgttcatttattttctaaaaatgtattcacattgactcctaaacttccagaaggcaggaaccacagctgtcttgctgatcaggccacaggcccaggattcagccgatgggcaggcacacacccctcgcaacactcgccccagtggctggcaaccactgtggctgtctgctctgctgcccccaccagaccacaagtttttggagggcaggagctctcctgggtctcctggcatccccaggggcctcactaaatgcctctgcagaagaggacatgtgactgaggcaggggaacgtgcacagaactgcacagcacgtgctgtcttcacacttttcacaccacatttgccagctgacactttgcaacctctttccgtcatctacctcaactcacatcagggagtctctgtagacattttttcccacttatcatcgcccttatgaaaggtttatttatttatttaattttagagatagggtctttctctgttgcccaggctcgactacagtggtgcaatcatagctcactgcaggcttgaactcctgggctcaagcgatcctcccaagtagctaggactacaggtgcatgccaccagacccggctacttttaaattttttgtagagatgggttttccccatgttgcccaggttggtctcaaactcctgggctcaagcaatccatctgcttcagcctcccaaagtgctgggatttataggcatgagccacggtgaccagccctcctcatgaaaagttaatagcacagatatgctgtatatctgtttaatgtttggtggcttgcaaaccacagtgttagttgagatttttttgttacacccccctccctaccctccaccccaccaagaaccaagttacacctgttggaacccaaacttgctggcctgatccagaggcagtaaggtacttggcacaaatgaattcaatgagacctacatctggttagttgaacaactgtctttaaacagttttctaaacacccctgtgtagacagacagattaacaaacacagacccccaacacacacacaccagccatcttatctccttctagaccactggcccccactgccatcttcctgttcaagttcagcaaaggaagccgagacacaggcctagggtcaccacgaactccatgggcatcctgcagccagaagccatgccgccagaggcagctgcttctccccttcaagcctcagttttctcatctgtaaaaggggcactgtccaccctccaaggttctcggatgattgattccccagctcctctgaatgccccactctgggcccagcctagcaacccagcccttccgctctctgaggtttaactcccctggctgctggccaagcctgctgagggaggcatcaaccacccagggcacggcctcggaagagactctggggctgtctgagggcctgggagccaccttctgaggccccggcccactgaggggcctggctctgggggcctcaaagtcagagatggaaaaaaaaggaaaacagaagaaagaggaaagaggaagagaattccaggcaacagaagcccagatatcgacaatatggggtgtgtgtgtgtgtgtgtgtgtgtgtgtgtgtgtgtgtgaatgtgtgtacagcagggcacaactggcccccaccatttccttttagtgtcctgaaagtatctcaaatacaaactaataagagtattctaatttttttttttttgagacagggtctcactctgccacccgggttggagtgcagtggcacaatctcggcttactgcgacctccccctcccaggttcaagtgatcctcccacctcagcctcccaagtagctgagaccacaggcatacaccactacacctagctaagtttttgtatttttggtagagacgaggtttcaccatgttgcccaggttggtctagaactcctgagctcaggccaaccacctgcctcggcctcccaaagggctgggattacaggtgtaagccactgcacccagccaaatattctaattattattattattattgttttcccttttgctaacaatagtatcttaattctaatattttaatagtttgccacagacaagtgtcatttcctcagtcttataaaaagtgggaagaatgcatctttctctgaaaagaacttttttatgcgtccataacatgcagcttcaagagaaatcctgcactccccctactttctggagtcttccagacctaatctcagctctgcccctaaacaaatcccttcacctctcccgacctcagtttcccatccaggaaaggagaggataagatcatttctagggaaacactcatggtttctctgattttcaaaatcagaatgccgccaagccagacgctgcaggcaaactggccagggagggaagtaagttaatgggaggctggggctggtgggtcacacctgtaatttcagcactttgggaggccaacgcaagaggcttgaggccaggagtttgagaccagcctcggcatcaaagtgagaccccatctctaggaaaggtaaaaatattagctgcatgcggcgatgtgcgcctgtagtcccagctactcaggaggctgaggtgggaggatcacttgtgcccaggagtttaaggctgcagtgagccatgattgtgccactgcactccagcctgggtgacagagtaagaccctgtctcaaaaaaagaaggaaaaaaaaagttggcaggagcaggattcagaagagtcacagaataaggccacagactccaggaagactttagtcttgagtcggaggagcctcagtttgccctccccaggtgctgcagctcaagaagggcctggcggtcctacccgggcctgccagcagctataaggcaggcccttggcccatggggacctccagccactccctgtggttttgcaagccagcacttaccaccgtgctcagcagagcatgggacagctgcctcgtgggcccagaagaagtggcttctctgctttagtgacaaggtcccagcccacgctgccaggcactgctgtggcaccccctgcggcagtcccggatccgagcaacccccaatggctgtgtgtggaaggaggaagcgagaatgtggttacttaggcagggccatgtgacagcccacaccccattgtttgtgacagctttggtgacaacattgataaagacagggtggtagtggggcacctcctaggtctgacactgttcttgggttcccataactgtgaaaacactgagaaccaagtagaagctttct

SEQ ID NO: 916824 - DNA, 4001 bp, Homo sapiens
ctgccatcttcctgttcaagttcagcaaaggaagccgagacacaggcctagggtcaccacgaactccatgggcatcctgcagccagaagccatgccgccagaggcagctgcttctccccttcaagcctcagttttctcatctgtaaaaggggcactgtccaccctccaaggttctcggatgattgattccccagctcctctgaatgccccactctgggcccagcctagcaacccagcccttccgctctctgaggtttaactcccctggctgctggccaagcctgctgagggaggcatcaaccacccagggcacggcctcggaagagactctggggctgtctgagggcctgggagccaccttctgaggccccggcccactgaggggcctggctctgggggcctcaaagtcagagatggaaaaaaaaggaaaacagaagaaagaggaaagaggaagagaattccaggcaacagaagcccagatatcgacaatatggggtgtgtgtgtgtgtgtgtgtgtgtgtgtgtgtgtgtgtgaatgtgtgtacagcagggcacaactggcccccaccatttccttttagtgtcctgaaagtatctcaaatacaaactaataagagtattctaatttttttttttttgagacagggtctcactctgccacccgggttggagtgcagtggcacaatctcggcttactgcgacctccccctcccaggttcaagtgatcctcccacctcagcctcccaagtagctgagaccacaggcatacaccactacacctagctaagtttttgtatttttggtagagacgaggtttcaccatgttgcccaggttggtctagaactcctgagctcaggccaaccacctgcctcggcctcccaaagggctgggattacaggtgtaagccactgcacccagccaaatattctaattattattattattattgttttcccttttgctaacaatagtatcttaattctaatattttaatagtttgccacagacaagtgtcatttcctcagtcttataaaaagtgggaagaatgcatctttctctgaaaagaacttttttatgcgtccataacatgcagcttcaagagaaatcctgcactccccctactttctggagtcttccagacctaatctcagctctgcccctaaacaaatcccttcacctctcccgacctcagtttcccatccaggaaaggagaggataagatcatttctagggaaacactcatggtttctctgattttcaaaatcagaatgccgccaagccagacgctgcaggcaaactggccagggagggaagtaagttaatgggaggctggggctggtgggtcacacctgtaatttcagcactttgggaggccaacgcaagaggcttgaggccaggagtttgagaccagcctcggcatcaaagtgagaccccatctctaggaaaggtaaaaatattagctgcatgcggcgatgtgcgcctgtagtcccagctactcaggaggctgaggtgggaggatcacttgtgcccaggagtttaaggctgcagtgagccatgattgtgccactgcactccagcctgggtgacagagtaagaccctgtctcaaaaaaagaaggaaaaaaaaagttggcaggagcaggattcagaagagtcacagaataaggccacagactccaggaagactttagtcttgagtcggaggagcctcagtttgccctccccaggtgctgcagctcaagaagggcctggcggtcctacccgggcctgccagcagctataaggcaggcccttggcccatggggacctccagccactccctgtggttttgcaagccagcacttaccaccgtgctcagcagagcatgggacagctgcctcgtgggcccagaagaagtggcttctctgctttagtgacaaggtcccagcccacgctgccaggcactgctgtggcaccccctgcggcagtcccggatccgagcaacccccaatggctgtgtgtggaaggaggaagcgagaatgtggttacttaggcagggccatgtgacagcccacaccccattgtttgtgacagctttggtgacaacattgataaagacagggtggtagtggggcacctcctaggtctgacactgttcttgggttcccataactgtgaaaacactgagaaccaagtagaagctttctggggagaagttcttcggttttgggtggggcccaaactgagaaaggccacagcattacttcagcagcaatggacagtcggggccagagggagccccctgaaggacaggagtgaccagagaaaaaggagaatggtctcgcttcttgcccaagattggtggggcgtggggaggggtgggaggtggtcagggagcaaaaaacacaaaatatgaaccttcaaagggtttgcaaatatggtgtatttcttctcgcaggactcaaaacactctctgtagatgcacagcacaggccctttcagctgcaaccaagagcctctctagggagctggactacagataccacaagggcaagtcctgcttatcttatttcttcatcctaaatttgttcatttgaccaactctggcactccagactgcatgccctgaggtctaaaggccagcaattctgggctgtggccctctggtagccctccatccaatggggaggccagcgagtaaacaattcggtggaacatcatgccacaatgacacagcgcagtgagtgccatcctgcggtgagcaagggaggggcctctccttccatcctgggtgggggagggaggttaacaggaggagcttccaagaagtggcacttgagatgacaagccaggtgggcatcccaggcagagagcacagcagaggcaaaggctgggaggcctaagaatacccagacacttccagaagggagggaataggggggtctcccaggatctgccctgcggctttgcaccaggcaagggctcaggacatgcacagaaagatactcatatcttgccttgcacaaagttgttttttttttttttttttgagatggagtttcactctttttgcccaggctggagtgcaatggcacaatctcggctcaccgcaacctccgcctcccgggttcaagctattcttctgcctcagcctcccgagtatctgggattacaggcatgtgccaccaccccggctaattttgtatttatagtagagatggggtttctccacgtttgtcaggctggttggtcttgaactctcgacctcaggtgatccacctgcctcggcctcccaaagtgctgggattacaggcgtgagccaccgtgcccagccgcacacaggttgttttaaaatgaaaaccagagacccagcaggtgttcgccatgacacagtctcagccaccttaagaagctgcagctggaaacagccaaaagctcaccctgccggcacggacagggaaactgaagccacaagaggggaagtgagacccctagaacccaggcccctcacccttccccagcaggtttggaaatagccatccttcagggacaggggactgagaaactctaaacacacccaagactgcctgcaggtcactctctgattagcggaggtgagtggttgcaagctgtctgtcacatccagcctgccacgtggttttgtgcagcttgtgagctaagaatggtggttacatttttaagtggttggaaaatgttttgtgatgcataaaaactgtgcgaaattcgagattccgttttcataaagttttcttgggacacagccacactaattggtgtaaacatattgtctctggctgctttcacgttgcagcggcagagttgaatagtttcatcacctgcaaagcctcacaacacaaacgcttaacgtttcctgagcctgtggtcaatgccagaccctgtggtaggtgctttgcatacatcagctcatataatcctcgaagctgcctttagaaatgaggaaactgaagctgagagggagaatgtgccttgctcaagggcaca

SEQ ID NO: 916825 - DNA, 4001 bp, Homo sapiens
tgttagctttatccaggaccaagatgtggttagaacaatttatgatataagaagggtgtgaaagcaaccatgtgaaatcacccttttccaagttctgaaaaacaattatgtgtacaatagtttgtactatatcgtcatgtgtttgaggttctttccttctatttttacatgtaatctctcccaatcactctaacaccttaaataccttaacactctaacgccgtaaaccctaagtgttcaaattctttcatacacattcatttactgtgcaccgactacgtgcattaagaaagggtccctgccactgagcagctcactgtccagtagggaaagccagatccataaacaggtaccgcaagacagtagagctggtacaactgatagaagatgtagaagttgggaagaaaaggacaagagttccaaagccgcaatgcaagtcaacaactgcattcccttagccagaagtagcagaacctgtttttgtacccatccactccctctagacaactcattagatgagtgacatgaagaccatctttgcagttgggataattaattgaagtcagttaaaaatgaataagccttcctaaaagggactagagaggaaaaataaagggtggtagagtgtaaactggaagtaggttaagggatcatgcttatagagatgcttaaagttgcgctttaactgtaatttcaaagtcagggtaatctgtatttcaacatgagtccttaacacaaattatttttatgaagaataaagatttaggagatgatgagatctaatacatccagaataaccaattataacaaagaccctcagtcaaatagttggtagtagataaaaggctttatatgaatattacaagaatcaccaccactccaaatataataagtgtaccaaatatgaagtaaaatgactttaacaaggctgacttgaaagtgataaagaagcaagttactgctaacaagatagtggaaatactgcacaggcaccgataaacagaaatcaccaagctcaaggaaagagaaacgaggcatagatccagagatcacgttagggtacaccaagaaagagacggttcaagggaattaccaggaggcgatgagccaggtaagcaaattgtggcagttaaggggattttcataacctgagcaggagggtccagacgtttctttctgatggtggcactagcgatatcacatctcagggagataccacagagtaggagagttggagaaatgtttacgtgagacgcagaagtagtcaagaaatatcactcgggtctcaaggaaggcgggagatgaagccggtaccacagaaagccgagcttcccggtgaaaacagctctccccagagaagacccagctctggcgggaaagccccggaatcgcaaccggcctttccccaagtacggctgggcgctgggatggggcctgctgtaacggcagggagacggtctctccgcggcccaggagagagagaccagaaggaacggcctcaggtagcctaacggccaccggcggccacagcgcggccaccggacagcaggggggaggggaggtggtcccagggggcggggcagaggaaaaggcgccggccccacagtgctccccgcttccgcccagtccagcccgggccggctgaccgggtccgacacagtctcctggaccaggctccctccatcctcacccctcccccagcttcccgccgccactcaccgaaccggaaccggctgccatgcgaaggggtttccggccgggcgcggaacgcaaaacccgggaaccgccgcgaaccggaaccgccttcacagcaccggaagagtcgctaggtggctgaagaggagggggctggggcaggaggtcaaagaacagagttaaggaccagtggggcgcctgcgcggtgtggcgaggcccgagaagcgaagggagcatttaagactagtcgtaatttctcagtacccttttcagtctgggctttttcgctttctcgtactcggaatactgttagtgagcccttcgtcctatgcttttctctgttccctctgctcccttacccgccgccttctggttccgcccggcgagttttgcttgcttgcgttccagtttccatggcagcttttcgcggtggccctaaatctgcggaaacctgtggcttcccccgacagatagggacctgagatctaaatcgatctcaggctatctcgtgttttattgagaatcacagaacgttagtgcttgtagaggttattggagatactttagtcttaccaggttcagagaagtgaagtgatttcccaaaggttttaagtgcacggcccatctaggactaggaaacaagtttcttaacttgcaatcctgtactctgcaccacctcatacttgattgaccattcagcaagcaaacaaacaaacaaacaagcaacttgaggacggattaggctagactctggcaagatgtagaaccttccagaactctggaggaatttgaaacaggcagagctgtgaggaaagcttttgggagcccactagagatctgcttttctgggtagagatagagaaggacccaggaatcacctgtgacctttgaagggctttgttgttcctgggacacattgattaacctggaatctgccatactttctaagagaacataatgggaagaaatatgtttgttcattcaggctttttgtcaagcacctcagcttggcaggcctctggacccaggccctgtagaagtcttagagaaatgcccccttaataggtcctttacacccagatcacagccacaggcacagtctgagctcagacttaaagaagggcagtttctggaggcccccagcctttctgatactctcagcagcttgctgagttcagggtttcctcccctgtcaaatacatcaaagtagattatttgtattgcctcatgtgctgatacttttatattatattgtcaagtcctaaggccaagtagtcatgagtgtagctggtccatgtcagtcactgacatcttatttcacagctctgttcgtttggattaaactctgtctctatttctaggaggcagccatgcataaagacgagtttcatctgaaatttttcatgtgtgtgattcagtctcgccagttagtcaggactcctcagagaacaggtacccttgtctcctgatcatactccagtgacagagaatgggttctctcacaagaagtctaaatacaggatgtgaggctttctagtgtaaatacggattttaggggtcaactgaccttgtttatcacattctcactttgataaaatattgatcactgagtcgtgtattttccaggtaagattttgacctggtttgttgtgatagatgccaggcagataaggaggacttgagagttgaggggggaacaaaatttatcccatgagcttgtcattattgtgttgttatgtgaattacttcgaccagtctgggctcatctgtgggaatctttattgtcattataactgacactccaaaactatcagataaatcaagccctaaggaaaaatggccttctcatccaccccacctcaaagtatctagttatatgttctgctttcccccatgtatgtcaagggaatagaatctttttgaggtacatcgcgtctctaatttttcactggatttttggaaagaaagccctggacagctcagagtcatagggaaaatgaaagggagtaaggaacactcccttcccagaatcccaccttgagggtgacctaaagctattgtttctcagctggggaagcttctacttccagcatgctcataccaaagccaccaccaaagacagacatcttgaagagtctagatactatggatgatccagacaccgtgggaagcatacctgttttcaaaactggtgaggcatgtgggtcaacagtgagaaatgttcaaaggaatatgggaaagtgaaagttgtatgcatagtattataaatcagcgtagacctactaaagctgaaatataagacccaa

SEQ ID NO: 916826 - DNA, 4001 bp, Homo sapiens
acgaggtcagcagttcaagaccggcctggctaacatggtgaaaccctgtctctacgaaaaatacaaaaattagccaggtatggtggcaggcacccataatcccagctactcgggaggctgaggcaggagaatcgcttgaacccgggaggcggaggttgcagtgagacaagaccaagccattgcactccagcctgggtgacagagcgagactctgtctaaaaaaagaagaaaaaaatatatatagagagagagagagagagagacgggggggggggggggggcggagggagggagagagagagagagagagacgcaatgttagctttatccaggaccaagatgtggttagaacaatttatgatataagaagggtgtgaaagcaaccatgtgaaatcacccttttccaagttctgaaaaacaattatgtgtacaatagtttgtactatatcgtcatgtgtttgaggttctttccttctatttttacatgtaatctctcccaatcactctaacaccttaaataccttaacactctaacgccgtaaaccctaagtgttcaaattctttcatacacattcatttactgtgcaccgactacgtgcattaagaaagggtccctgccactgagcagctcactgtccagtagggaaagccagatccataaacaggtaccgcaagacagtagagctggtacaactgatagaagatgtagaagttgggaagaaaaggacaagagttccaaagccgcaatgcaagtcaacaactgcattcccttagccagaagtagcagaacctgtttttgtacccatccactccctctagacaactcattagatgagtgacatgaagaccatctttgcagttgggataattaattgaagtcagttaaaaatgaataagccttcctaaaagggactagagaggaaaaataaagggtggtagagtgtaaactggaagtaggttaagggatcatgcttatagagatgcttaaagttgcgctttaactgtaatttcaaagtcagggtaatctgtatttcaacatgagtccttaacacaaattatttttatgaagaataaagatttaggagatgatgagatctaatacatccagaataaccaattataacaaagaccctcagtcaaatagttggtagtagataaaaggctttatatgaatattacaagaatcaccaccactccaaatataataagtgtaccaaatatgaagtaaaatgactttaacaaggctgacttgaaagtgataaagaagcaagttactgctaacaagatagtggaaatactgcacaggcaccgataaacagaaatcaccaagctcaaggaaagagaaacgaggcatagatccagagatcacgttagggtacaccaagaaagagacggttcaagggaattaccaggaggcgatgagccaggtaagcaaattgtggcagttaaggggattttcataacctgagcaggagggtccagacgtttctttctgatggtggcactagcgatatcacatctcagggagataccacagagtaggagagttggagaaatgtttacgtgagacgcagaagtagtcaagaaatatcactcgggtctcaaggaaggcgggagatgaagccggtaccacagaaagccgagcttcccggtgaaaacagctctccccagagaagacccagctctggcgggaaagccccggaatcgcaaccggcctttccccaagtacggctgggcgctgggatggggcctgctgtaacggcagggagacggtctctccgcggcccaggagagagagaccagaaggaacggcctcaggtagcctaacggccaccggcggccacagcgcggccaccggacagcaggggggaggggaggtggtcccagggggcggggcagaggaaaaggcgccggccccacagtgctccccgcttccgcccagtccagcccgggccggctgaccgggtccgacacagtctcctggaccaggctccctccatcctcacccctcccccagcttcccgccgccactcaccgaaccggaaccggctgccatgcgaaggggtttccggccgggcgcggaacgcaaaacccgggaaccgccgcgaaccggaaccgccttcacagcaccggaagagtcgctaggtggctgaagaggagggggctggggcaggaggtcaaagaacagagttaaggaccagtggggcgcctgcgcggtgtggcgaggcccgagaagcgaagggagcatttaagactagtcgtaatttctcagtacccttttcagtctgggctttttcgctttctcgtactcggaatactgttagtgagcccttcgtcctatgcttttctctgttccctctgctcccttacccgccgccttctggttccgcccggcgagttttgcttgcttgcgttccagtttccatggcagcttttcgcggtggccctaaatctgcggaaacctgtggcttcccccgacagatagggacctgagatctaaatcgatctcaggctatctcgtgttttattgagaatcacagaacgttagtgcttgtagaggttattggagatactttagtcttaccaggttcagagaagtgaagtgatttcccaaaggttttaagtgcacggcccatctaggactaggaaacaagtttcttaacttgcaatcctgtactctgcaccacctcatacttgattgaccattcagcaagcaaacaaacaaacaaacaagcaacttgaggacggattaggctagactctggcaagatgtagaaccttccagaactctggaggaatttgaaacaggcagagctgtgaggaaagcttttgggagcccactagagatctgcttttctgggtagagatagagaaggacccaggaatcacctgtgacctttgaagggctttgttgttcctgggacacattgattaacctggaatctgccatactttctaagagaacataatgggaagaaatatgtttgttcattcaggctttttgtcaagcacctcagcttggcaggcctctggacccaggccctgtagaagtcttagagaaatgcccccttaataggtcctttacacccagatcacagccacaggcacagtctgagctcagacttaaagaagggcagtttctggaggcccccagcctttctgatactctcagcagcttgctgagttcagggtttcctcccctgtcaaatacatcaaagtagattatttgtattgcctcatgtgctgatacttttatattatattgtcaagtcctaaggccaagtagtcatgagtgtagctggtccatgtcagtcactgacatcttatttcacagctctgttcgtttggattaaactctgtctctatttctaggaggcagccatgcataaagacgagtttcatctgaaatttttcatgtgtgtgattcagtctcgccagttagtcaggactcctcagagaacaggtacccttgtctcctgatcatactccagtgacagagaatgggttctctcacaagaagtctaaatacaggatgtgaggctttctagtgtaaatacggattttaggggtcaactgaccttgtttatcacattctcactttgataaaatattgatcactgagtcgtgtattttccaggtaagattttgacctggtttgttgtgatagatgccaggcagataaggaggacttgagagttgaggggggaacaaaatttatcccatgagcttgtcattattgtgttgttatgtgaattacttcgaccagtctgggctcatctgtgggaatctttattgtcattataactgacactccaaaactatcagataaatcaagccctaaggaaaaatggccttctcatccaccccacctcaaagtatctagttatatgttctgctttcccccatgtatgtcaagggaatagaatctttttgaggtacatcgcgtctctaatttttcactggatttttggaaagaaagccctggacagctcagagtcata

SEQ ID NO: 916827 - DNA, 4001 bp, Homo sapiens
gaagacacagtgtcaacccttgagcacccagagccgcctgcctggctcttccctcttcccggctctgctcttccccggcggctctgtcgagaaccttatcaatgaaacaacactcctggccccagattggctgccacttccagaggggaaggggcagcaaggaggtggggggacaccctggatccttagaggactctcttttcagttttcagaccttctcttgatgtatttcaaggcatcctagtggcacttcctcagtcccccacaagtaaacaaactctgtctcctcccctaacacaggcaacactggggactgtctaaacccaagccaccagggctcagagagggggcccgcgggggtgtcagcggtggggaagcctccgggtggtccctaggggtgcggtggccaaggaccggcacatttggtaaattacagactgtctcctagcaacagacaacacatttagctccacgcgactctaccctcaggagggggctaagaaataaggttgtggggggggatcccaaggaagagtgagggggggtcctccccacgctgcaggaagggtggggagggaaagggtcgggctgacaggtctccccacgctcctcccctgccaggctcacctttggtgtccagctccacgtggataatgttgcccatgacggaagtgctgtgcaagtgctgaacggcatccttggctccccggaccgtggcaaagaccaccttggcgatgcccaggtgcttcttggtcttggggttgtacaaaatctccacctcctccacctccccatacttcttgcacatgtccctcaggaagttttcacggatgttatcattcagcttggcaaatgtcacctgcttcggaggcaccgggcccacgtagaactcatcgatctggcaggggccgagggggaagggagtttgaagaacgtttaaacctaagggaaaacacaacatcccccccgccccgcccgcaactcgcccacccgttgaaaacaataaagggtaaaaaaactaaaaattaaaaaaaaaaaaaaaattttttttggaaaaaaaaaatgcacgcgggcgggcccgggaagcggaggattaaatcgtttggaacgtggaagtcctctgggttcggaaggaaaggggaaaaagaaacagtttctctttccccacccccctttctggccttctcttcctgctgccgggtcaggggcgacccctcaggcttaagaagttgtcctgtagtgggctagcgagaggggagagtctcggagccgagccccccgcggggcgtgcaggacactgtatctgcgccgtgattacagtttcacccagtgttattttgttttcagtagctgagaggggacaccctctcgccagcgctctacccctccccgccaaaacttccctggccccggacggcgggaactgggaatccggctgggctcggtcaggactggcgttattttcgaactcggggaggtgggggagggacggcggggcagtggggaggggtcctaccttgaatttgggcaccgacagctccagctccttgtttttggtccagatcccgacgacccggggatcttcgacaatttccaccgggcggttgctggacatctgtggggagaaattggggggccgggatgagagaactggtccccctccccatgggcagacccctttctcgaggcacttgtcaaactccagggctggggccccgtctgacagttggccgggggatcgggcggggggtccctggccgctaggcgcgtctccccggacacgacgcggggcacggctgggggggcgcgccggctactcaccgccaggctgaaatgctgcccatcgtagcggtacagtttatgatgcccctttttcagagccgggtcaatcatcaacttgtaacttctccaatggtggttcctcctctcgcccgaagggccgggctgcggcgggggctgctggtggtggtggtggggggggtgactgttctccatgccgttaacccaacctgaaaaccagcaagttgttgtcgtctccgccgcggcggcggcggcggccgcttctacacacacgcgaaagaatccaatcggcaggcccccaccccctcccaccttgccagcgcgccccgaaaggagctgtctcgctggctccccccaaaacaagaatggagcgagagaataacccttccgggagaattacgcgcccgcccgctcggccaccgtctcggggcggcagcgaggggctcccgggggtcccctgggcgggctggcggggcccggggcgcccggaggacgcggactccggcccatggtgcccgcccggccgcccggcgtggcgctcacccgctagctcggcccggctctggcgcgaggctggcggcagggcctggcggcgccgccgcccgcccgcccgctcgcccgctcgggccagggccggggccgggggcttgggccgcccggctgccggccgcggcctctccctccccgagccgcgcttacatccccgccgggcgccggcctccctgcgccgccagccagtacatggtgtcccccgagggagccgaggccggggcggccggaccgggggccaggaagggggggcgccgccgccgcggctgccgggcccggagctgctgccgctgccgccgccgctgctgctgctgctgcccgggaggcggctggcggcggaggctcggctcccagtagccgcacatcccacaatacaccgctaaggagcccgacccgagcgctcaccctcctcctcttcctcctcctcctcctcttcctcctcccctctccttcctcgccgcttccccaggcactctcccggcggcggcagctgcgccgccaaagccccgggccccagcggccccccacccctcactcgcgcgctcccacactgcctccccctccccgggggaaggccttttaatttatttatttttctgggactggggtgggggtcttggctggcgggggagggggtctccccgggctctacctcccgcggccgggactaccctcagagccgcgaccgccgcggcgtgcgtcccgggcctgcaaaactgtttccaaactgcccgggccggaggcgggcgcgcggggcccggggagatggctggggtctggggggccgagggtgtgtgtggacgctgggagccgcggggggaggccggcgtcgactcagaggagttgcaatcgaggtatctgcgctccggcttcctcctgcggcccgcgaccccctccccggagctgagctggggaagggagaccagggttcaccacgttagcattcgcattcctgggaggatgcagccctcgcctggacctgggcgatagacgccttcttctgtttttatttttggaggggagcgccctgtaattgtcctgaacacatgcttcccccccttcctccagccacccgcggaggagagagtcccccttttttgcatttatcttttccttcccctttctttattaaaggtccgggagtggcggcggccaatcagcgcgcggcttccattttgtgagttcaactccgaggctcccgggcttcgcgaggacgcgtttgcagccccctctgccgctcctctctggcggccgaggcgcaggagccgcctcgccggggctcggagctggtgtagctcatattggggctcttttcggggtttgtaatttggccgtgggtaggtaattggctggagcagggcggcagggcgcggcagccaatcagcgcgcggcttctatagggcttgagttattagacgctgatctcaaaacatccttcatcagacacgaaggagaggccaacagatgagggaagccatttttctgcaatggaattaaatggccaagtgggtttttcctttgttgcaaatggggaatgtttttcctttgactctaccatccagttcaggacgtctcagtgtgtttaacatttgtcaacaggcccaaggactcacagttggaagactggagaagactttttaaaaagatctgga

SEQ ID NO: 916828 - DNA, 4001 bp, Homo sapiens
acaggtaactactaatttgggggtcaagtgagacagtgagaatcaataactaataattacataggtgatttgtaagctgccatgggaggagctgacaaacattatcttcgctttgggtaagtaagggaggttgggtggcacaagcaaagacccagccaagctagagtctggacagcaagtttggacttcacgcttcctcttccaaaaaatgagaataacaatttgtaaagatcaattgagttaataaagtgcctggccctcagtggtaattattattattttgttattgttcttgtttgtttttttgagatggagtcttgctctgttgcccatgctggagtgcggtgacgtaatctcggctcactgcaagctccacctcccaggttcaggcaattctccctgcctcagcctcccaagtagctgggattacaggcatgcgctgccatgcccggctaattttgtatttttagtagagacgggatttctccatgttggtcagactggtctcgaactcccgacctcaggtgatctgcccgccttggcctcccaaagtgctaggattacaggtgtgagccaccatgcctggccataattattatttagtcatattttaagtatttcaatgatagatggttagttttcttcatatattaattaatgcactacttttaaaacaagtagtttaaatgattttgctgtgatgagaaaaatgaacccaggaagcatagttttattaaaatttgtcagataaattagtcagataatgttaaatatacttttagatgcttaacacttttcaaaggaaaaatattagtattaattttctccaagagttgagtgatgaagctctttaacctgaagtttactatgcctcattttttcatcaggctctgggtaagtcttatcccaaaagaacctctagggatgctaggagaatagatgatgcaactgacttcagggcctgaaaacaaagggacccaatagatatttactgaatgaatcattattttattcattattattgctatagggagcatactgcactaaagcaaattcctactaacacttgaagccttgaaattttgagaaaaatataataccaaaacttttttttttttttaatactaattctactcaactttcacgctcaagtttttggccctttggcgtgaaggagacgcagtggctggaaatgaccaagcggttggagatctctttgccgcatacctgggaggcactgtcctgacagccaactaagtatgcagaggacttcagacagggcatcgcctcccagggctgtacaagcccacccaagccatctaccggggggcgaagtcctgaccagatgcggggcgaacgaccgcgcccgcgagatgccaggaacccgttttaccccaaagtgggccagcggggcccggccttcgctccagcggcgcagagctgactcaggacgtggggagggaggaaaggcgcctgctgcggtgtccaccctgacgcgcaccccaatatgcaggttatcgatctgcgccttcgcctcgggatcacctcctttcccaaagagagagggccccaaagtgggcgaagcctcactcctgcccccgccccacttctatcaataacacctattccctggaggtgccctgcgctttagtttccaaagagctctgacatatggatctgctgccgtggagaggcaggcccgcaggtgttcacttcatagaagggaaacagaagcacggcagtgggaagggtttctgggggcatctggagccgcaagggggggccggcgggttccgcagcagcaccccctctccccccacgcgggtccccaagcttgccccgagccacccgaggaggacgcctccccgcagccgctgcctccaccccggcaacccctccagcacgacccccgacccagccgctccggtgccggccacttgggcaaatacctctagccatggctccactctgtcaccgcctgggatctcccgggaaacccagctttcgaaaaaagttgcaacaactcagccaactgctccgccgggctccagctgctcgccccgattggcgccgcctcccgcctctccgcaggctgcccgtagtgataggccaactcggagaaaggccccgcccttctcccgcctcttcggcggcggggcgtgtccagccgccgcaataactgcaaacgctttcccgacaggtcccggcggaggaggtgggaggggtgtttaaatttgaccgtcgccagacgttgaatggctgcgatggaagacacccgagctgccattgggaggccccagattcctccccctcccgctgctgaagctccgcctccggagcgtgagtagcccggctggagccctgggctccgagccgaccggatctgggacttccggttctctgtgggcttgaccggaacccgacctttgacccctcgatcttcccttaagagctgggaaacctgagtctcccagcagtttagcaactccagcacaccgacctctccagcagtttgatccattcattctcaggtttgaaaggttttggccgggcgcggtggctcatgcctgtaatcccagcactttgggaggctgaggcgggcggatcacctgaggtccgtggttcgagaccagcctgaccaatatagagaaacccagtctctactaaaaatacaaaattagccgggcgtggtatcgcatgcatgtaatcccagctactcgggaggctgaggccggagaatagcatgtaatcccagctactcgggaggcagaggttacggtgagccgagatcgcgccattgcactccagcctgggcaacaagagcgaaacactgtctcaaaaaaaaaaaaaaaaaaaaaggtttattgaatattccagtattcaaaacccggccgggcgcggtggctcacgcctgtaatctcagcactttgggaggccgaggcgggtggattacgaggtcaggagatcgagaccatcctggctaacacggtgaaaccccgtctctactaaaaatacaaaaaaaatgagccgggcgtggtggcgggcgcctgtagtcccagctacctgggaggccgaggcaggacaatggcgtgaacccgggagacagagcttgcagtgagccgagatcacgccgctgcactccagcctgggcgacagaacgagactccgtctcaaaaaaagaaaaaaaaaaaaacccacagacacaactcctaccaactaactgggtcagtagggaaggtccttccaggaccgcaaagatcctaatgcttcacacccacccattttacagatggggcaatagaggaagcgggtcacttacgcgctgcccaaggtcacccagcaatgtaattgcagggcctgggtcagtctctccactgttcaaacactaaatggctaccttatcccgagggaagcaagtattcgctgttcccctctgagagagggggctcagtcagtatgttcccagagaatcaggtgtcctggagtgtctgctttggactcagggaaggcgtccagttactactgctcttccctggggcccctcccaggggtgtgggacgaggtcactaatccatcctgtctctttggtaattgaaaaggttttggagacccaaccattgcccaaagactcttccaaagcaccaggaaaataggaaaggaaaataaaatgatatatgtgaaagcactgggaaaggtagaaaaggacacttttgtcacaaagtcactgtgtcacttggcacatcagttcagctctctggccttccatttccctacctgtcaaatgaaggagctggtgccgtaatctccaacatgccttacagcttccataaatatgtggaagtgtggcagtgtgcagtggctctcacctgtaatcccagcactctgggaggccgaggcaggtggatcacgaggtcaggaattcaagaccagcctgaccaacatggtgaaaaccccgtttctactaaaaatacaaaaattagccaggcgtggtggtgcgtgcc

SEQ ID NO: 916829 - DNA, 4001 bp, Homo sapiens
atgtagaccaaaaaagacatttacaggaaaaaggcccaaaattccaaggtagtcaagttactgcatttcattaaatttcaaaattaattggattttgatgtaaacctccttaacttacaaatgtagattattattaaaaatattatacatgtacatgtgcggcgtttgctccccaccagttttggaagacctaactcaaatcatgtacagaatgataggaaaactgtacaaagagctcagacttcattgcttaccaaactttaatgataaataacacaagtgacactttggaaaagcaagcctgacaactcaggcgacacattcaatataaaccatggtgtgaaggcacagcacgcttgagcacagcacggagccatcagatccagacatgatctgattccgcggccctcccttcaccagttctcgttttcgagctctaattccaaaaggaaacgtcagggatggaaaaaggcctatttggtcattaatgtgtccattctggccagctcagaggtcatccctacagtcatgctccagggctatgaagaatccagttttaatggtctcaaacgatgggctttcttcacgtggagagactattccacagtttaatggttggtcatggttagcttttcagtccgggccccagaagtagccgaacaggcaaaaaagaaaaaaaaccaccccacaacaaccccaaaacccagagacgaggggaagggggattgaaaaaatgggaagaaagaggggagcaaaccacctacatcatgtaatgttatccttttcaaatcaaacgcctttagaaatccctaatcccaggcccccactgcccataatcgctagacaccctcgagtgacgacctaaagcaggtttgatttgaaaagaaacaacacatctatatcccagctccacccttcagtcttaagagacagtgaaaccagccctaagaacactatctcttccaagagcaaggccagggtccgcacgaagtcaagtggccaccaactgacgggcaactttgctcactacctcaatctgtcaaactcgtcggattatcaccgggaaatcaaacgtcatgccggcaaagtacgggcgctccactgagggctctgggggcataacaggttaaggctaactcacaggtccaagagacacttctagccactgtctcagtgagcggcggttcggaagaataaaggcacgcctcccagggtaccctcccagtacaccgagcagtgagagcgcggcaagtagaaaagcagcgcacgaccccatggcatcgccgggcggcaggcccaggtgcactcaggaaaagaccctgggcactggctgctttcaccgcgcggaatcgccaactgcagcccagcgacagggtgaggggtcgagaggggctgcgggaccagagacgatccctccggagacggacgcggcacgcaattccagccagtgccttagggcaggtttcaccgtccccctccccaccagaacaccaggaggaggtggggacaggggagggggtgtcccccagatccccgctggctccagaaaactctctgcagtccttgcagtcaagtcaacatcagacgagatcaagcgggtgagggaagggaaggatcgacgggtggggagaggaaccgacctgtcgatgaggatcttgtggtcccccatccaggggatgaggtgctgtccctgttcctgagccagggcccgctcgtcgtcccggaacagcttgcaggcatagccgaaaaccaagagctccactcggctgcccccaccgccggcaccgcctggcccggcctcctccttcgcgccgcttttcctctcgggtttggcgcggcccccgctcgcgccgtacatgacagcgtccccggcgtccaggctggtcctcttctgtgccgcgcgacgtccctgatacctccacttggcctaccccttcagtcaaagaccccgcatcccgtacccaacctcaacaccgccgccatagcgggccacaaaatggtggaggggcagcttccggcaggagagcccgcatttccggcgagcggaccggcagattcgcctaggcttggagctcttttagccgctaggaaatattttggctttaattttcgcattcaggtgtgccgccacaataggcgctgctgtattcagtggaaagtgcaattttaatgtccgttttatcgggcagccgtcaggacgtggcgaaagcgcagcgtgggatcgcgcgccggcttccgctgcggccagtcgggcggcgacggagtcggagggaggggcccggcgcgctctgggccttgggcgagtcctcgtgggtggcgggttgctgcagcctgccacatgtgtggaggcctcgggtccaccccgagcctccgcgcccctcaccatgtccgagtcgctggggccgtgcgtgctctgcccagggtggcgatgtccttttccttggccccgtttccttctccatccctagggggacttggtccccgacccgcccacctttgaaggtttccgaggcagcagaggcccctgcgctgcaaatcactcgcgggtggcgagatttcggaaacctgagacccttgtcgccgggagatggtctggcggggcagggagaccccagtctggagactggccacctggatacggtgcaattttgcttggtgtgtttcctcctgggccgcagttttcccatcggtggttccattaggatctttcggtcccttttagctcagtaatttcaggtcagacaaagggcctggagtgcaaaatcttaggctttgggatgggatgggatatccccatgtttgcccttgagtggaaaacgatgacagatcgtctcctttctgggcctcagatcccctctccataaaaatggaatctttctaccagtgatgttgaaatgagataatgtatatgaacctttaactgatttttggaaattaagaaacaggcagttcccaccaaacgtcttttgttgtggtttcccctgactgggtcatgcttctgtcttcatttgccaggctccttacccaagtttaactcagtcatccatttctccacctggccttatgtgtctacgttgtctggagtttcccctcactggtggctaacttgtgccttccgatttgtctgtgtacctctcatcaccaccttaggttacatcctgtgttcagcatcccaccagaattagctttaagagatcagggacattgttggggtcaccttagcatcctcagcacctagaatggtgcttagcacactgtgggccaaatactggttaatacctgtagaatgagccgggccagcagctgagcatgcgtggccaggccatcatcttcctatctaactctacaagactgctctgccactgctgaggaagatgtatgtgtcatggttacttgataaaaacactgttgtttgcccccaggcatttactagtttgtttcggtgctgggctcccttcaagctttcccttgggttcaggtgtggggtgctaaagcaaataaggaggccattagcttgagatcaactctgtaacaccagctcctatgcaagcaaaccaaaacccaatcaagtaatttttctgcttccgtgttgggtctataaaagcttgctgctcatgctgctgagtggaactctctgaacctcttctgcttctgcatgctgcctgattcatgaattgttttcttgctcgaataaactcgaatttgttttgtgtaaagtttctcttttaacagttctggtgtcagaaatgggatctgaaggcccccctattccctcaatgatgacctctgggaacagtgactaaacagatgcaggtgcttcattgtgcaggacagttctctgtatagccttgggcctacccacttctccctccttttcctttgtagttttcaagagtaactgcataacgagctgggatgcaacatcctgagatagggagggactggctgaagtagcccaggctctgttccagttctcccctagaaatagaaggtccttcaac

SEQ ID NO: 916830 - DNA, 4001 bp, Homo sapiens
cttggggacctgtctaaaaccccacccagagtgaattcccctcagttcccatcatggtcctcctgcatgtcagagaatcacagggacacagacacaaagccccctctcagagagacagcaaccacccccaagacagaatcatgatggcaaggacacagagcccctttcagatgctagagtggcctccctacagcgacagacacccagaggaagaccttcacacagggaaagacagcccccaccacacctgcttccagaccagcccagagtccccagcagcaacatggtcccctcctcagatatgggtgccgactccaccaggtggccaagggtggaggggccagttacacatggcccctgcagcctgctgtgaggatggtgggacgcttctactctcgagtcggctatggtggggctatgcgcaaggcctggggacagtggcttatgagggatgatgcctggaaagccctacactccctaccccgcagtgggcaccttccccagcgctctcatcccaaaacatggacaggaagtccaggccccatccagcccacctggctaggaggaatgtcctgggatgggccttgcaaggagcaggatggaaggaggggagccacacccccagggccttttccctccacaccttcactcaagctgtgccctccgcacagggcaccattctggccaaaccgctgggctctcaagtgccaaataaggacaaacaactgtcaggcaccgggagctgcgctgcagtgacagccagcggaccagcacatggcacagggcatgcagcagcttccatccacctgccctgtccccagcaggcctgagccacttctgaggacaagatggcatctctgggcggcactcagctccatacacggcagggccaccagaccccactccaggcctggtcccagcacacctcccctgctgcatgccagctgccgtcagcccacgcctcgcacgaccacatcctgctcccagctgtccccataggaatccttcctgcccccactgtggccagcctggctaagcccagcacccctgcccttggccacacctttttcaggtgacgccttctgcgcctcgccaccacaaggccatggacgccccaaaccacgagtgccaggctgtgctggcctccagacagaagggagagcaagcagctcccttggcagggagggggcaagcctggctccctgcagtgggtgggggttgttcacgcctgtaacgagcactttgggaggtcaagatgggcggatcacttgaggtcaggagttcgagaccagcctggccaacatggtgaaaccctgcctctactaaaaattcaaaaattagccaggcgtggtggtgcatgtgtagtcccagctactcaggaggctgaggcacgagaatcacctgaacctgggaggcggaggttgcagtgagccgagatcgtgctactgcactccagcttgggctacttcaagatgccctctcaaaaacaaaaaaaacaccagtgaggactgtagccaggccccgcatctgtgacgatcaccgagggtatcatggggccccagggctgggtctactgtagcacacaccagtggggccaggtccccaggcttgaatggggcaccgacggcccatccccctgccacaaagccaggaccagctcggggaagccccggccaagcatctgctctgcaccgggtgtgggtggaaaaagatgtggttaagaaacaacaaaaaacctctgtcgcccgtctcgggtggggagagtgcaccagaggagaggggactcatcaccaccaagatccccaaagccccagacaacggtagctactgcctgccttcgaagaacgatgattcagaagaagaggtgagagcaagggcttctggggtggaggggctcccagccaactggcacagccaggccaggtcctcctccagccacggcacagcaccgggaatcccatgtccttctgagctccacccggcacggactctcattactatcattttagctcctgtttactgaacgtttaccatgtcacaggccttgacacacagcctctcactgacatcacaaaacaacaggaaatcacaccagccacccataacaaaagccagctggattaaataattaaaagtgaaaaaggaaaccaagacagaactagaataaaacctaaataattatttatctgatcctgggtggggaaaggcctttctaaggtaaaaaagcaaagaataaaaccataaaggcgaagatcactggattttactgcctggaacttgcaaacccccataggtcaagaaatgcaggaacaaaattgaaaagtcaaatcggaaaccagggaaatatttgcaacatgggacagagctaatatccgtgccgtgtagtgttcacaaatcaagaaaaaggcaagcagtgcaggagacaaacatgctgagtaaatagcctgataaatcacaagaaatgtgtatgaccaaggaacagaagagaaacagtcgaaatccacggggacagaaagatcagtggttgccacgggctggaggcagggagtttggggactgactgctccaaggtttttttctagggtgatagaaatgttctggattagatagtggtgatcattgcacaattgtttaaatatactaaaagccaatgcattgtacaatttaaacaagtgaattttatggtatatgaatcatatctcaacttttaacaaagagaaatggtcacacttaggataagataaccacttttcatccagaaggtggcaaaggtttttaaaataatacccagtgctggcaccactggtgacaagaagatatatgcgtatgacctttctggaaggctactcaaaaataatgtatcaaaagaataagaaatggctattaggcagatgaaaagatgctcaacaccattttccattggggaaatgcatatcaaaaccacactgaggctaaacccggtagctcacacctgtaatcccagcattttgggaggctgaggtgagaggactgcttgaatccaggtgttcgagaccagcctgggaaatatggtgaaaccccagctcttcaaaaaacaaaaacaaaacaaaacaaaacaaaaaaccacatcacgtagtgtagtgaaaaacaaaaattagctgagtgtggtggtgtgtgcctgtaatcctagctactcaagaggctgaggtgggaggatcacttgagcccaggagtttgaggctgcagtgagctgcctctgcactccactgcactgcactccaggctgggtgacagaacaagaccccgtttaaaacaaacaaacaaaaaaaacaccacactgagaaactacttcacaccctttaagatggctgggatggctacaatcaagaagacagacaataacaaatattggcaaggacatggagaaactggagtcctctcacgcaatgatggtgggaatataaaatggtacagttgcttcagaaaacaggttggcagtcatatttattttatatatagtcatttttttttctgagtcagagtctctctctgtttcccaggctggagtgcaatggcatgatcttggctcgctgcagcctccacctcctgggttcaagtgattcttctgcctcagcctcctgagtaactgggattaaaggtatccaccaccacgcccagctaatttttgatttttagtagagacagggtttcaccatgttggccaggctggtctcaaactcctgacatcaagtgatccacctgccttagccccccaaagtgctgggattactggcgttagccaccgtgcccagcccaatgtaattaaacatagaattactgtatgccccagcaattccactcctagatgtatcccaagagaaatgaaaacacagatccacacaaaaacttgtccacgaatgttcatagcagcattattcataacagccagaaagtggagataacctgatgtctattaagtgataaacaaataagcaaaatgtggcaagtccatacaatggagt

SEQ ID NO: 916831 - DNA, 4001 bp, Homo sapiens
cctgttactcccccattttacacagagggaaactgagggcagagtcacttgcccacgccttcagctgaacgaaggcaataggagtagcaaagcacagtctccaggaccctcctcactatcctcctccacttcctgctgagcccctgcagaccctgagcccccagctgctgatgctctgagccagccccttcccagctggccgctctgtggcccacagggactcacaaaagttctaggaatgctcaccctttggctcagaaggattttccctcccagagggggtagtgggaaaaggctcaggaaaagtgcactaaaaacccttccaacttcccccagtaggccctggctctcatcctccgagcccagcctgcccaggtggcctctgacggctctccctccacgagggcaggtcccgaggagcctccagagctgtttccactcaggcagccaggtcagtgatgggaaacccagacacaacctgcgcctgcatccctggagacccacaggcccactgccctggcaggggccctgaggcctggctgctagccggtgttagggaactgtcatctccccggcgaggggctgcgggtcagatctcggtccctcctgccaccaaagctggccttgccgacattgccttgccggggcctctgctctgaaccccccaccagatttcacttcctcccactcagcccagcctggccgtgcccctccctggaggcccccagctgcaggcagtgacctcctcacctacatcattgtggctgggaatggggaagagaaacaggagaatgaggaaactaaagaaaaaaagaagcgggacaggcaggcagaccctcctctccagttcctcaaatgcagtccccctccctcaaaacaaagctcccctggccggagggagggaagggagggaaggggatttctgcaccaggcatcagagacctctgaaataccatccctaccgtgcggatctagaagaccaacacccactccagacgttttttggtcgggggattcccagggaaccccaggcaagaggtgtgagaggatcaataccagaaacctgtctctgggacgcctagccctggtgaaccgcccaattcagcagcatgcgggggcctggcccggtcgacctcggcagtgcaggaactggggagaggggcttcctgaatcagggcgctaccctcttagccacatggcccggaatggggagtggggaggggccggcgcatcctcccccgctgcccccacacccaagggctcatctgtgctcacagcctcagtttgactactttcactttcagggtagcaatgggtgacccctgaccgctcctccccaggcacaagttgaggggagggccgcccccaaccggcgaggctaccgtagggtgggctgggggcgtcagcgatgccctctcccccatcccacggcctcagttaccccaacgctctccctaacacgtgtgtgggtgggggtagtggctgagtggggggtcgtaggcgctgggagccgtcaccccggaacgcctccatccgagttggctgcagggcagtattttgggctgggggtgacgcgcagagcccgggcagaactggacacggggcctcctctttccccacaaaagccctcccggccccggaggaggggagcgcgggcaaacgcgggctcacctgagagacaggagctctgggcccggccggcccatggcgtcgcgcgcccccgggccctcgaaatcccgagggggcgggcgggcccccgccctgggcgcgtcctctcccgcccgccggctcctcgctcgcggctcgctcgagcggggctcaggcaggaaacccgggctcggaaaatggccagcgcctcatcatttccgccgccagcgcttgacagttgcgggaggatgcgcccccgggccgccgccgccggggaaactttgcagcggccgccgtcgccaccgcgggccgcgacagtccgggcgggcagccgggcggaggcggtggcccgggcccatgccgccccgcgccgttatgtaaagaggaaccggccgtgcgagcggagcccggcgggggaggccggccgcgacaggggcggggcaggggcggggccaccaggagccacgcctcaggccgcgcgcgagtcggagattcggctggaggggcgggccatgagggcggagcccggactggccccgcctaccaatcccgctagtccgcggctgccagggtcggagggctctcctggcgcgggtccggaaaaaggcgaggccttgcgaagccacgcccaccacgtgcccacccgatttcgcgtcccacagtctgaagatagaagtgaggatcggaggggcggggcgactttagccccacccactcaacgccggcaggtcaccaggtgcctcagcgcctggaggcggggccagatgaaggggcggggcctagggcgggcagggtcgaggggcctggcctccagggggcgcgcccttgctgactccctcctgcagggccttatcagtgcccgcagggctgggcggtgcaatagcgaccacggctttcatcatcgccccagggagggagcccagccctgcccgaccctgactatctgcgatcatgctgacccgacccgccacggccccaggcccccgatttgggttctggccccagccctcagctttgcctttgctacagccggtgcccgtatagcccagcctcgctccggccgcccgtcctgtcccccaattctaggaggggtgcatctttctccaggaagccctctccgaccgctggcttccgtggcctctgcgcccacccccctgcccgcccccgggctacttacattttctccacggcctcatggggagctgagacggacagtggggttccccctagtccggagtgggacatgctctcagccagcctctcccccaacatgtgggagggcggggagggaggaatgtactcttctccccctcccccaacaggaaacaagtcgcccacgcccccagcttggaggggccacctcgagtcttcccaggcagcaagtgtctccattccactgcctccccctcttcctacccgggcaaatgacttgacttctccgtacctctccacttccttgcctatgaaatggaaataatgtgtacccactctcctggcagtgagaattaagtgagttaatgcattaaagcagttagctcgaggcttggctccaggaagctctctgtgttaaacaaatcggccccagtcctgaccttagaactacaggaaggggttccccagaaggtggggatttccagactccgagtagatgggggaagggagcggtctgctacaggattcctggtgtccaatgaccttgaagaaaaaggccacaaaaatctgctttccgcacatttccaggcactgttctaggcgctgggaacacagcagtgaacaacacagatatccctgcctgcgtggagctgatattctagtggggggacataaggcacgaataagcaagtgggatcagctatgacaatgacaaaacagttacgggatggagagctggaaggggatgtcttagatccagggctcaggaaggacacctctgcggaactaacatgtgagcttagaaccctccatgacaagaaggatccaggtgctataacgtctgagggaagagcattccaggccaaaggaacagcatgtgcaaaggtgctgaggtgggaatacatgtggtgctttggaataaagtcataaaggcagtggtgacacctatactggtaagagatgatgtttcaaaggtgggcccatcacatggtgtcttgaaggtcttggtggggactttgggaattattttgaaggcagtagggtgccatggagggttgtgaggagaaggacctgtggagtgtgggattcaagctgttcacacggcatctgaggatgtgggaagaggggtggggtgggggaatgtcaatgaagtctaaacgaggccgggtgtagtggctcacacctgcaatctcagcactttg

SEQ ID NO: 916832 - DNA, 4001 bp, Homo sapiens
ctccagccctcacctcttgccaggataaccctccgagtacttgttgttcagacaggaccccagggcctccagcgcagctcggctgcagaagttctggggtggtggggggcaatgtcagaaggtattgagccccttcccctggactcccacagtccctccctgccagagccagagctgaaagcgggagtactccctgcagaaagctccattcactcagcaccaggcctggggcaaagccagaggcagcattctcagaaacccatctgccatgagcagtggcccctcaatgccacctacccactcaaacttgtgcttctaggctcctccttcctcataggaggaaggaaggaagggatcagatgaaactgtagggaccctggaggctccctaaatgtcccaaccccataaactggacttgcactgcctttgcttgagggagataagaaaggaagataaagcccaaagaaaggtcctgagtgtgaaagggggttttggagaaatatcagttaagataactttgttacttcctgtacccatggtggcccaacccctgcccatctccccaggtcccacctctgaggcaatgagctccaggccacgacactgcctgtccttctccctctgcagcaactcccacatctcaggatcactgtccgacaggctctcctggcctgtccagcccctgtttgcttccccagtctgagtctgggctgcgttgctgtgctgagcccgaatggccatcctgaccagctgcccacatctctgcagaggctgaaggcaggaaaagtcagggtgaaatcacaacagtccagacaaatcgtctcccggccaccctcactcatgcttctaaggccacaccaagctgccagttgtccagccagcctgtttcagttctcactacccccacctccaccttcaaaagccagttctggagccaagcttgagatcaacgtccaaggggtggttctgatttgctccattcaccgcaccgcacctcagaaatctcccaccacctcactccatgaaccactctgcaaagcttgtcctccaaaagcctatgtctccccaactccagagagggcaactgagattccagaaccttcccacccacaggaacaagagggtcttcctgcagggcaccataaactgataccccagtcagcgggggaagaggcagagttggcaagggctgaggccacagattgtagagcaatgcaggtgggaggggagacctttagcagtccgtgaggaagagctgtgtgggagtggtgggggtggggatctgcccgagagtaagccaataccctttccccttacttagccccctacccgttccacctccttccagccctcactgccgccgggacccctgcctgatgcaagcagtgaagctcggttgcatcatctgcagggctcagagctggccggaaaggctcagcttgtgagaccaggccgaaaactccgctcatttgccagcaccgggtccgcggggcatccggggctgtcctctcccctaatgccacgtgaaatgggcggtcacgaggccctggggcgtctgatcgccagaatgaggacaggctcgcagttaactccacgcgcgcccaggggtcttggggattccccagttacacgtccgctccctgaggccccaatccacgtgcatggaaaagccaagagaaccccagagtttgtgactaggaactaaggtaggagaagagcttcctttccactgattacccagcgtttggagccccattcttacccgagccgcccaaaacaaagagaagtacagcatcgcaactcggaagtcgcaggaggtccagccaccaactctggtctagggcagcaagctgtcggaagaagaccgttcggagaacgcatgcgcgagaagagctcgctgaggcgccaaagctaacgggagggatctacgcatgcgtagtggtggcccctttgtggccttttgggaattgtagttcgcccactcaccgcttttttctttatgattcccgtctgtagccccagggttagaggcccttgcctggggggaaaaaaacaaaaaacaaaaacagaggtccagtgccgccccctctccttactatcttgaagcttttcagggttttctctctgcttgttgtcaagacaaacgtttatagggtgcctactgaatatctagctagcattattagactccaggagatctagacccccacacaagataaagagctatggaacactggaaagcaccgtggtttagaagggtcggaagacctgaattcaagttccggctctgggactagtgcattagcttgtgtgggcttcagtttcctccctggtaaagccacaagaaaatactgtgtggtgaggattcaatgaggcttttcctgtgaacatgcgctgtgacagattgtcctcccctcttcctctgacccacagacctgcctcctacatggcatctcctctttctcctcagacatctgggagcagaggaaggcacccctcctgttgttcacttgtcccattttgttacctgtccacctcttgatgtcccaggagtcggtgggctctccttttttccccagggctatagatctttgagactggaagggatcttccttttagcctgacttcatccggaagaaacccttgggaatgggattcatcaacccctccaggagtaggttcccaaacctcagcatcagaatgggttagaaaatatgatataaatatgagtgtggggtctgtcttcagaggttctaattcaatggatctcaaagagtagacatttgcccacttatgctgtcacacaactaaacctctcctcagtgattctgataagccaagtttttttttttaattaaaaaaaaatttttggctgggcatggtggctcatgcctgtaatcccagcactttgggaggccaaggcaggagaatctcttgaggccaggagttctaaaccagcctggtcaacatagtgagaccctatctctacaaaaggaaaaattttaaattacctaggcatggtggtatgtgcatgcagtcccagctactgggaaggttgaggcaggagggtcacttgagcccgggagttcaaggtgagccatgatcaagccactgcactccagcctgagcaagagagcaagactgtcttcaaaaaaaattttttttgttttttgtttttgagacggagtctcattctgtcacccaggctggagtgcagtggcatgatcttcactcactgcaacctctgcctctgggttcaaacaattctccctgcctcagcctcctgagtagctgggattacaggcgcccaccaccacgtccagctaatttttatattttttagtagagacggggtttcaccatgttggtcaggctgatcttgaactcctgacctcaggtgatccgcctgccttggcctcccaaagttctgggattacaggtgtgaaccaccacgccaggccaaaaaaattgttttttaaaggccagtcaagtgaagcagtgggagtgaagaagaaacaaagaaacctgtaactgattatgatcaattatcataatgtaactgattatgatcaagtaaacatcactgcacttggaccagcctgttaagcagtggttttgcgaatcattgccttatgtagcaatgttactctatgccaggcattccatagccctggagatacatgaagagctcactggctgctaggataccaagaggtgaacaggtaacaaagtgtgacaagtgcaatgacaggaagacacacctaactctgctctcagatgtccagctgtatgaggaagaagaggaggaggcagaggaagaggggaggactatccagcacagcagcatgttcacaggaaaagcctcatagaatccccaccacacactattttactgtagctttacaagtggggaaactaaggcccagatgggcgaatttgttaattccagccgttcccacctggttctcataccagcccttagaaatctccccttagccgga

SEQ ID NO: 916833 - DNA, 4001 bp, Homo sapiens
cctcagcttctccaggggaggaccaccaccagggccaagagcccctccccacaccctagagcactcacgttgagcttatagggcatagactcgaagaagatggacgtggctgatatccgcttgacgtcagacatgtagccgtgggtgagactgcgaagtgagaggaagtaagaaggcctgggtggaaggacccccggacttaaccactcccttcaactccacagttctctgtccccagaacaccagtcctaggacacaccgcctcactgctctgtccactctgtggtaggcactataactgggatcttatcttcctcatccactgtgacatgcaggacagggcaaggcctgttccatctgtatggtccacagtaggtattcaataaataactcctttcccacaccaatcctgccgccaagaccatcagccagcccatccatactcactggcccccatcgggcaggtccagccccatgatccggtcgtgaggttgcagaagggctgtgtagacggccaggttggctggggacccggagtagggctggacattgactccccactgtgcaggatccaggtcaaaggcttccaaggcccggcgctggcacagcagctcaatttcatccaccacctctgctcccccatagtatctgccgtgggagaggggtaatgagggcacagagaaaggactctcaaccatcagcaaaggactgggaagttcactcctcaatgaacactgggaaggtacaggtgggttcccccactgggagcaccatccctgacactgccctccagccctcacctcttgccaggataaccctccgagtacttgttgttcagacaggaccccagggcctccagcgcagctcggctgcagaagttctggggtggtggggggcaatgtcagaaggtattgagccccttcccctggactcccacagtccctccctgccagagccagagctgaaagcgggagtactccctgcagaaagctccattcactcagcaccaggcctggggcaaagccagaggcagcattctcagaaacccatctgccatgagcagtggcccctcaatgccacctacccactcaaacttgtgcttctaggctcctccttcctcataggaggaaggaaggaagggatcagatgaaactgtagggaccctggaggctccctaaatgtcccaaccccataaactggacttgcactgcctttgcttgagggagataagaaaggaagataaagcccaaagaaaggtcctgagtgtgaaagggggttttggagaaatatcagttaagataactttgttacttcctgtacccatggtggcccaacccctgcccatctccccaggtcccacctctgaggcaatgagctccaggccacgacactgcctgtccttctccctctgcagcaactcccacatctcaggatcactgtccgacaggctctcctggcctgtccagcccctgtttgcttccccagtctgagtctgggctgcgttgctgtgctgagcccgaatggccatcctgaccagctgcccacatctctgcagaggctgaaggcaggaaaagtcagggtgaaatcacaacagtccagacaaatcgtctcccggccaccctcactcatgcttctaaggccacaccaagctgccagttgtccagccagcctgtttcagttctcactacccccacctccaccttcaaaagccagttctggagccaagcttgagatcaacgtccaaggggtggttctgatttgctccattcaccgcaccgcacctcagaaatctcccaccacctcactccatgaaccactctgcaaagcttgtcctccaaaagcctatgtctccccaactccagagagggcaactgagattccagaaccttcccacccacaggaacaagagggtcttcctgcagggcaccataaactgataccccagtcagcgggggaagaggcagagttggcaagggctgaggccacagattgtagagcaatgcaggtgggaggggagacctttagcagtccgtgaggaagagctgtgtgggagtggtgggggtggggatctgcccgagagtaagccaataccctttccccttacttagccccctacccgttccacctccttccagccctcactgccgccgggacccctgcctgatgcaagcagtgaagctcggttgcatcatctgcagggctcagagctggccggaaaggctcagcttgtgagaccaggccgaaaactccgctcatttgccagcaccgggtccgcggggcatccggggctgtcctctcccctaatgccacgtgaaatgggcggtcacgaggccctggggcgtctgatcgccagaatgaggacaggctcgcagttaactccacgcgcgcccaggggtcttggggattccccagttacacgtccgctccctgaggccccaatccacgtgcatggaaaagccaagagaaccccagagtttgtgactaggaactaaggtaggagaagagcttcctttccactgattacccagcgtttggagccccattcttacccgagccgcccaaaacaaagagaagtacagcatcgcaactcggaagtcgcaggaggtccagccaccaactctggtctagggcagcaagctgtcggaagaagaccgttcggagaacgcatgcgcgagaagagctcgctgaggcgccaaagctaacgggagggatctacgcatgcgtagtggtggcccctttgtggccttttgggaattgtagttcgcccactcaccgcttttttctttatgattcccgtctgtagccccagggttagaggcccttgcctggggggaaaaaaacaaaaaacaaaaacagaggtccagtgccgccccctctccttactatcttgaagcttttcagggttttctctctgcttgttgtcaagacaaacgtttatagggtgcctactgaatatctagctagcattattagactccaggagatctagacccccacacaagataaagagctatggaacactggaaagcaccgtggtttagaagggtcggaagacctgaattcaagttccggctctgggactagtgcattagcttgtgtgggcttcagtttcctccctggtaaagccacaagaaaatactgtgtggtgaggattcaatgaggcttttcctgtgaacatgcgctgtgacagattgtcctcccctcttcctctgacccacagacctgcctcctacatggcatctcctctttctcctcagacatctgggagcagaggaaggcacccctcctgttgttcacttgtcccattttgttacctgtccacctcttgatgtcccaggagtcggtgggctctccttttttccccagggctatagatctttgagactggaagggatcttccttttagcctgacttcatccggaagaaacccttgggaatgggattcatcaacccctccaggagtaggttcccaaacctcagcatcagaatgggttagaaaatatgatataaatatgagtgtggggtctgtcttcagaggttctaattcaatggatctcaaagagtagacatttgcccacttatgctgtcacacaactaaacctctcctcagtgattctgataagccaagtttttttttttaattaaaaaaaaatttttggctgggcatggtggctcatgcctgtaatcccagcactttgggaggccaaggcaggagaatctcttgaggccaggagttctaaaccagcctggtcaacatagtgagaccctatctctacaaaaggaaaaattttaaattacctaggcatggtggtatgtgcatgcagtcccagctactgggaaggttgaggcaggagggtcacttgagcccgggagttcaaggtgagccatgatcaagccactgcactccagcctgagcaagagagcaagactgtcttcaaaaaaaattttttttgttttttgtttttgagacggagtctcattctgtcacccaggctggagtg

SEQ ID NO: 916834 - DNA, 4001 bp, Homo sapiens
tcatccactgtgacatgcaggacagggcaaggcctgttccatctgtatggtccacagtaggtattcaataaataactcctttcccacaccaatcctgccgccaagaccatcagccagcccatccatactcactggcccccatcgggcaggtccagccccatgatccggtcgtgaggttgcagaagggctgtgtagacggccaggttggctggggacccggagtagggctggacattgactccccactgtgcaggatccaggtcaaaggcttccaaggcccggcgctggcacagcagctcaatttcatccaccacctctgctcccccatagtatctgccgtgggagaggggtaatgagggcacagagaaaggactctcaaccatcagcaaaggactgggaagttcactcctcaatgaacactgggaaggtacaggtgggttcccccactgggagcaccatccctgacactgccctccagccctcacctcttgccaggataaccctccgagtacttgttgttcagacaggaccccagggcctccagcgcagctcggctgcagaagttctggggtggtggggggcaatgtcagaaggtattgagccccttcccctggactcccacagtccctccctgccagagccagagctgaaagcgggagtactccctgcagaaagctccattcactcagcaccaggcctggggcaaagccagaggcagcattctcagaaacccatctgccatgagcagtggcccctcaatgccacctacccactcaaacttgtgcttctaggctcctccttcctcataggaggaaggaaggaagggatcagatgaaactgtagggaccctggaggctccctaaatgtcccaaccccataaactggacttgcactgcctttgcttgagggagataagaaaggaagataaagcccaaagaaaggtcctgagtgtgaaagggggttttggagaaatatcagttaagataactttgttacttcctgtacccatggtggcccaacccctgcccatctccccaggtcccacctctgaggcaatgagctccaggccacgacactgcctgtccttctccctctgcagcaactcccacatctcaggatcactgtccgacaggctctcctggcctgtccagcccctgtttgcttccccagtctgagtctgggctgcgttgctgtgctgagcccgaatggccatcctgaccagctgcccacatctctgcagaggctgaaggcaggaaaagtcagggtgaaatcacaacagtccagacaaatcgtctcccggccaccctcactcatgcttctaaggccacaccaagctgccagttgtccagccagcctgtttcagttctcactacccccacctccaccttcaaaagccagttctggagccaagcttgagatcaacgtccaaggggtggttctgatttgctccattcaccgcaccgcacctcagaaatctcccaccacctcactccatgaaccactctgcaaagcttgtcctccaaaagcctatgtctccccaactccagagagggcaactgagattccagaaccttcccacccacaggaacaagagggtcttcctgcagggcaccataaactgataccccagtcagcgggggaagaggcagagttggcaagggctgaggccacagattgtagagcaatgcaggtgggaggggagacctttagcagtccgtgaggaagagctgtgtgggagtggtgggggtggggatctgcccgagagtaagccaataccctttccccttacttagccccctacccgttccacctccttccagccctcactgccgccgggacccctgcctgatgcaagcagtgaagctcggttgcatcatctgcagggctcagagctggccggaaaggctcagcttgtgagaccaggccgaaaactccgctcatttgccagcaccgggtccgcggggcatccggggctgtcctctcccctaatgccacgtgaaatgggcggtcacgaggccctggggcgtctgatcgccagaatgaggacaggctcgcagttaactccacgcgcgcccaggggtcttggggattccccagttacacgtccgctccctgaggccccaatccacgtgcatggaaaagccaagagaaccccagagtttgtgactaggaactaaggtaggagaagagcttcctttccactgattacccagcgtttggagccccattcttacccgagccgcccaaaacaaagagaagtacagcatcgcaactcggaagtcgcaggaggtccagccaccaactctggtctagggcagcaagctgtcggaagaagaccgttcggagaacgcatgcgcgagaagagctcgctgaggcgccaaagctaacgggagggatctacgcatgcgtagtggtggcccctttgtggccttttgggaattgtagttcgcccactcaccgcttttttctttatgattcccgtctgtagccccagggttagaggcccttgcctggggggaaaaaaacaaaaaacaaaaacagaggtccagtgccgccccctctccttactatcttgaagcttttcagggttttctctctgcttgttgtcaagacaaacgtttatagggtgcctactgaatatctagctagcattattagactccaggagatctagacccccacacaagataaagagctatggaacactggaaagcaccgtggtttagaagggtcggaagacctgaattcaagttccggctctgggactagtgcattagcttgtgtgggcttcagtttcctccctggtaaagccacaagaaaatactgtgtggtgaggattcaatgaggcttttcctgtgaacatgcgctgtgacagattgtcctcccctcttcctctgacccacagacctgcctcctacatggcatctcctctttctcctcagacatctgggagcagaggaaggcacccctcctgttgttcacttgtcccattttgttacctgtccacctcttgatgtcccaggagtcggtgggctctccttttttccccagggctatagatctttgagactggaagggatcttccttttagcctgacttcatccggaagaaacccttgggaatgggattcatcaacccctccaggagtaggttcccaaacctcagcatcagaatgggttagaaaatatgatataaatatgagtgtggggtctgtcttcagaggttctaattcaatggatctcaaagagtagacatttgcccacttatgctgtcacacaactaaacctctcctcagtgattctgataagccaagtttttttttttaattaaaaaaaaatttttggctgggcatggtggctcatgcctgtaatcccagcactttgggaggccaaggcaggagaatctcttgaggccaggagttctaaaccagcctggtcaacatagtgagaccctatctctacaaaaggaaaaattttaaattacctaggcatggtggtatgtgcatgcagtcccagctactgggaaggttgaggcaggagggtcacttgagcccgggagttcaaggtgagccatgatcaagccactgcactccagcctgagcaagagagcaagactgtcttcaaaaaaaattttttttgttttttgtttttgagacggagtctcattctgtcacccaggctggagtgcagtggcatgatcttcactcactgcaacctctgcctctgggttcaaacaattctccctgcctcagcctcctgagtagctgggattacaggcgcccaccaccacgtccagctaatttttatattttttagtagagacggggtttcaccatgttggtcaggctgatcttgaactcctgacctcaggtgatccgcctgccttggcctcccaaagttctgggattacaggtgtgaaccaccacgccaggccaaaaaaattgttttttaaaggccagtcaagtgaagcagtgggagtgaagaagaaacaaagaaacctgt

SEQ ID NO: 916835 - DNA, 4001 bp, Homo sapiens
ggccaagagcccctccccacaccctagagcactcacgttgagcttatagggcatagactcgaagaagatggacgtggctgatatccgcttgacgtcagacatgtagccgtgggtgagactgcgaagtgagaggaagtaagaaggcctgggtggaaggacccccggacttaaccactcccttcaactccacagttctctgtccccagaacaccagtcctaggacacaccgcctcactgctctgtccactctgtggtaggcactataactgggatcttatcttcctcatccactgtgacatgcaggacagggcaaggcctgttccatctgtatggtccacagtaggtattcaataaataactcctttcccacaccaatcctgccgccaagaccatcagccagcccatccatactcactggcccccatcgggcaggtccagccccatgatccggtcgtgaggttgcagaagggctgtgtagacggccaggttggctggggacccggagtagggctggacattgactccccactgtgcaggatccaggtcaaaggcttccaaggcccggcgctggcacagcagctcaatttcatccaccacctctgctcccccatagtatctgccgtgggagaggggtaatgagggcacagagaaaggactctcaaccatcagcaaaggactgggaagttcactcctcaatgaacactgggaaggtacaggtgggttcccccactgggagcaccatccctgacactgccctccagccctcacctcttgccaggataaccctccgagtacttgttgttcagacaggaccccagggcctccagcgcagctcggctgcagaagttctggggtggtggggggcaatgtcagaaggtattgagccccttcccctggactcccacagtccctccctgccagagccagagctgaaagcgggagtactccctgcagaaagctccattcactcagcaccaggcctggggcaaagccagaggcagcattctcagaaacccatctgccatgagcagtggcccctcaatgccacctacccactcaaacttgtgcttctaggctcctccttcctcataggaggaaggaaggaagggatcagatgaaactgtagggaccctggaggctccctaaatgtcccaaccccataaactggacttgcactgcctttgcttgagggagataagaaaggaagataaagcccaaagaaaggtcctgagtgtgaaagggggttttggagaaatatcagttaagataactttgttacttcctgtacccatggtggcccaacccctgcccatctccccaggtcccacctctgaggcaatgagctccaggccacgacactgcctgtccttctccctctgcagcaactcccacatctcaggatcactgtccgacaggctctcctggcctgtccagcccctgtttgcttccccagtctgagtctgggctgcgttgctgtgctgagcccgaatggccatcctgaccagctgcccacatctctgcagaggctgaaggcaggaaaagtcagggtgaaatcacaacagtccagacaaatcgtctcccggccaccctcactcatgcttctaaggccacaccaagctgccagttgtccagccagcctgtttcagttctcactacccccacctccaccttcaaaagccagttctggagccaagcttgagatcaacgtccaaggggtggttctgatttgctccattcaccgcaccgcacctcagaaatctcccaccacctcactccatgaaccactctgcaaagcttgtcctccaaaagcctatgtctccccaactccagagagggcaactgagattccagaaccttcccacccacaggaacaagagggtcttcctgcagggcaccataaactgataccccagtcagcgggggaagaggcagagttggcaagggctgaggccacagattgtagagcaatgcaggtgggaggggagacctttagcagtccgtgaggaagagctgtgtgggagtggtgggggtggggatctgcccgagagtaagccaataccctttccccttacttagccccctacccgttccacctccttccagccctcactgccgccgggacccctgcctgatgcaagcagtgaagctcggttgcatcatctgcagggctcagagctggccggaaaggctcagcttgtgagaccaggccgaaaactccgctcatttgccagcaccgggtccgcggggcatccggggctgtcctctcccctaatgccacgtgaaatgggcggtcacgaggccctggggcgtctgatcgccagaatgaggacaggctcgcagttaactccacgcgcgcccaggggtcttggggattccccagttacacgtccgctccctgaggccccaatccacgtgcatggaaaagccaagagaaccccagagtttgtgactaggaactaaggtaggagaagagcttcctttccactgattacccagcgtttggagccccattcttacccgagccgcccaaaacaaagagaagtacagcatcgcaactcggaagtcgcaggaggtccagccaccaactctggtctagggcagcaagctgtcggaagaagaccgttcggagaacgcatgcgcgagaagagctcgctgaggcgccaaagctaacgggagggatctacgcatgcgtagtggtggcccctttgtggccttttgggaattgtagttcgcccactcaccgcttttttctttatgattcccgtctgtagccccagggttagaggcccttgcctggggggaaaaaaacaaaaaacaaaaacagaggtccagtgccgccccctctccttactatcttgaagcttttcagggttttctctctgcttgttgtcaagacaaacgtttatagggtgcctactgaatatctagctagcattattagactccaggagatctagacccccacacaagataaagagctatggaacactggaaagcaccgtggtttagaagggtcggaagacctgaattcaagttccggctctgggactagtgcattagcttgtgtgggcttcagtttcctccctggtaaagccacaagaaaatactgtgtggtgaggattcaatgaggcttttcctgtgaacatgcgctgtgacagattgtcctcccctcttcctctgacccacagacctgcctcctacatggcatctcctctttctcctcagacatctgggagcagaggaaggcacccctcctgttgttcacttgtcccattttgttacctgtccacctcttgatgtcccaggagtcggtgggctctccttttttccccagggctatagatctttgagactggaagggatcttccttttagcctgacttcatccggaagaaacccttgggaatgggattcatcaacccctccaggagtaggttcccaaacctcagcatcagaatgggttagaaaatatgatataaatatgagtgtggggtctgtcttcagaggttctaattcaatggatctcaaagagtagacatttgcccacttatgctgtcacacaactaaacctctcctcagtgattctgataagccaagtttttttttttaattaaaaaaaaatttttggctgggcatggtggctcatgcctgtaatcccagcactttgggaggccaaggcaggagaatctcttgaggccaggagttctaaaccagcctggtcaacatagtgagaccctatctctacaaaaggaaaaattttaaattacctaggcatggtggtatgtgcatgcagtcccagctactgggaaggttgaggcaggagggtcacttgagcccgggagttcaaggtgagccatgatcaagccactgcactccagcctgagcaagagagcaagactgtcttcaaaaaaaattttttttgttttttgtttttgagacggagtctcattctgtcacccaggctggagtgcagtggcatgatcttcactcactgcaacctct

SEQ ID NO: 916836 - DNA, 4001 bp, Homo sapiens
agttggagggtccctcacaggactgaaccccagtgcccaaggcagtaacccactcattaacacacactttcttggctttcctctctttcctgttttacatccttgctccgtcaatgaatttactggaatcaactgcaaaataaacaacttgctctgaaatccttttctcaaggtctaagactgtggtgatcaagacagccaaggtccctactctcccaaaacaacacacgggtttgcgttcaaaccgtgtacagctcctgcacctgtccatgcatccgtggagctctgtcaggcgccgactccccgccttggtgtgcaaagcatccacattttgggtcaccaaccagtacagctttccgagtttctcccaggtgctcaaagcccagtgtgcagggttaggctggtgggaggagaattgaggccagcctacgaagtttctcgcccagtaccgctggcggattggggcactccggacaaaatcaccatgctggatgggcctgcggtcagtgcgggcataaagccccactttttctgacctgtagtctggtatccccgattcggtggagattcctgccccagtcatcacaaggagtctcttggaaagggtgatgaagcgctgtaactctttgaccttctcagggtccagaggaggacttgctggcacaaataacccaatggaggctttcgagcacggctggctggggtttgcgatccaacggccttttgctgacctgaaagtcaacgcaaagctcatcttcattctagagaaaaagaagcctcatgtgagaaactggggtggttttttttttttctcattttttgtttgtttgttttcgttttgttttttgagacagagtctccctctgttgcccaggctagagtacagtggcatgatcttggctcactgtaaccgccgcctcccgggttcaagtgattctcctgcctcagcctccagaatagctgggactacatggccaccatgcccggctaattattgtatttttagtagaggcagggtttcaccatgttggccaggctagtctcgaactcctgagctctagtgatctgcccgcctcggcctcccaacgtgctggaattacaggtgtgagcctctgagtctggccctaatgagtcaggttttgtttgattttgttcatgtaattaagcacacacacgcattccttttattttttcatttcccccttattttagtttaccctccactgcaagctctgctacttggacacatcagagagacaagacccctgcccgtcagcttttctagctgtaacaatagagggccgggtgcggtggctcacgtctgaaatcccagcactttgggaggccgacgcaggcagatcacttgagatcaggagttcgagacatgcctggccaacatggtgaaaccccgactctactaaaaatacaaaaaaaattagccgggcattgtggcacgtgcccgtaatcccagctactagggaggctgaggcaggagaattgcttgaacccgggaggcggaggttgcagtgagccgagatcgcgccgttgcactccagcctgggcgaagaagcaagactccgtatcaaaaaaaaaaaaaaaaagaaaaagaaaaaactttgacatattatttgacacaatgcaatgcataaatcctctagtgacatgcaccccgtatgtaaacattattttatgtttggctttccagatctgagatcaggaccccgctttctccttgacattccacagcaaaacgtgaacagctgaacaaacacacagtccggtttcccgagaccaaagggtcaggggaaacccccgctgaaaacgtgcatcagtggaacaactactctcttccaggtcccaccgagggcaaagaggagaaatagaatccctcacaagaaatccacaacttctagaaatccgcagcacacacagaacacacttacctctcacagctctacggacacttcacaccccacagtgggaccgtctgattgcatttgcattttgggacatgtagtccagaaagcttaaatgatgcgagaaaaaccacaagtcccacaatcctccgcgtctcgcaattgacagccccagatcatccaggaacgccccctgtcggctctttctggtcagaggttcccccgttaatataaaagcttttaatcatggatttttttctttgttttcaatttctgtgggcacttagtaggtgtatatatttatagtgtacataagattttttttcttttttcttttttttttttaagacggagttgttgttttttttttttgaaaaaactccagtctggagtgcagtggcacgatctcggctcactgcaacctccctctcccgggttcaaccgattctcctgcctcagcctcccgagtagctgggattatttttgtatttttagtagagacgggggtttcgccatgttggccaggctcgtcttgaactcctaacctcaggtgatccgcacgccttgacctcccaaagtgctgggattataggcgtgagccactgcgcccggccatcttttctcttattttttgtctttttttcttttctctgtgcctgtctatgctttacccacatgagatgttttgatacaaacatgcaatgtgaaatgagcacgtcattaatcatggatctagatttgacttttttttaaagtttttgtatttttagtagagacagagtttcaccatgttggccaggctggtctcgaactcccgacctcaggtgatccgccaacctcggccccccaaaatgctgggattacaggcctgagccactgttcccggcctagatttgactcattctaaacatcagagtttgtgatccttttcattcacaacgacagtatcaagttatttgctattggtaaaataccttgaacttgtgaagaaatgtgtttatacatatctgaaaaagtgatagtttgttgttgttgttgttgttgtttgtttgtttgtttttgagacggagtctcgctctgttgcccaggctggagtgcaatggtgccatttcggctcactgcaacctccgcctcccgggttcaagcaattctcctgcctcagcctcctgagtagcagggattatgggcgcatgccactacgcccggttaatttttttatttttagtagagacaaggtttcaccatgttagccaggatggtcttgatctcctgacctcgtgatctgcccaccctagcctcccaaagtactgggattacaggcgtaagccactgtgcccagccaaaagtgatgtttttacagttaatatgaagccaaatatattatacctggactaatgtacttaacctgcttggcttctccaattttatttatcatattttttttattaagttaatcaaacaaggcctgcgtctcactcccagggattctgatctacaaatttcctaattgttcctaatgtgtagacaaccagaactgccgctctgcagcatcacctaaatcaataaatgtataagtgtctttggacataaaggtgggcggccagcagggaccttgaagaccacctaaggactcccttcccccattttaagatgaattgggctgagtgcagtggttcccacctgtaataccaacactttgggaggccaaggcaggaggatcacttgagcccaaaagttcaagaccagcttgggcaacatagtgagacccactcactacaaaaaataaacaaaattagcggggtgtggtggtgtgtgcctgtagtcccagctactcaagaggctcaggtgggaggatcactttgagcccaggagatcgaggctgcagtgagccataattgtgcgactgcacttcagcctgggtgacaaagtgagatcccatctcttcaaaaaataataataataaataaagatgaactgaagtgcagagaagtaatgtggaagcttgagaaagagtttttaggtttttggttctatcattgtatctttggaggtaatattggcaaaatgaccatttagtagtttgcc

SEQ ID NO: 916837 - DNA, 4001 bp, Homo sapiens
acaccaccccagcacttcggaaggccgatacaggtggatcacttgaggtcaggagttccagaccagcctggccaacatggtgaaaccccgtcactactaaaaatacaaaaaaaattcgccaggcatcaagaggctgaggcaggagaatcgcttgaacccgggaggcagaggttgcagtgagccgagatcgcgctattacattccagcctgggcaacaagagcgaaactccgtatcaaaaaacgaaagaaagaaagaaaaagatcctactttgtagatataattctctaaccttcactgagtcataactgaaccaaagctgcctactagctttgtagagtaatccaagggaccactgctgatttcctaacattagagtaagattagattcataagaagcttccccattccttaacaagaagtgctgccaggctacccagaaattcccctcccgagtcccactgccattccggaaacatgagaaaccaagtatgctgcaatcatggcctttttagtactggctccaaaataaactgagtaggccaagcaagactgtcaatgaaatactgtccaatgaaaaaataaacagccgaaggtttcaggtttcatttacccaacacaggtatcacaataaatgacctagtataatgatagtttccaaccgtatttaataaaacaaacacgcagcagaaatcctctagtcacatataactacactataccctcagatcaaagttaatgatgtcaatggaaagtataggccggcgggttcactggtgataagtcatgagactctgagcaaagaataagtaataaggttagaattctttagaagtgttaaggggaaagaaggtaacaacaacaaaaactcctccacatcaagagttctaagtactttgttgtttattaactaatttcataccaacaaccctgtaagactgatattatcaatccccattttaagtacgtggaacaaaagaagaaagaggcaaacaacatgctcaaagatttacaaagccaagaaatcatgcgaactggtggggcttcgggttccagaagtcagtgtaaacatagcttctccatttttcaccaacagtcactaaaattgaggccagcaagtttttagaagcctatctccccttgcaaactctccttccatataatttttgcttttgcaagagatgtcacatttaagcggtagctttaaaagtggggacacatgaaacgcacagctgggagagccatccagcccacttacatatgtgcaatatccccctgtagaaaaaccctgctcattggagcctggaatccagagggtccctgagagctacacaaacagccttaaaaccaatctacccacaattactgagccgcgtatgcaggctattcacacagaaggcgctccctgaagtcggttaggttataatgagtcttttgttgaagcggggcggcgggaggccccggagagcagcccggccccctgcggcgccgacgaagaggccacgaaagaccttgccctgtgcccgtcggcctctttcgaggcgtcgaagcaggtcagcgcaccccgacacaggccgggcgcgccatccggtgcagctgggagctgggccatgtgtcctaggccgcggcggggaaggggcgagacccccgcgacctccggcgttccctccctgcccccatctttgggtctttctctgaatggcgcgactccatcagtcctggactctgggcctgaggccctccctggccacacctcccctcacagccccgcacggcgagccggtgtcgcatcctagccccggagcctgacccccgacacaggccctcgagccgccccgcgcccctccctgccagcgagcggaatgccgtgacccctgaccttgccttcccctcaccttaccagctccgcaaccacctgacacgccgcccccgcgcccagggctccatattccgggagccagcgccacgctggctaacgccctcccctccccgcgattggtcgacaggacggcagccgcacatccctattggctggagtccctgcagcggccgggatgcgtggcccgcagaccagggacctaggctccgcccacgcggagtctggatgcggcggcccctggggcacgcggcggcccctggggcacccggcgggagctgcatgctgcctagttgctgcttgcgttggccagacccacacagcccctggactggggagctccagtccgctagcagtctggggacagataagattcctgccctagttcgccgtggcgccacgttaggtactgacaatcaagctacgaggtatagctctatcctgtaaagggtagccaggccaggcgcggaggctcacacttgtaatgcccagcactttgggagaccgaggcgggaggatcacttgagtccaggagttcgataccagcctgggcaacatagtgagacccggtctctacaaaaaattttaaaattagccaagcaaaggccgggcgcggtggctcacgcctgtactcccagcactttggagggcccaggcgggcgaatcacctgagatcgggagtttgagaccagcctgaccaacatggagaaaccccgtctttactaaaaatacaaaattagccgggcgtggtggcgcatgcctgtaatcccagctactcgggaggctgaggcaagagaatcgcttgaacccgggaggcggaggtgcagtgagccgagatcgcgccattgcactccagccttggaaacaagagcgaaaactccgtctaaaaaaaaaaaaaaattagccaggcatcacggcgcccgcctgtggtcccagctactcgggggctgaggtgggagaatcacttgggcctgggaggtggaggctgcggtgagacaagatcgtgccactgcactccagcctgggtggcagagcaaaaccctgtctcaaaaaaaaaggatagccacctggaaggaacatttcctcgcgcccccagagccacatcatagtatctgctgccccaccaagagcaccccacacctgggaggaaccgagaaacatcagctagtgcagccagtttgaccgccttaggtgtcctcccaagcctccgtagtgaattgttttcctcctcgcccagctgactcgattctccccagacttcatcctacctacccaaaagcaatcccactctatcgccagtttcagcctcacaccgtatcttttgctctgaagatgagactgccaaactggtgaagagggaataaatggcctaacaaattaccgtaattttctgcaatgtcgtttacagccaccaaaaacattagatcctcccgccaccctcactccccgacccctcgcactgcttacagcattaaaggtaattgagcttctttattcacgtaaaaacagctaggagaaaatttcattagtaagagagaccaagaaatgaggaaaggagcgtgaactgcaaagagaaaaatccaaataaagtgcgaagtaaaaacaaactcggggaccaaaaaaaagtggggggggggggcttggcttcctggagcaggttggttttcatacagaatttctcctggagaaaaaagaaaatgcacaaattagttctgagattctcgctacagtacatctgtggagtttcagaaaggtttgatgaagttcctccagatcggaacctttcctttggcaacttctattataactagaaaataaaattgctagagctgtacttgtcaccctttcaggtctgctcagctgggcagcttccctgggctacttacttagttcacagtgtggagctgcctccgtcttcagctgcttcttcctcatggtgcagaactagtttgactttcccaatgccagctcctgcctctatatatgaagacaagtgcgcctccctcagttagataaagggcacttttgggtgctctaagcaacacagctttctaaagacgagcaaggaatttcaagaggcaaaccacgccctccaaagcctaatcagatttcatctttgacctgtcg

SEQ ID NO: 916838 - DNA, 4001 bp, Homo sapiens
aatgccgtgacccctgaccttgccttcccctcaccttaccagctccgcaaccacctgacacgccgcccccgcgcccagggctccatattccgggagccagcgccacgctggctaacgccctcccctccccgcgattggtcgacaggacggcagccgcacatccctattggctggagtccctgcagcggccgggatgcgtggcccgcagaccagggacctaggctccgcccacgcggagtctggatgcggcggcccctggggcacgcggcggcccctggggcacccggcgggagctgcatgctgcctagttgctgcttgcgttggccagacccacacagcccctggactggggagctccagtccgctagcagtctggggacagataagattcctgccctagttcgccgtggcgccacgttaggtactgacaatcaagctacgaggtatagctctatcctgtaaagggtagccaggccaggcgcggaggctcacacttgtaatgcccagcactttgggagaccgaggcgggaggatcacttgagtccaggagttcgataccagcctgggcaacatagtgagacccggtctctacaaaaaattttaaaattagccaagcaaaggccgggcgcggtggctcacgcctgtactcccagcactttggagggcccaggcgggcgaatcacctgagatcgggagtttgagaccagcctgaccaacatggagaaaccccgtctttactaaaaatacaaaattagccgggcgtggtggcgcatgcctgtaatcccagctactcgggaggctgaggcaagagaatcgcttgaacccgggaggcggaggtgcagtgagccgagatcgcgccattgcactccagccttggaaacaagagcgaaaactccgtctaaaaaaaaaaaaaaattagccaggcatcacggcgcccgcctgtggtcccagctactcgggggctgaggtgggagaatcacttgggcctgggaggtggaggctgcggtgagacaagatcgtgccactgcactccagcctgggtggcagagcaaaaccctgtctcaaaaaaaaaggatagccacctggaaggaacatttcctcgcgcccccagagccacatcatagtatctgctgccccaccaagagcaccccacacctgggaggaaccgagaaacatcagctagtgcagccagtttgaccgccttaggtgtcctcccaagcctccgtagtgaattgttttcctcctcgcccagctgactcgattctccccagacttcatcctacctacccaaaagcaatcccactctatcgccagtttcagcctcacaccgtatcttttgctctgaagatgagactgccaaactggtgaagagggaataaatggcctaacaaattaccgtaattttctgcaatgtcgtttacagccaccaaaaacattagatcctcccgccaccctcactccccgacccctcgcactgcttacagcattaaaggtaattgagcttctttattcacgtaaaaacagctaggagaaaatttcattagtaagagagaccaagaaatgaggaaaggagcgtgaactgcaaagagaaaaatccaaataaagtgcgaagtaaaaacaaactcggggaccaaaaaaaagtggggggggggggcttggcttcctggagcaggttggttttcatacagaatttctcctggagaaaaaagaaaatgcacaaattagttctgagattctcgctacagtacatctgtggagtttcagaaaggtttgatgaagttcctccagatcggaacctttcctttggcaacttctattataactagaaaataaaattgctagagctgtacttgtcaccctttcaggtctgctcagctgggcagcttccctgggctacttacttagttcacagtgtggagctgcctccgtcttcagctgcttcttcctcatggtgcagaactagtttgactttcccaatgccagctcctgcctctatatatgaagacaagtgcgcctccctcagttagataaagggcacttttgggtgctctaagcaacacagctttctaaagacgagcaaggaatttcaagaggcaaaccacgccctccaaagcctaatcagatttcatctttgacctgtcgtgaaaagagaagcattatatatctgccactcctagatattaattaacaatttattgagttcaaaaattttattctaagatttcatctctgtaccatttggcaggagcaagagtaggtggcaagcctgtgagtgccagtggttgaaaggggtggagtaagaaattgcttcccttctctgctcctcttggagtgcagctggttcaggctccacaggtgcactaggactctgctcctctgagacgtgaggtgaaaccattaaccccaagcctgacagtgcacttgtattttccatataggtacgtgcagcactgaggcaattatgaggagtctcagaacgtgggtggaaatgctgcctgctctattatccctcgggatctaaaggaccctctggcttcagcctggtcaatcagtgatccacgagcagacatcagagccacgcaaactccggacttggtgcctgatggaaaagaaaaagaaaggaaaaaaacccagagactacaagacagaagtccagggcaagcctagaatttctcaatctgggaggaggggagctgaaagaatggggaaattttgcctcagggaaataacttagacgacaaagctgcataggagaagcattggggtggcgtaaaatacaggagagaagaaaacagtttcttgcaggtagcaggcagttttctagaagttttcaagaaaatctgcttagtaccataaaaacataatagcttagaatggaaaagaaagaaaagcagtaatcgattcaaataagtcaatgcaggcttccagcaagtggttctggttcctacctagaacaaccattgagtcaggagaaagaattatggatctcctgcccagggatccagatgaaaggtctctttgcttcagggctctcttaatcacgaaagtcaaataactacaacttgacctgtctcctgtccttgttctacatcaggtaacttccccaaggcaaagctgtctctgcagattggactgggggccaatttgttccacttgaagggaaaatagaagcacctgtaaaatcacccacgaactaaagtcttggcaggaaaaagcctatttgagtttaggaattcttaccctgggcaacataaggagaccccctctctacaaaaaattttaaaattacctgagtgtagtggaacgtgcctgtggaacatcccagcttcttgggaggctgaggtgggaggatcatttgaggctaggaggtcaaggctgcagtgcgtcgtgatcacaccagagcactccagcctctgcgacagagcaagaccctgtctcaaaaaagtgggagtgtagaagggacaaagaaatctgtaactgttatgagtgtcaggtttagactacgccaaaggtcatgttgaggtccggaggtagtgggtggatgagcagaaagaacacttggggagctgtagacaggtgaaagatgattttattcagcagcagctctcatcaacagctttctcacactgtctgccctgtctcgactgcttagtctggctcccacatacagttgtgtgccccctgccttcagggtcagcagcttaactctctgagcatgagcaagctgagctgtgtcctggctcccctccgtccatctgcaaaaaacacactccatttttgccttcttggtccccaatttatacttaagagtaactgacaaccttaattgaatttttattgtgtaccaaacgctatatttaacacttcacaagcattaatccttgtagtaggctggcacaaaaattcacgcctgcaatcccagcactttgggaggccgaggcaggcagatcacttgaggccaggagtttgaaaacagcctgggcaacatagcgagaccatga

SEQ ID NO: 916839 - DNA, 4001 bp, Homo sapiens
agttcctaataatgctatgtgtataaatagccgcttctttgaagggaagaattagaagacaaagcagtcttccactggtgtatcccagatagcaccacgagaatatgagaaggctttttaaggccataggaagggcagatatctgtcagcagacatttgtacgtatgtgcatggtgaggaggcagagaataaagatgtctttgattcaacaacactcacccaaattcttagcaatgaaagtcaaacaagaaagatctggcagggcgcggtggctcacaccaccccagcacttcggaaggccgatacaggtggatcacttgaggtcaggagttccagaccagcctggccaacatggtgaaaccccgtcactactaaaaatacaaaaaaaattcgccaggcatcaagaggctgaggcaggagaatcgcttgaacccgggaggcagaggttgcagtgagccgagatcgcgctattacattccagcctgggcaacaagagcgaaactccgtatcaaaaaacgaaagaaagaaagaaaaagatcctactttgtagatataattctctaaccttcactgagtcataactgaaccaaagctgcctactagctttgtagagtaatccaagggaccactgctgatttcctaacattagagtaagattagattcataagaagcttccccattccttaacaagaagtgctgccaggctacccagaaattcccctcccgagtcccactgccattccggaaacatgagaaaccaagtatgctgcaatcatggcctttttagtactggctccaaaataaactgagtaggccaagcaagactgtcaatgaaatactgtccaatgaaaaaataaacagccgaaggtttcaggtttcatttacccaacacaggtatcacaataaatgacctagtataatgatagtttccaaccgtatttaataaaacaaacacgcagcagaaatcctctagtcacatataactacactataccctcagatcaaagttaatgatgtcaatggaaagtataggccggcgggttcactggtgataagtcatgagactctgagcaaagaataagtaataaggttagaattctttagaagtgttaaggggaaagaaggtaacaacaacaaaaactcctccacatcaagagttctaagtactttgttgtttattaactaatttcataccaacaaccctgtaagactgatattatcaatccccattttaagtacgtggaacaaaagaagaaagaggcaaacaacatgctcaaagatttacaaagccaagaaatcatgcgaactggtggggcttcgggttccagaagtcagtgtaaacatagcttctccatttttcaccaacagtcactaaaattgaggccagcaagtttttagaagcctatctccccttgcaaactctccttccatataatttttgcttttgcaagagatgtcacatttaagcggtagctttaaaagtggggacacatgaaacgcacagctgggagagccatccagcccacttacatatgtgcaatatccccctgtagaaaaaccctgctcattggagcctggaatccagagggtccctgagagctacacaaacagccttaaaaccaatctacccacaattactgagccgcgtatgcaggctattcacacagaaggcgctccctgaagtcggttaggttataatgagtcttttgttgaagcggggcggcgggaggccccggagagcagcccggccccctgcggcgccgacgaagaggccacgaaagaccttgccctgtgcccgtcggcctctttcgaggcgtcgaagcaggtcagcgcaccccgacacaggccgggcgcgccatccggtgcagctgggagctgggccatgtgtcctaggccgcggcggggaaggggcgagacccccgcgacctccggcgttccctccctgcccccatctttgggtctttctctgaatggcgcgactccatcagtcctggactctgggcctgaggccctccctggccacacctcccctcacagccccgcacggcgagccggtgtcgcatcctagccccggagcctgacccccgacacaggccctcgagccgccccgcgcccctccctgccagcgagcggaatgccgtgacccctgaccttgccttcccctcaccttaccagctccgcaaccacctgacacgccgcccccgcgcccagggctccatattccgggagccagcgccacgctggctaacgccctcccctccccgcgattggtcgacaggacggcagccgcacatccctattggctggagtccctgcagcggccgggatgcgtggcccgcagaccagggacctaggctccgcccacgcggagtctggatgcggcggcccctggggcacgcggcggcccctggggcacccggcgggagctgcatgctgcctagttgctgcttgcgttggccagacccacacagcccctggactggggagctccagtccgctagcagtctggggacagataagattcctgccctagttcgccgtggcgccacgttaggtactgacaatcaagctacgaggtatagctctatcctgtaaagggtagccaggccaggcgcggaggctcacacttgtaatgcccagcactttgggagaccgaggcgggaggatcacttgagtccaggagttcgataccagcctgggcaacatagtgagacccggtctctacaaaaaattttaaaattagccaagcaaaggccgggcgcggtggctcacgcctgtactcccagcactttggagggcccaggcgggcgaatcacctgagatcgggagtttgagaccagcctgaccaacatggagaaaccccgtctttactaaaaatacaaaattagccgggcgtggtggcgcatgcctgtaatcccagctactcgggaggctgaggcaagagaatcgcttgaacccgggaggcggaggtgcagtgagccgagatcgcgccattgcactccagccttggaaacaagagcgaaaactccgtctaaaaaaaaaaaaaaattagccaggcatcacggcgcccgcctgtggtcccagctactcgggggctgaggtgggagaatcacttgggcctgggaggtggaggctgcggtgagacaagatcgtgccactgcactccagcctgggtggcagagcaaaaccctgtctcaaaaaaaaaggatagccacctggaaggaacatttcctcgcgcccccagagccacatcatagtatctgctgccccaccaagagcaccccacacctgggaggaaccgagaaacatcagctagtgcagccagtttgaccgccttaggtgtcctcccaagcctccgtagtgaattgttttcctcctcgcccagctgactcgattctccccagacttcatcctacctacccaaaagcaatcccactctatcgccagtttcagcctcacaccgtatcttttgctctgaagatgagactgccaaactggtgaagagggaataaatggcctaacaaattaccgtaattttctgcaatgtcgtttacagccaccaaaaacattagatcctcccgccaccctcactccccgacccctcgcactgcttacagcattaaaggtaattgagcttctttattcacgtaaaaacagctaggagaaaatttcattagtaagagagaccaagaaatgaggaaaggagcgtgaactgcaaagagaaaaatccaaataaagtgcgaagtaaaaacaaactcggggaccaaaaaaaagtggggggggggggcttggcttcctggagcaggttggttttcatacagaatttctcctggagaaaaaagaaaatgcacaaattagttctgagattctcgctacagtacatctgtggagtttcagaaaggtttgatgaagttcctccagatcggaacctttcctttggcaacttctattataactagaaaataaaattgctagagctgtacttgtcaccctttcaggt

SEQ ID NO: 916840 - DNA, 4001 bp, Homo sapiens
gccttggtcactcatatttggctcagaataaacctctttaaacattttacagagtttgactcttgtttgtttgtttggttttgagacagagtctcactctgtcactcaggccggagtgcagtggcgcgatcttggctcactgcagcctctgcctcctaggttcaagtgattctcctgcctcagtctcccgagtagctgggattacaggcacccaccactacgcccagctaacttttgtatctttagtaaagacagggtttcaccatgttaaccaagctggtcttgaactcctaacctcaggtgatctgcccatctcggcctcccaaagtgctgggattacaggtgtgagccaccgcgcctggcctgttttgttttggttttcgtttttgagaggaggtctcattctgttacccagagtggagtaccatagcatgatcttggctcactgcaacttctgcctcctaggctcaagtgatccttccacctcagcctcccgagtagctgggactacaggtgcataccaccatgcccagctaatttttgtattttttgtagagacagggtttcgccatattggccaggcgggtcttaaactcctgggctcaagtgatcctcctgccttagcctcccaaagtgctgggattacaggtgtgagcctgggctcagccagagtttgactctttttcatcaacaaacaagaggaaggatagcttgaggccaggagttcaagaccagcctgggcaacatagtgagaccctgtctctaaaaataaaaataaaaataatgagcctggcatggtggcatgccatctatagtcccagctactggggaggctgaagtgggagaatcacttgaccccaggaattcaaggctacagtgggctatggttgtgccactgcactggagcctagatgacagagcaagaccctgtctgtaaaaaagattagatagacagatagatagatagatagatagatagatagatagatagacggacagacagacagacagagatagatagatatagatggggtgtgtgtgtgtgtgtgtgtgtgtatatatatatatagatatatagatatagtcttcagagattgccagccaaaattaaacctgaggctgctgaacttgagccatccagcagatctttcactcacaggttttccccagacaatagtgttctcctccaaggacctgatactaacctcctcctcaggaatggagatcttctcattaaagtaagtggcgaagtactcctctgagtccccaggggactgtgaaagagagggattactataggcagggttgatgttaccaagactggcagactccccatgatctccagaaacactgtctgaattaacagatttgaaaataaattagtaaaaaatgaacaaaatacactaacaattcatccttagtatactgaaattaaatagtttaatatctaaatgcacaagagaccaacctgactctagctcaatttattttgaatagtttatttttaatgtacattttagaataagtaatacattcacatggttaaaaattcaggaagtaaaaaatttagcctacactaaaaaagttatctccctccccctcccccagtcactcaattctctagatcagttttaactcacaatggttttcctacttccacacttctactcctacttgggaatttttagagccatttcattttcctctaaaaacactgacatatgggctcaaaatatcatattcccagaccagctcctggtaacctaaaatcctagcttttaaaagaaaagaactaggcctgtctagcgaaatgtcctccccacctcctatatttggtaggacttactcaaataatcgaccgtggacattatacctccatcagacttctcaaaaaatgtgcaagttacaaaatcctgccacagttcaggctaaactctgaagctgcagcaaaaccaccaagcaggaaccctttgtactctgactaaggcttgcagtaaagtgccgccggtcacggggtactggcaccctcgtgatggcagggctcatctcagactgatatcagcgtttccctgagttctgcattttgcagtcaatcttaaatattgggaagcagaaggtctgggagaaaagggataccctgccagaaatacacagagcctagtttgcttcagccatcaaatggctattttgaatcacaaagctctaatctctgtgtttgcaataaatccttacaacctctaatttaaacaaataagagctttctttccatagggagctgactcatatcatcttaattaagcagctttaaattaatgaagaaatttatagaaaaggaacagaaattccaaagaagctcagatttaggaaggaatagtcaaagcactcaagaagctccaatcaaatacagagcgtaaggtactcgccctgtattttactgctccatacacatctgaaacaccaggaagcatcatgagtagccaaaacactccagaggtttttatcctgggtctgggaataacattgcccttgcaagcattactgccagaaaccaaatttcagctaatcttggctcaactcagaattgtaaaaaagatacgaagcaggtctctggttaaaaatctgttttcagggccgggcacagtggctcatgcctgtaatcccagcattttgggaggccgagacgggtggaccacctgaggtcaggagttcaagaccaccctgaccaacatagcaaaaccccatctctactaaaaatacaaaaacattagccgggcgtggcggcaggtgcctgtaatcccaggtgctcgtgatgctgaggcaggagaatccattgaaccggggaggcggaggttgcagtgagccgacacagtgccactgaacactaactagcctgggcaactagagcaaaactccgcctcaaaaaaaaaaccaaacaaacaaacaaaaaaaaaacattctgttttcaggatgggcgcggtagctcatgcttgtaatcccagcactttgggaggctgagacgggcggatcacttgaggtcaggcatttgcgaacagcctggccaacatggcgaaaccctgtctctactaaaaatacaaaaattagccgggcattgtggcgtgtgcctttagtcacagctactcgggaggctgaagcaggagcatcacttgaacccatgaggcggaggttgcagtgagccgagattgtgccactgcactccaacctgggtgacagagactccacctcaaaaaaaaaaaaaaaatccattttcatttacagcctaagtcaccagatggtgacttttgaatggagttgttagaatagatgatgacagatgatgacaagaggaaaaatatgataaatttctgttaccaacataaacctaattacaaataaaattagacaataacacaaagcggtaaattaccatctgacatcttctgttcaggacccagcaccatggtggatacctgagtggctgagttcttagaatatgattctggaaaggagaaaagtgagggagaagaattaggaagaacaaactaacaagttcagaaccagcagtttgttactctgtatgactgaatccttactatgaaaagagtaatttttctactgaattaggtaaccttgaaaataattacagttttcagaatatgactgacagatatttaacaaaaaaagaaaagtcttagtcaagattttgctggcaagacttcaaaaccaaattgaagtgttacagctcttttagaatgtgtctagcaggctttctggctttcactgtgaaacccttcacggatggcagggggtggtggacaaattgaacaggaggtattttagtgagacagcaaataccattttttttttttttgagtctttgagtcggagtcttgctctgtcgcccaggctggagtgcagtggtgcaatctcagctcactgcaacctctgcctcctgggttcaagtgattctcctgcctcagcctcccgagtagctgggattacag

SEQ ID NO: 916841 - DNA, 4001 bp, Homo sapiens
ctgcacaaatcactccctgctggaacccagtaaagctctcgactgtatccccaacgctttaacactcctcacatgatccggccccagccttccacctcacttcccacttttttttatattttctgaaacgatctgactttgctattgctcttaaaggcggcctattctgcatataatacttggtggccacgtccttgcccctcctgaagagctgcagtggttcctccctcacttcttggcagttacagttgcaggggagcagcttgatgctaacttgattcaaactcattttcatctgagctttccgacccaacctagcccgtaactcctttaaagccacgaagacgcaatatgagtgttttcccacttctttgtaaaggaagctaaggcaacaacgggggcttccccttccctcagcttcctggcccagggccctgcacctgcgaatccccatgtctggaaagctcctcaaacaactgctctttcctagccttctggtctgaacttacagggcctgaacatagaagggtcccgttcatttattttttatttatttatttatttttatttggagacagagtctcgctctgtcgctcaggctggaggagtggagtggcgcgatctcggctcatcgcacctctgcctcccgggtgcaagcgattctcctgcctcagcctcccgactagctgagagaacaggtgcccgccaccacgctcggctaatttttgtatttttagccaggctggtcaggctggtctcgaactcctgaccttaggtgatccacccacctcggcctcccaaagtgttgggattacaggcgtgagccactgcgctcagcgtattttttaaattttatttatttatttttttgaggtggggtctcactctgttacccaagctagagtgcactggtgtgaccctagctcactgcagcctccgaaactcgtaggctcaaggaatcctcctttctctgctaggactacaggtgtgcgcctccacggagggcaaatttttaaattttggtagagatgaggtctcactgtgttgcccaacctggtctcaaagtcctgggctcaagagatcctcccgcctcggcctcccaaagtgctggaattacaggcgtgagccaccgcgcccggcctctcttttctttaaagccactgtggccatcactgtgtgtgtagacctcaccccgccccaggcaaaccccttccagcacccatcacaccggtacctccagtcttggcccacctgctggcgggattcctcggcactagacagaagccccccggggcaaggggctccctccgcggtcagaggcagggactggggcaggggaagaggctggggctgggcaggggctggacagggacagggacagcgcgcgggggcgcggctcacctggtcggcgccgaagggcgtgatgttggccttgacggtggccacgcccaggcccaccagcaccagccccgcgaaggtggccggtgagcagcagcgggcggcggcgtcgggaccaggcgccgtgcagttgagcaggcgcgcggaaccgcagagcgcggctcgcgtggcgggcgcggccagcagcgggaaggccagcatgcccagcaggtagagcgccaggctcagcaggatggcgcgcgcccggcccagccgcgcgtcggccagccagcctccgaacggcgagcccaggtaggtgaggcccatgaagagcagcagcgcctcgctggcctgcgcgccctcccagcagaacggcgccccgttcaggaatagcaccaggttggacgtgatgccgtagaaagcggcgcgctccagcagctccgtcagcagcacggccccgcacgccgcgcgccggcccgcgaacgccccagccgccgccgcggccgccgccgcccgccgcgcgcccagcagcggcgcccgctcgcccgcaccgcccccagagccctccatgcgacgccgccagctgcctcgccccgccgccgggtcacctgtcccagaacccagggccgccgcccttctcgcgagactgccgggcctgagatgtccctattgggcgggctcgccgctgctcaacgccccactcgccggaacttccggccccgccccgggcactaggcgaggaggtggccggtattctggatcactgcgtgtcttggggagcttgggattccgcagcttggcggccgagagcctttgtttgcctttttgagacagggtttccctctctcgcccaggctggagcgcagtcatgcggttacgcctcactgcagcctcagcttcccaggatcaagcggccctcccacctcagcctcccgggtagctgggaccgcaggcgctcgccgctgcctgtggctaatttttaaacagttttttgaaatggggtctcgctttgttgctcaggttggtctcgaactcctggcatcaagcgttcctcacgtctcagcctcccatagtgttggaattacgtgcatgagccactgcaggcagtcggactaagggagtttaaacaaagaagccggagcctggccctcttcgggcttcggtggggcccagtaggcagccaaaactcacactgagacggcggctgctctccaggcgggtttgctcaggctgcccccgtgctccctgccctgggcttcagtcctggagaggacccggtttctcaacccgtgcatcgttggcactttgagcgacgggactgtcctgtgcgttgcacgatgttcagcagcagctttggcctctgctatccactaggggccagttccaccccctagcacctcaggttaacaaccgaaaatgtcttctagactttgccgaaggactcctgggggcaaatacgcccccattgagactcactggcttagaacaaggcaagctccagcctgtttcaggctttcccagagactgcccctacaccatctatggttgcatggctggcttctcatccttcaaccttccaccgaagtgttgacttcagagaaacatttttttcactagcctgtccaaggcccgagtatcccattccatcatgttactcttttctccttattacctgttacattttttaatttattcgtttatctccccaacctgcatgtgttaacaggtgtaagcttcctgatggcaggattctcttgtgttttgttcctcactgtgccccctgcctctgggacagcgcctggcacatagtggagtgaaagagtgccgcccaaaaatggccctcagcatggcttcagaaattgagaccccggcctgggatggtggctcacgtctacaatcccagcactttgggaggccgaggcggacggatcacgaggtcaagagatcgataccatcctggccaacatggtgaaaccccgtctctactaaaaatacaaaaattagctgggcgtggtggcaggcgcctgtagtcccagctactcaggaggctgaggcaggagaatcgcttgaaccagggaggcagaggttgcagtgagccgagattgtgccactgcattccggcctggtgacagagtgagacttcgtctcaaaaaaaaaaaaaaagacaaaaaaaaaagaaattgagaccccggcctgggatgatggctcacgcctataatctcagcactttgggaggctgaggcaagaggattgcttgagcccgggaggtagaggctgcattcagcagtgagggcatcactgcactccagcctgggtgacatagtgagaccctgtctcaaaaaaaaaaaaaaaaaaaggcaagaaagaaaggaatcgtgatccacagctgctgcaatgattcaattagtgtaagaccacctcctcttccttcatcattccctccagctaagatgagggtggagccagtagctgggaagttggcttgccagtaggtcatctggagaagtaatcctgccagtaagtcttgaagttgcatgcattctctttttaaaaaacttttttaaatgtccgacagatagactgatggtcagcacagtgctgccacacagcaggcaatatatatt

SEQ ID NO: 916842 - DNA, 4001 bp, Homo sapiens
agtaaaaaaatgaatggatgtagagttgacttaagtcttttgtttgccagattccaaagttgggatttccatcctgtctgatgactgacctcagaatttagactgatagaaattaccatgttaaacaagaagtcaacaaatgctactggtgtggcctgttaccaaggtaagcagagtaagttagtctgggatttgcttaaatgtcttcttatcagaaaactttttctcggtaccaagtagcagcctcatcaccatccattccatcctgtccccctacccagctttatttttccatcctaactcattgccacatgacatcatatctatttcctcttttattttctctctccctgcaccaaaaagtcaactttagcaggaacagacgactttcttctctattgcatttccagacccagaataatgtctggtacagagtagtcaataagaaatatttgttgaatgttgagtgattatttgccatgcagtgacctagtttttattccacagaactaaagctgtgaagtttccaggtttgacttaaactccaatggattctctgaatggtaatttaccacctgcctgagattgtgtgatatgttgagtacctgatatctatccatctctttctcatctgtccccctaccaatactcatttcagctgcacttctcattattggtgaacagcatgctatattcccaagttgctcagatcagaaacttggagctaatttttgacccccatcacatttgtacctttatttagttgccttacagcttttcacttgttctctcctgaattggcactttattgcttaaaccatcatcctgagattttctgatctctctctatttaattcctcactgtggttgtccatcctgtattgcagaatagcatttctcaaatgttgttttcatgatattttcagagacttcttgttgcttaagaagaataacttgaacttttcagtttaaaattctagtctgttcttcaagttgctctctatttcttattaaactatcttgatattttcccagcatttctcacaatcggtcccaaacttttgcagatatatattagtatatatgtaaagatgcacactatagtgtctaatttactcatttctaaagcatataatcatagttaaaaatatagaaatcatgccatcatatgcaatcttaattactatatgactaattaaaagaccacctttggataaaaacatttctcaattattttacatgaacttcaaaaaccttttttagcacatttcatcttagttgtgaagcaaatacatttcacatttctgagggaatttgtcatgaatttaggcttgaggtaaaaaggttttgggaaaggagggcattctaaggagtaagatagatatgtaaaggagtaattattataaaatataaatgcaatgatataggcacaaaacattctctaacacacacacacacacacacagacttactagcattcttcaaatagtacaaagaatgaaatacattgaacccacattcttacttcatttatcacattttatgctaagagcagagtgaaaataatataaactaaaaattctaacaaaaatctacttaattaagtcacaaaacaatccagtcagcagaggacactcacctagaaaatgtagaaacaagcaaatgtacaccagtttgtttcttcctaaatagacatcagtgagccatctgacaaacacaggggtaagtattgaagttccaataaaacacaagtttaagatggctgcttggcaattgtgatagccaagcttgatagtgcaaaaggggatcatgttgcagacgacttcaaagaacgtgaacctctcacacagctccaccagaagcaagcagattccaacctgaatttttttcacagagtgtgaggaacacaaatcgccaatatgtcttacagttttctccttctcaatgctgtgatataagtgtactttctcatcagttatggtaaagcctgtaacagacatgactaccctccttgaacaaaacttatgttagtggtttgaacttggtgatattttgagccccatccctctgatgaaaaaaataagaacgttgctttgaatttcacatctccatgctagaatttcataaggtttgttttttgcacatggacgttgttccttttgatgatccaagagcatgagtatttaaatgttcacagtagctcagtgtacccaaatctgatttgtttgcttaattacttagcggctaaattaggatcgtcctccaaaattgtattgaattacatgaatccagttgcaaacatgtggaaactcatctgcctcatactgataaaggtttaaatattgaggcagaagaagcaggttttcgggagaatttgagcactagatcaagaaataatttgagtctaataatttctgatactttaattaaacaagccagaacagtaccaagagataaagcgcaaaaggaaatctgttttgaagggcacgatatcttatcattattacatttcttgttatttttggttggaattctgataagaaacttaattaggtaacaaaagtgctagtacatttaggtaacaagcagagtttacaagaaagtaatttaagtgcactaatgaaaggagaaaatattaaacgaaaccctgcttccttttagttgaccccatgcttgtagaacagcctctcagaggaaatcagaatcaaaaggtgctatttaactcctttattattaatcagtagtcagggatacagcaaccagcctacacaggctttggggaatattggatctggtatcaccctgacccttcagctgggtgaatgggtgttagcattctattttggaaagcaggagggccaattaagctaaaaaagcagcagtgaaagagaacaccttaacatttagtggcttagctgcaaggacataggaagaaaagggaccggaactattgggtcaaagtcataataattcaacacttgagtataggaatgttattttcatgctgtagtcaaaacctaaagaccaatagggacttttgactctggttatcatcttttggttgtgagagactgggggcaaaatactctgttttgaccccttctaatagcctcattgtaatggtagctatttgtctctgctcagcattgctactttggtaacgatgccctaaatttcctttgtgtaaattgatcatgcaatttatgatccaaacttggacagttttgtgcaggtgaaaagtgatgctatttatggttactccccaaaaaaaaaaaacagttataaactgggactgtccagggcaacactctaacatgtgttcaccctacctttggagaatgactcctatctattacctgagatcatggtggggctgttgatcagcatatgccttttcttctaaccaagtgggtcaacacccggtctaagatagtccttttacttttctcctgtggaattttaatcttgagtggaatgacttaagaatgggcatggtggcagctgagttattcagatggcagtgtattagtctgttttcatgctgctaataaagacatatccgagactggataattataaaggaaagaggtttaatggacctacagtttcacctggctggggtggcctcacaatcatgacggaaggcaaaaggcattatcttacatggcagcaggcaagagagaaaaatcgtagccaagcgaaaagggaaaccccttataaaaccatcagatctagtgagacttattcactaccatgagaacagtatgggggaaactgcctccatgatgaaaatacctcccactaggtccctccacaatacttgggaattatgggagttacaattcaagatgagacttgggtggggacacagtcaaatcatatcagcagtacccaaaagggactgcccatgaggccctgatgaactcagcacctccctgatactttttcttctggagctacgattactttttccttctgtagaaggctcaaagaattcccat

SEQ ID NO: 916843 - DNA, 4001 bp, Homo sapiens
tctccttccctttaaaagagctcaaagccaaaaatataagccagacattatcaaagagcaaatgaatgtctagaaataaactgagcatttatagaaggatacactaatttgaacatcgggaaacagatgttaaaatttcagatcacttattattcaaacatgccttggggggaaaaaagtaatatgtaactgcaaactgttgttgtatttgcaaaaaatagtttctgagtttgtaagttgttacacaatacactgagtttcttacggttgtaatctttcctttccactgagatcattcagtccctcacttggattgctttaaatgtaatctgctcagtcagaagtagaacctggagttaggattgcttcaccagagctaaatattagtcactttgctcaaccctcatttgccctctgctgtccccacccaactctcatttttcagccacactccaccaaatgcatacttagtgcttgtggttccagtaacacaacacattcaagctaacctgtctgtggaaagtttgcaaccctctgagttcagactggggttagccatgaagcatggggtgacaggaaatggcatccagtagtcactctttcctctgggtccagtctttttcccatcactttcatcattgtccgctattttattcctctgccgcatctcctttgggacccaagagggaaggaggacacgaaataatacaggaaaggaaatcaaaaaacaattgtagagaaaccactcctcgtttcctcttctatgtctcgtgtgtgtgtgtgtgtgtgtgtgtgtgtgtgtgtgtgtgtgtgtgtgtaaaattttaatttccctggaattggaactacagaagtccctcctcagccctaccgggaaagtggcactgggcacgaccgccctttccaaggcagtctgcaatccttttcgcggaagtagaggagaaaagggggtggagaagggcgccgcgatgcagcatccgctgagaaaacaggcagttcgcacgtgagcgggctcgcagcctgtggcgccacctgaccgggcctggcgcccccaatgtggtgcagtggcccagcaagaccagaaggctcaggccctcctgaacccttgccaagtcagaggtccctttctgcctgggctcaggcctcgcccgcatatagttttccatctgcttccacccctgccatccttcctggggaccaaaaatgaagaaagacaacccccccatcccccggtatttcgtcttcccctcacagcctcttcctgtcctgatcatctgctcaaagagaagacgttctctccacacactccacccccgcctccaccttctgcggcaatgaagccacgccaccctagggggctcgggggccggatgctggcggggcgcgcactagagacacgccgcactggaagcagccctcggagtcccgtgagccagggagactggggtgcaccgcgccacgctgagtctcggtgtaaaagccgagagcgtgagcacctcctggccgaaagcacgcgaggcgctccttgcccaggaccccgcgcgccccctcagttcccgggcagctgtcggcgcgcactggctgacgcgagctctgctcccgcggccgcttcgggatttttttgtctatataagggctcgctggccaactctgcgttggcacgtttgtcacaggctggccattatttgcacacacgcgtgcggctccgcgggcagctcgggtcgcagacgcaggctcgccctcctcttagccggcacctcctcctcctcctcctcctctcccctccctccccagctgtacttactttatctggtctctggcgcagggtgggcgctgcagccctccgttcccagcaaaccgcagccgattcgcctcgctgtcaacgggtgaatggaattatttatttatttatggcccctgacgtgtcctcgcccgccacagccagcggagaaggaggcggtggcgggaaggggaggcgcggctgctgaacgcccttgtgggtgcggaggagcgcgcgccaggggtgggggccggacaggctgcggtggaggccggcccggggggtggtgggggggagccgcctcccggtgcctggagaccgactgagcatgctccaagcggctgtcaaagctataggcactttctctatcgctcggggcactccacttcggattttagttttgaccaaggaagaaagccaaaaggcaggtagatctgtctttccagatgggtcgtaacttgctgtatccgaagtactctgtagcctgacctagaagacagatgtgcggtagctctgtgcaacccaagcatgggagaggaaagcatgcaaaaaaagaagagtctggccgaatgcagggagaataggagatcctcattgtgagcttgcagggaaagtgttgagccatttttcaactgaggcctttttgggagaaagaggtagggcactgttggagattagactcaccaaccaaatcacttcacggaaaaaaatataattgacaccataggaggaaggacatagaaaacagcaccaaaaaacattaaaaataagaaggattttttttcaaatcatttataattcctttcatttttaatttctcaaattacttagttcttcaaaccagcatttagttatttgacaacgaatagtgctagagataatggtaattctgctgtcattggtttggtctcttcccctgtctaaaatgtgcttcttggtaaaactggaaagaggaagggctggaagagaacatttaagtaaccccatagattgggtttctttaatatctttaagttaaattgccactttagagaaaaagaaactatccaaaagaataattgtaggttttggcttgacaagtcctattgcagtttgtctaccagtttagctagctttctcctccttgatttcacaatcattttaaggtgtgttctatgattcttcacattttacgaatttataaaaagagttaagtcatttgggtaaattcacattgtctttgccacagctagtctgttgtaatggacgaaatttgaatttcaatttctgtagctatgaaataaaagtaatatcaatcgtgttgatttcataagatttaagtgaaataatatacatgaagtggctggtaggcataatacaagatgaaaaaataatcgtgattaataacatcaaaattactggaagataattttattgaaagaatgatatttgaaaatgaaaaaaaggcagaaaattacagaaaggattttatatttttaagctaaaaatgcttaaatagacatttgtataagacataataggcctttgataatgatgaaatgtctagcagtgactataaacacttcatttaattaaaaaaagttaaacatttaaaagaaacaacataaaggcacatttcaaggtcatagtcttgagtgtttgctattgatatttttcctgctcattcatcacttttatttcctgtcaaagaagaggaagaagaaagaccatatgctttctgaattttgatcctattctcccttttccttctctttgatttttcttttttgttgtttttttcttatagtcccatgttcttgacctgtttaacctattgctgaatgccaaacatcactacttatagcatgatatcgtaaccttctttttaagtcttgttttttcaacaattaaaactctggatctaatttacctactgtcacagagttagtatttgggaactcatttctaaattgctttgttgtgatagctaggtatgttatgtaaaatttgattggactagaaaggtatctgaaaggagggagaatcagctaagaataaattcagccagtttatcctatgacttacagtttaatattgttaagaaattgagaaaaaaatacaatttagggaaaaaataagccatatgattagaacttggaatgctctggtaaaatgtttgccttgatttatattcataagctgaaataacagtgggaaaaacaaatagcaatacacttagcat

SEQ ID NO: 916844 - DNA, 4001 bp, Homo sapiens
cctcttcttttaaaaatccacttgtagactgccactaattggagtgtatattcggggcaactgaatcgatgctccagagctgcaatccgcaagcttggtccaaataaactttctatgtatattaatttttcctcagcttcttcctttagtgagataatgtacatatatttacatatctatacaaattatgcctttggaaagtgaccatgtatgatttatatattttgaaatctttaaatattatataatgagtaaatcttatgtttctattaaaaacttgcaaatacaaaaatgttgaaatacaaaactttagtatgcaaatataaatatatttccttacatgtttacttggttgtgagttgtacttctgttcatattaaatataaaattttcttatctttttttctaatgattttctccttgtagctaaatttctatcatacttgaggaaagagaaatcgatccgtgcttatagatattatctagtgtttacagaagaccggaatatgccaccccaaaatatgcctctttagcataaggattactttgagctgattattttgagaaccagcagacacaggagaagctctgaaagttaagtcaccctttttgtaagggaaatttatatctataaaggaaatttctatttttagtggtgtctccctctctgcaccaggaagagaagaacaactaaataactagagacttaccaaaagagaaggcatggacttaatctgtgtaacaaaccttatcattgtttatatgctttttctaggcatctccacataactggcccttcctacactcttctttctttttatcagtggacaatggtattaaagcctgaattcaaatccacctccttgagatttactcatttttctgggtatctcacaagtataatgatgtacatactttaataaacttctttttgtttttctcttgttaatctgcacttagttactggggtcacagctaagaactcagaaaatatagaaagaaaattatttttttcttcccttacataggaagcctgaacagtgctgaacagtgctcccctcctgaaaaggagagtcagcccaaacttttaaatatgattttcatgtcctttagggaaaaatttatctgagagttttacatgttaccatgtgtgcagtcttttcttctctcccagagtcatggcttagggaaattacgtatatggctctacagtaaaagaggatgataacaatcattgtgtgtatatcccgttttgtttttgtttttctccttctaaagcttttaaagccacagaatcctttctaggaatgaaatcttactcagaatcctgctatgcaaaccagctactctggtttatggggttggaagcatcatagagagcctggaattccacttatcagcatcccctgactcctgaaattgtccctggttcttcctagaaagtttagaattccttagagcatagctgggaagccacttaataatacttttctcacctttcaacttaggaaaaaaacagaattatatttaagagattttggatcctccattttgcattagtttccaaagattctctggtgttttggttcttttctcaatttgaaagcattagatcattaactggcactacggaagaggagttaaagaaaaattcctggatacttctaggaagattacatggccaaagaatacctttctgacttttatattaaaatgcccattttaaaaaatcaaataaaaaaaaccccacaggatctcctgatatcaatgatgagattcagaaagatgttagaatcccttaagtttctaaaaaatacagtatcactgaggcaggattaagaacagtaccacagcaaggtgaaccaacctggcgacaggtgtttagaaacatggtcttccatttcaccaagacataagtttccctgatctatggactcctctccccacctgaggcagaagtttccttgtgaaccattgctctttttagaatcctgaacatacttagttccatctatctctttgtcactcaacactttgtcagctagtctcaggattctatgaccccttcccctagctcacttgagtaatcataatatgggaaaactaatctaaatgccaactctgagaagcggttgcatatattactgtcattcacttgataaactattatatatacattaaataatgattaggaaagctccataatacaaagggaagtatttattatataatttttagtttaaaaatagtgatataaacctgtatgatagcataattccaaatatgtgataaaagacacatgtcaaaaaaacataaacataggctatagaattaggataaggattgcagaaaaaattataattccttaattatattaagttgatataataccactataatggcataatatatacagtacttaaattaatattacacatttacttatttgccctaattttgatttttatgtctgctttgaaaaataggttgcttttaactagtccacaactgattcaaatatagtttttgtaaggaaacacaatgaaactggaagctgtattttatttacagatcttacctacgttgttttaagtttctccttttttgttttatattgatttgtctttagtcatacctaaatgaaattatgagactcctgcataattgtaaagaggatactcacagacagtcaccacataaaaatttagatataaataacatttgctgattaccaattgcatatatataaaacattgctgccacctgttatggtacaggtaagtatcaataagcaagacacttaacaatttaatatgcattttcacataatactatcttttagctattgtcttcatttggcaggcaatgaaaataaagttcaaagatgtcaaatatcttgttcaaagtcttaaagtctaccgcagtattcgtctcactctagaactatgtttttaatgaattaaaagccatacacttcctaccaacttactatctttcattcatgaactccttaaagtggtcatattgccactccttctccaccctcttgtattttgcttgttctaataatggctttcctcgtggtcacttgcctgggttttctgcctccaccattccagctatgtgcttccccaatgacttcaggagacactcaattagttggtaattatcaaaagaagaggaggaaatgaaagctggaacccacagaatgttaactatccactggagtcagaaaataataccaataatcaggattatgaaagagccatgttgaagggaaggaatgtagaattcataggaacttaataaagttaccaggtctttcttctaccatacacttacgagtgaattgaattggtagattttatttttgttaatacttatttgtcccctactcatacttgtcatatttctctgtaggcaaagtatagcccccatccattgactttaggtttggacatgtgactgccttttgccaatggaatgtaagtcaatgcagtgtaggccatgtccaagagtatgtttaaaatgtgtttgcatgttttgcctttatagcagtccttgctttccaaaataagaacatgtccctttagcctggatcccagaaaataagaaaatgtttgacggttagctgagcccctcagaaccaaccagagccacagctgacccatagtgcctaagcagcatgggcaagaaataaatatctgttattgtaagccctaagagattgcagttgtttgacagaatagcaaaatctgagctagggtgcataaaacaaaatcctgagaaacacattggcttcaaggatgggcaggcaatagtgaggaatctgttagaagaagttagaaaaatggcaagttatgttaaacagtaacaaaatatttggtaaaacttttccctgatatcttcaaatgcagaaaatgtacacaatgtatttggggctctgggaaaagaggtttggagatgttgctgcttgcatgagttggtggtaattagctaca

SEQ ID NO: 916845 - DNA, 4001 bp, Homo sapiens
cgctgcaaccttgaatgtctgggctcaagcaatactcccacttcttgggaagctgagatgacaggcatgcaccatcatgctggctaattttttgtatttctgtagagacatggtctctctatgttccccaggctagtctcgaacttctggcctcaagcgatcctcccacttccgcctcccaaagtgctgggattacaggcgtgagccactgcgcccggcctatggtttttattcttgactttgccagattcctttgtcattacttgaataagccaattaagctatcgtgcttattatgcaaaaattatttttgcgtttctaatcaaatgaacgccaacacaataagacgttacctggggagtgctcaacggaaggataaaacactctgaaaaaaatgttattgtaattttttctatatttggctggtttatgctgctgtcactgagctaggttttcatctagacatgctaattcagtgtaggtctgattgaagcttttttgtttctaattactaaaataataaggtgtccaactcttttttcttattaggaaagttaatattaacagtgataccatggaaaatttaacactgacaggagcatatgtgttttaaaacacaagaaatgggatgaatctcagattgcctggaaatagtcatttaaatgaaaaagtttttaaatttaagagataatagaaaagttaaaaggacacaccagatggcattttcactcaccaggattagaaataatcatccaaacaaataaaaagtgtatcaaagttatttttcacatttatttatatcagagagataaagcagtcattttaccttgcacataaggaccacttatgaaatcatttatataatttgagaaggcatttactatgtctataaaaattcataaattaaactgtcacattaattcaatcatttatagcaaactctccttccattaatatattttactttaaaaaatatttactttttggtttggactaaaatctcattcaattcagtgatagtacttaacattttcccactgcaattatgtgagattttctgcttcaaagacattttttaagttacttccttcaaattaatgtgtaactatccttctctttgcaaactatacaatcaggaaccactttatgtattttattaaataagctaaaaattgcaaatatttaattttcatttatagtggattcagtgaaaaacataaaaattatttcagttcaaggcatatttgtcattactaatgagttaacataaaatattatctccctaaatattttctaattcaatgccaaacataccatatgcaatatcatcatctccagaaagtgctaatccagctatataaacagcatatttgtcttgatcttttcctaatacaacccaatactattcatgcatctgtttttcctccaggcatagactactggagctagaaggggctccagaaggatctaatctgacccatcctctcctcattaaagtgtggttttaaaaacgtgataccaagtctctcacacattggcaatacgaagctactcagaaaggaactaaagttcgcattcaaactttacctttgtaaaattcccaaagaatctcccacggcgttcttcactccttccttcccaggtttcagaattttttctttgaaggtatcaaatgctttaaaaggcattttgaatgaggggcacctctgagccgttaacagtcagtctcaaaaactgtcatccttcctcatttccagtgtgagaaccaccttgtttcccttggtgaacacctggaagtcagttctcgtggagggaactactcaaaatcaaaaaggagatgaaacccagctcggatcttccaagataagacaactccctcctctctctgctccccacccctccaaaaaagagtccaaggggtgtctggctgggaattcagtcccttgcaaaagctgcacgctctgcagcagcctgtggcagctgtctcaggcagccactctcagactgagcgcagcctctctccctccctgggctgcagctggggacgctaacatgagctccggaccaccaggagtcctgagaccagcagcagtatccgtggcctagctccagcccctccagccagccgcgtccccctcctgccccaccccagctcgcctgccgctctcaccaagtgagactttccaaggtgatgctatagtaaccggcacaatacctgcccctcagccgcctgggcttatgaatgggctctcagccagagcaggcacccagagagaaatttatgaaacatttacagccctttgcttttctgaggtctggccctgcagacaggctcacagccaccactccatgccttttattcccctcatgagagtcatgaagccgtttttcagccagccactagcatggatgtggtcccacgaggaacttgcatttgagtagcccaaatgcaaaacccaggccacatacatccaggaggacatttatttgctcctaatcaacagagcaggctctctcaaagtatgatacgtagatgccatttgggaccatctaattgaagatttctgagccggaagatatctagaacctgcttagaactctccactgactcctcattgtcctcaggataaataaaattatttttgttttttccccttttctccctctagatggacttttttttttttactttaagttccaggatacatgtgcagaacatgcaggtttgttacataggtatacatgtgccatggtggtttgctgcacctatcaacccatcatctaggttttaagccccacatgcattaggtatttgtcctaatgctctccctctccttgccccccaacccctgaccagctccggtgtgtgatgttcccctctctgtatccatgtattctaatcattctactacaaagacacatccacacgtatgtttattgcagcactatttacaatacaattctttatcatggcacacaaggcctttccctgggaccctaagtctttcttcttgtcactctgctttccacatcctcatttcactgaactcagcaagctccctattgcctctgggctttactcaagctatgccctctgcctgggtaactctctgcaccccttcaactgggtaacttctaggggttctaaggtcatgctaagatatcaatcctctagaaaactgcatgggcaaggtgagatgtccctcctctgtgcctccaaatcacctgtcctctgccctagcagagcctggcagggagtgggcgttacctaaatacttgttgaactggggctgaaacgctgcaagttgtggccacatttatgggcagcaggatgacgcctctgtaaatgctgctgcggtggaaaaaaaactcttcatctttgaggctcctgtgttccaatcctccagtctgcatgcgactgacaaatcataggctataggctctcaggctccccaggagtcatttccacaagaccagtcaatatcctctgcaagccactgtccaaattatccaaaatttgaattaagttcaactaagtccgtgctgaatccttggtaggctaaatattgctaatatcttttgagttctttctagggtcctggctctgtgttaagcactctttaagtatcaccacaatcttcccagcaagactctgtggtaaataacttcttattttccccaattttactggcaggaaactcagacaaaaagaggttaaacttacctgagatcatacagctagtaagtagcagagccaggtttcagatccaaacagcctggctccaaccttttctctctctctctctctttgtctctctctctctcttgctctctctctctgtctccccctccctccctccctctttctccccacacatactttactgagacatattttgcatttcaaataattcacccatttcaagtggacaattcagattcttataaatttaccaagttgtgtaaccatcaccagaaagcaattttagaatatttccacc

SEQ ID NO: 916846 - DNA, 4001 bp, Homo sapiens
tgactatatcttataacttaacagtcagtcatgcttcaatatgctctagtccagcatgcaaaacaaacctgcattctgcatttaaccagatctagaggaaccaatgctgtatgtgttgtgccacagctaataattcctccaagtccacaaaggataaagaatctgccagatccatagtcacagctatactgctctgtttgattggaaaaaaaaaaatcaagtaagtatttcttcagagatgactaaggccactggaatgaaagaaaatgtttccctgtgagatactattatcacagctgaatagctttggccacaattaagtggcttaaaaaaaaattcactgccaaattcagatcatttaaaaattatgagggttctgtatctgatactattaatagctcgtattctgccatattaatttttttaaaagttttctacattaacggcttttacaattaaagtcaaacttcaaattattaaccactggtaagagcacacttcagagtacaaacgaaactcagaaagatcactcgacatgtaaaaggcttgcaaacaacttcaaagtttatcccagccactaaccaatactatccccacttaagaactcctgtaacataaaaacggatacgcacaaattcctgcagtcaaatacatttaatacacaaataatgttagctttaacttttaaactgaacgacagatagtgtaaataaggactctatccatactaaagacaacagaagcacatgaatgatttaaagaaaaaaatctttcgattttacaggcacaaggtagataacattcttaggactcctacaattcggttttcaggtttctctgtatgtacatacttcactaggatttaaaacacacacaactaagttaaagctgggcccaaccaccaagaatcccaagagataatcacaccaaagggacgcccaccaattatctcctttctattgcctatgtagggctgcaagctgcctcctccagtcgcacgaaaacaggacatctagttatctcatatacaattaagtgcaaaaatgactgacctggcgtcgacaaatataaaacttaggaaaggactatttttaagaaaactaagggcaaatcaaaggacaggtaatatagttagtagaactgtgggtggtcagtagtttcgggaggagagtttacccagtacttagtttgctgaccaagcgagctcacggcggagaaagagctagtcacggcctctcttccctcgggcacacggaggtcacgaagggacacagggcctcagcgcttccacgcccttgagggaaggccaaggatctgacacccgcctatggtggaaaaggccgataccccagggcaagcaactgggcgccgtcctacggtgcagcgggctggactcgtccttccctgtcctccaagccgggtccaggcctcaaaggctgggcggcccacaagtagaccacacgactgtattgggcagggtctgatctcaccttccacggcggcggctgccaggttgcgagggcggcggggctggcccgtgggccctggggagctgctgcggaggtccccgagaccatcgtgcaccagctgcagatgtggcgtgttgaaggggttcgcccgcgccaggtgcgccacggacgagaacatctttctaggggaggagggagcgacggttagaggacaggcaaggcgccggttaacgttaccggcgccctggaaccccaaccggggccttttccttcccgtctccacgcccttgaagaggtcacggcggccttcgaaagaggctgctcccggctgggcccaccgccaaagcagcggccccacaggagctctgggctccgctccccacacccgccacaggagaaggcccggccacactcactccctaagatggcgatcacacaaccactcccttggaaaggttgcggctcacagaggccggacgtcctccgggtcctaagatgtgtgcccttcgcgcgtcgtcggcgtgacgcacacagcgcgccactgcaagtacgcgtcgcccattggtggagaagagcgccgagcccgtagcgtcatcgcgttctcctagcaaccttattcccgcccctgcccgccccagctcttccgcccggcttgtgcgcgggaggattcgttctgcgcaggcgcgcgttccgggtctatattttttgagaggggtcgggctcgagctcttaccctgctcgctttgtcccttcaccttcaggtgtctctccttgaccacgggcttcagttcgcttcacttaagtgaatcacagtatctagtagtcacttaaaaaacaaaacaaaacgcgaatgcttgataatatatttaggtgttggagttacaacatcactgcagtactttgtgtcacaacttctgccattacagtactttttaaaataagttccatccattgacattaaacataggtatgtctgtatttttcatcagactcctggagaatattttaaaaagaaatgtgcagcaagaagtcttacgacagcttgccgcgttatcacagtaatctacagaacacgttgaaacattgaactcctgagatgttacagcgatgaactactgaaagtgactgatagcagattgtgcgtgtgtgtggttaatacatttaggaagctttcattagattcagctcaacagggaggggcgtagtttagttggggagagtttaatagggattcaacctgttagacttctgactcttatattttccaagctcttgacaaagtaaccttgggaatttacttcatctctgtgtacctgttccctagatgtaagataggggtgggactggcctcataggttcacactggtacagtcacacatggccttacacttcatttaatgctctgctgtcattttgattttttttttttttcttttgagatggagtcttgctctgtcgcccaggctggagtgcagtggggcgatctcagctcaccgcaacctccgcctcccgggttcaagcgattctcctgtctcagcccccggagtagctgggactacaggcgtgcacaaccacgcccggctaagttttctatttttagtagagacagagtttcgtcacgttggccagtctggtctcgaactcctgagctcaggtgatccgcccacctcggcctcccaatgtgctgggattacaggcctgagccaccatgcccggcttgaaattcttaatacatgtatgaacaaggggccacgctttttttagtttgcactggaccctgcaaatcaggtgtctggttctggatgggagtaatacttaccttgcagagtctatgagaactcaatgagataatgtctaaaagtctacagaagatgttacctaaaaaaagttagcattggccgggcgaggtggctcacgcctgtaatcccagcactttgggaggccgaggcgggcagatcacggggtcaggagatcgagaccatcctggctaacacggtgaaaccccgtctctactaaaaatacaaaaaattagccgggcgaggtggcgggcgcctgtagtcccagctactgaggagactgaggcaggagaatggcgtgaacccaggaggcagagcttgcagtgagccgagatcatgccactgcactccagcctgggcgacagagcaagactccgtctcaaaaaaaaaaaaaaacaaaaaaacaaaagttagcattgaggctgcggcatcacggcactctctaagcaaccctatcccagacccagcccttctggcccaactaaagtcctacagtcccaggaagaattccagagtggagggcacaggaagggaagtagtgacagataaagttaaaaaagtacactagcacctgattgtccagggcctcacataccagactgaggagtctgatcttatgtagacagaggtagtcactgaagggtctggactttctctctctcttttttggttaattcaactttatggtgcttttctaatttaaaaatcctttgtcatgaaaaagtcaaatattatg

SEQ ID NO: 916847 - DNA, 4001 bp, Homo sapiens
agcggccagttcccacaggaccgcagggtctgcgcgggcagggggccggcgcgcacggccatcctcaccaagacgacttcccccgggatcggcgtgggtagccggtctcggaatctcacgttcaattccttgaccggcacgagcagcgccaggctgagcgcggagatggtcagttcggccggactgctccgaggcagcgcagtcagcaaggaggccagcgtctgagggcaggggcgatgagcagagggccccgtgccagggctcatgcgccccggcgcgggacccccagagcgaggccctctctacccagtgccaccagggcttacacctcctcagcgccctcgttcagccacgtggctccaacctcctttcctgctcccttgtcacatactacccctccaccctccgtccttcctcccttttcgagtttccctattcacgggacctctagaagccccttctcctttcttcttccacccccaccttgaagagagagaagcagccgatctggcgcgggagggacaaccccaagaggctcggcagctgggacaagagcacgtgcagcgcggccccgctggtcagcgccttgaccacaggctcggacaaaaaggtggacaagacgccgagctgcagcacgaacatccccagctgtgggggagaagacgcgctgtcaccatctagaggaggagcaaaccaaccccgcgcacctccgccctcccgaacccaagccgaaagctggtccctccctcttccccggcccaatttccctggcccctcagcagggatccccccgggttcctccccgggtcctccctcaccatcaacgccccgctcccgaaggccacggccgcggctaccccaacccgttgagcgtccagctgctccttctcgattccgctcagattccccacgaggggttccggcaccagccgctcgacggccgagcctgtcatgaggctgagtatggcgaaagttcctgccgccgggggacaaatgcagacatcaccagctgtgcagccctgggcagggcagcagctcagggtccatgccttgggtccgagatcctgctgccagactcggctctccaagaaggctgctgccccgtcaagactgtggggcgcgaagagctgcgctagccggcaaaaactgctccctcctgcagattctctgcctactgcgtgcccctttgggggaccatgcacctattcttccccttccaagtccctgagatgttcattttaaccaaatttcataggggaaaaaagttcaggtaaactcccacctctttgcacccactctagcaagcattgcctaggtcagtttcctggcagggttgggcaaggagggaggtgaaggtaggagaggtgaagagggaaattaggaagaagggaaataacagcccctgtccattttcatcccatagggaagaagagtcattggaagtccctggtcactcacctgtggacaggtgtctcccagtacctagcaagctgtagatgaggacggggaagaaagaagtgtagagtccaaacaccgggggcacggaggccaggagagcaaaagccatgcctgggatagaagtggatggaaaggtgtgctgtggggagggggccttgtccaacctccaggacttaaatgcacttcccagactcttaggagctgacatcaaggatgctaaatcaagcctcatcagggaactgaggggttaatgggcctcagtgagaggtcatggagcagacaaggtcagggacgctgtggccaagtcctgggggccaggcgttgtgcctctctccggttctctgagccagaacctgtctaaggcttctcgcaggattgcgcagatgaggggaggtggggatggggatctgatggagctccacagtccttacctcaaacttggcctcagatccctctctcccaccctcgacggtaggaacccaccatctgctcccggattcccagctccctaagcctcctcccggaagccctctagagcttgtgctcccgacaggctgctgttagggcctctcaccctggggcacgtgcacgatgcccacggtcactccggccaccgcatctccgagcagccaggcccgccagcggtaatggggcagccagtgcagcgcgggcagccgagccagcagcaggcgccacgcccctgtcccggaacaagcgcgagcccgcagcctccacagcccgaagagccggggaaagccgcgctcttcaggtagctccggttcctgctcttcgcccctgaagagctgatggaaccgagcctcggtgagagcttccctgagcctggtcgccaaggggtacttaaggtcagaggtgtcccccgcgcctgggtaggtcctggtgccctgaatcccgctcattctgcccttggccacctccaactccgcccggtcttaaatactcctccgcccgctaagccctgagtcccgcctcccacgaagcagggtccaatccggccctgaggtcaccctcgcttgaggaccttctcgggtctggcgagagccgcggcttggagagggagagtctctatgttaggcgtttctgcagacatccttggccggatctgatcgctggctctggggtggctgtggaaatgtgtagatattagagagagagaatccgaaaggcaagcgcaccccgacactcaacacccgctatttacccttccttagacttttcacttaactcccggttcctttccccatcggcaccttgggcggagagagaggctggttcctcttgggtcactggtccttccctgagccactacattctcccagccagagcaaaaaagttcagcgcccatcctgaacctcacccagacccacatcttcatggggcacagctggttccaaaaagcagtttcatgtcctactgacatggaatgcagccacatgtattggagagggataatgacagaaccagcacccacacctctgtgaggagtggctgggcctagttcagggcctcaggggaaatactgaacccacaggatatttttttcttaggaaccaaaaaaactgaagcaccatttatcacattcaaatgcttttcacaggccaggtgaaatggcttacgcctgtaatcccagcactttgaggccgaggcaggtggatcacctgaggtcaggagtttgagaccagcctgaccaacatggtgaaaccctgtctttactaaaatatacaaaaattagctggttatggtggcaggtgcctgtaattccagctactcaggaggctgaagcaggataatcgcttgaacccaggaggtggaggttgcagtaagccgagatggagccactgcattcaagcctgggcgacagagcaagactccatctcaaaaagaacaaaaaacaaacaaacaaaaaacaaatgctgttcacaaagtaggcattcaaaagcacatatgtggtcaaactaagttcaaaggggtcagccaccccgctcatgtgtccctatggttcctaaagaaatataaaggttctaactccagaatcctgctgtttgccatgatcctccacccccattcacaagaatcttcggcacccctccccatgatcctctggtcccccagtccacgaccccaaagcccggggggtggggtgcagtgagggtgggtctcccttcttcagttcctcctattgttccgcagaagtcttatctgggcgctacatcctgtaccccccttaggaatccctccctattatcggctaaagggacctcgggcccacagggaggctccaggtctcctcctcaccctcccaccccagcagtctattgtctgttgaggaagcccaagtgcacgtgactgagcccaagggacgaatggatacagtggactcggagatgcattaaggacccaggacagggcatctggacatggctgtgtgaatgtttggctcgctctgttccagcggctctcccagaagttgggaggggtgaagatccccttgggctgtccgctcttgggtccatggcttgaagaag

SEQ ID NO: 916848 - DNA, 4001 bp, Homo sapiens
tttttggtcactttggatatttttgtgccaacttaatatgttacggagagctttgccctacctttgctaattaacagtacaataaacagcaaaaggaaggtcactactgacaaactttgaatataaagtgcagtgagctgggttttaggctcatggttcccgcatgtggagttgaatatatggcctttgcttcccttcagaacccacagagaaagggtgaaaagcacaaacatcaaacaagtggtgaatacacagatcagcagcagccccaggtttaaagcgctttcatcaagccccagccatagggaagaaatacttcaacagcaccctaagggaaacaaaaaactgaattatgaaacgaaacattaaaaaagcatcagcggtgtgtcttagaaaaattactagtgagatttaagtcacagccccccactttccctcaaaagtgctttctaataatacagagcacattccaaatagcttccctctgccaaaaacttgccaattgtacctcccctgctcagcaaccagggtgaaaaaaattcaacgccaggagaaccttaatgccttcatttttgaagtaaattccaaacatttatcttgcggggcatttatccacagggggagtagctcctaaatgaattaaggaagtgaatatgacctttaatagataatttggttcccaactggaaagcaggagaggaaaaacaaagaggagaatggataaaaaaggattcaaatgaaaaagttggaaaaacagaggagaatggaatttacttgggaaaagaatgaaagctgaaaggcaatagaaaaagcataaaagcaaaaggagatgccatctaaagacaaatgctagataagcaaagagggcaggggtcgctaataaacctttcagagtccagaattacttaactctaaatattatctcactgtaacttgacgatggtctaggttccaggctgggagccccagaaaacgaaaggggctagcagtggagaggcaaggtgggacagtgcaggaaagcagagaccctcgtaagctcaagaagcagcatcaggttaggctggatcaaggaaagagctggtgctcagctaggtttctggaagtgctgagaggcaacaaccacttggactgactggtccgtggcctatcaaagattccacgtgcgctcgagggagactagagtgacaccccctcccccccgaccctcccacctcccgggagagccttggaggctggaccaacaaacagatgggctctggaggccagagaagtggaggattctctgaccctgggagaccagacggggaccccgatgggcaagaggcacgcaacacccagggtcaagggcggtgacaatgggatcccgggcgcccttcacggagcccgaactcaccgatgccgagtcccacgaccaggcggccggcgagcagtgtctccttgttgttggccgcagccagcaccgcggagccggcggtgaagagggcactggccaggaggatggcagcgcggcggccgaagacgccgttgagggcgcctccggccagcgccgagacggcagccgcccccaccgtgctggacaccagcagctcctgccacagcgcgtccagactgagctgccgcttgagcagcagcatggcccctgacaccaccccggtgtcatagccaaacaggaagccgcccagcgcggagaagacggccaccacgtacacgaaggcgggggtctcgtcctgctggaactgccgccgcgccgcgcgctccaggtccccgacgccgccgccgcccgcgcccgcgctctgcaggctggtgctcgattcggcggcagccaggaggctgcactccccggccgcgctcgccgcgtccggctccggctgcttcctgcgccgctcgcccatcaggctgctcaggctccgcagcgtgtactccacattctcgcttgccttgcgggacatagggcaggggcccggggctgcccggggggacgcggctccgcgggccggcagtctcggcgagctagacagcccgagccggcgggagcaaccgccgctgccgccgctttcttcctcccggcttccgctccggctgccacggcagcagccgccgccacggccgctccggggagaaagttgctgcccgccgcgctccgacgctgcggagttggagcccggcgggtctcactccacactcacgccccgcgcctgccgagctggcgctgcggagcgggcgggaggcgggaccgcgggtcacgtgcaaccccgggccggcggggcggggcccgggaaacgtcccgccccctccttgggcggggccaggctcagcccgccccggacccctaaaccccgccctcccggtgggtgcgacctctgacctaggctccctcatttagggctctggcaaccgtatggaattaaccctgccttccgagctgcagcggtggagcaagccaatgtggcgatgccatcaggcaacaggcttccagacgggaagccacccagaatgtttgccgtgtttggagaggagggagagagcacctaaaccagcctcactgtccttccagcagcctagagagagggctggaaaaaatatcctagaataggacctagcaagtacccttccttttatagtattgtgacattacccagcgtggtctacttccctggcattaaatgtgtttgttctggagcaattcagggctgcatgctcccatttctatagctagtttccactctcatcgccagtccctcctcaatttatgcttattttaaaggaatggtacatttgattctttgaggacagagaacatatctctgtggtgaatcccaaaccctccttccatggatccccgacctgtaaaagaaaattcacatatatgcattccactcatgtaacgggtaattcccagaaatagaaagaaaactcaagaccctgatttgtgattcggcaggcagtctccatttccccgccccaacatgctaaccaaaaggtaggatagcttctctcctgagaatccccactgttgccctccatgaggcactgttttaacagcctcatttacttgaaacaaagcaaagataacgttatttgcaaccaattttttaaactgttgagtgaattaacagttgttggttcatttggggtttgtttccccctttaatttaaatgtttttaaaatatacagttgcgcatcaggggctaaagatagtttgttttgttttgttttgtttttgagacagattctcgctctgtcgcccaggctggagtgcagtggcgctatctcggcacactgcagcctccgcctcccaggttcaagcgattctcctgcctcagccttcctagcagctgggactgctaaagatgttttgtgcctctaatttgctttcattcttcaggctgagggcaaaaagtcaagcatcatatgattctattcctacaattccactgctcttttatttcccttatttgagcaaaagctttcttagcctggggcctatttttcatgcagctataacttttttcctttcagacaaaaggattttgtcattcctgtttcagtaaaaacttatattagaatttgtcaaaactgctttcgttttgattatcagtcacgattatctctacaatatagtactttccttgccagcaacaaggaaaaataaactaatgaagccagacggcttaactatttaaatgttatcgtctggctttaaagcaaggctctaccgtcattcccaggcatcagttaaacagagagagcctttagatctgcagcaatgaactctttaatattcagacctcggacaatattgcaggtgagagcgcgccttttccgcggcatgctacggtatagtaaaactgcgccccctggtggtgagccaattcccacggcttctgaagagaagggctccgcagatgagaagcatctggttctttgacagttccctcttgctgagatgaaaataaactactttttgtctcagctggtgcagtgaacatcttggttcctg

SEQ ID NO: 916849 - DNA, 4001 bp, Homo sapiens
ggaagaaccccatggatgaatacctgcagggcatgatgagcgaggccccagggcccatcaacttcaccacttccctcaccatgtttggggagaagctgaatggaacagacccccaggatgtgatccaaaacgccttcacctgcttcaacgaggaatcctcaggtttcattcatgaggaccacctccaggagctgctcaccaccatgggtgacagcttcacagatgaagaagtggatgagatgtactgggaggcacccattgataaaaaaagacaagttcaactaggtggagttcacctgcatcctcatacatggcgccaagggcaaagatgactaggccaccccagccctcgcgacaccctggcccccccgccagtcatctccccacccccggcacacactggtctgtaccagctctctgcccacgaccttctctcaggggatcctccctttgagggcttcgggtcccagctcccagtggagaaatcacgccaagagaagtgcagtgcaggactgaggcaggtgttctcactgtgaccctagggccctgggctggagtctctgacccctccagggaaagaccgccttatgaagagatgggcctccaggacctggaggtactgagagaaagcccccaagacagccattcctgggctgctccccaaggaggaagggaacctgtgtgcccccaggaggaagggacccttagtcctgagatccaataccatttcacatgcatccccacccaaacacaagttcaccaaagtcccctctcagaggacaggacactagactcctcccctacaccctgttgagacaccagcgcacacccacccagagcagccacccatcgtgggagtgtgctcaagaagccatctgtcccaggggaggcagaatctccaatagagggctgagcatggaaaaaaaacaaaaaaaagaaaaagaaaaaaaaagtaaggtactatttatttatctgtaaaattaactcagattaattcttcttaaaaatcaatggaaattctaaatttagtctgtgtattaaactgggacaaaactaataacagtattttaccaaggacacttggccttactccccttctgtcacacttcagacataaatcactgaatgaatccagcactgaataaatgaatgatccataatttcctaagacaattccaattttcatcttgcacaaatctacaaagctgatgcacccgcacagcacttgaactcctggtaggtatctttcaaggccaaggcagttcctcctcccgaatccagttccctccgcctggatcatgctcccaaggctccctcatttcattcaggtctcctgccaaaagacacttcctcacaaaggcctctcagaccgaccccttccccactcccaacttcacagtccactcccctagccctactacatttttattcatgaagatttacggcattttgttacgtatctatacattttcttgtctgtctcttccctagaatatacagtccagcaaggcaagggctggggtggcttcgtttgctgtgggatcccagcacctagagcggagcccaggacatagtaggtgctcagtaaatcacaaatctcttctccaaggctccaaggctagtttcccagagccgcagctctcttctttcttagcccggcccacctccgagtagccgcccacctctactctagctcggccacctctaccccagctcaggtcctcattcccgcaccccccggccgcagggacggcgcggcgcacccacctcccagaccccgcgactgcggttgggccccgcggcttcgctcaaccacgcacctcccgggccgctgcgcccccgccggccccgcctgcagccgttgggacccactaactgcctcgaaaagcctaggattcgactttgaatggtccgttaatgtggttacaaaacgtgactcggttcatcgggagccctccgtaagcaagacaagcacccacctgcggtcagagcaggggtccggctcgcggtcggggttgtccggcccctcccggcttctcacctgcgcaccgcacggtccagccccggcggctgctggggatccctccgagcgccccctcaggcgtcttcctgcgaccgggcgggggaactctttacggggaaacagttttgggacccaccacccttggcgccgccgttaggagggtgtgaacgtatctattttcaaagatacccgagcccctcaccgcctgcagcagggagatagtgcccgggctatccccgcgggcgggccggctgggctgggaaggcccagggcgagatcctgtaaagagttatttcgggccgcgcacggtggctcacacctgtaatcctagcacttttggaggccgaggagagcggataacttgaggtcaggggttcgagaccagcctggccaacatggcgaaacccagtctttactaaaaataacaaaattagggggcttggcggtgcgctcctatagtcccaactgcttgggaggctgagacaggagaatcgcttgaacccaggaggcggaggttacagtgagctgaactccgccattgcactccagcctgggtaacagctcaagattccgtctcaaaaaacaaacaaacaaacaaacaaacaaacaaacaaacaaaacagttatttcagactcaggagctctttttggatgaaaagccccgcggtcgttctctccacctcctggaaaagactctctaggttttcggctttggagtaataaagatcatcccctgctgccccattggtgccatccagggtaaggcccctgcagacagcacgaaggtgttttggagagattgttctcccctagcccaagcataaggcttaccttggaattacctggagccttaccacgacagcatggccttcagtacagggttgacaagtcaatagcaaacaagggccattaaaagggtctatactgcacttcttaaatgaggatatctcagtcaacaataaacatgtcaaaaggcatgcaactgaattgttgatcagggaacttcacattaaaactacatgagataccaattcgtgcccactagaatgactaaaacaaagatgggagttggggtgtggagaaaaaaggaagtgaatgccaaacctggggaatgtggaacattcagaactctcacacatttgttaatggggtacaaattgataaattgtttggcaatatttattagaacatatggctaccccacgatccaagaattccactcctaggtatacactcaacagaaatgtatacatatattcaccaaaaagtaggtactaaaatgttcatctcagcctggcctttgcaatcagtattttaaaagtatatttaggcaggatgcagtggctcatgcctgtaatcccagcactttgggaggccgaggcaggtggatcatgagatcaagagttcaagaccagcctggccaacatggtgaaaccccgtctctactgaaaagacaaaaactagccgggcgtggtggcatgcgcctgtaatcccagctactccggagactgaggcaggaaaattgcttgaacccgggaggtggaggttgcagtgagccgagatcacgccactgcactccagcctgggccagagagcaagattccatctcaaaaaaatatataaatatatatataaatatatataaatatgtatataaatatataaaaaatatataaaaatatatataaatatttatataactatataaacatatataaatatataaatatataaataatatataaatacgtatttatatataaattatatataaatacgtatttatatataaattatatataaatacatatataaatatatatttatataaaaattatatataaatacatatataaatatatatttatatataatttatatataaatatatttatatataaattatatataaatatatttatatataaattatatataaatacatatataaaaattatatataaatacatatataaat

SEQ ID NO: 916850 - DNA, 4001 bp, Homo sapiens
ccatagacagagtagcccagagggctgctggttgccctttttttttttttttttaagactgagtttcgctcttgttgtctaggctggggtgcaatggtgtgatctcagctcactccaacctctgcctcccggattcaagcaattctcctgactcagcctctcaagtagctgagagattacaggcatgcaccatcacgcccggctaattttgtatttttagtagagacgggtttctccatgttggtcaggctgttctcgaactcctgacctcaggtgatacaccacctcggcctcccaaagtgctgggattacaggcgtgagccaccgtgcctgacctggttcccccttttttttttgagatggagttttgctcttgttgcccaggctggagtgcaggggtgcaatctcggctcactgcaacctctgcctcccaggttcaagcgattctcctgcttcagcctcccaagtaggtgggattacaggtatacgccaccacgcccggctaatttttgtatttttagtagagacagggttccattatattggtcaggctggtctcgaactcctgacctcaggtgatccacccgccttggcctcccaaagtgctgggattacaggcatgagcctggtcgtctggttgcccatttttatggttattacttgatgatatgctaaacaacgggtggattattcattcctccccttttcggagcatatagggtaacttccccaggttgccttggcattcctaaactgtcatggcgctgatgggagtgtagcagtgaggactaccagaggtcactctcgccaccattttggttttggtaggttttggctggctcctttactgcaacctgttttatcagcaaggtctttatgacctgtattttgtgctgacctcctatctcatcctatgacttagaacatcttaaccatctgggaatgcagcccagtaggtttcagcctcattttacccagctcctattgaagatggagtcgttctggttcacacagctctgatagtaatctgctcactaagtgttagttgccgtgttctctgccacaactccctcctgttgcacccctgcctttgagtcctgctaaacaacagtattggaacccatcattttctctcatgcctttacccaaactgttaattttctgcaattcccttctctccacatttttccttctcagatcactgaagatcgtccagtcttccctgcccatcccttcccgaccccatcctccattatttgtactctcttagcatccagtgcacttttttcagtacttatcacacaacattataattgtttttttggtttattttgatcaactctactaaattgttagctcattttaacacgcccttatgccagcctagtccaacaaatctgaagtcagacaggttcctaaacctcaactttattcaaattgctttccttggcaaagaacatagtaagttggccttccagccaccaacccccttccctttggtctttcactccggaggctcttaccctagacgcaatgggacagggagcgggggatgggggaattcagctcaggcttttatgcaaagtcccccttcagcaaagaacaaagcttctggtacctgccctttggacagctgcgggcaagctcagcctcggtgagtcttggtggccttgacagcccccacttaacacactgtgctgattaagagagacaggagggcaagtttttcccttttttaaagaaatcatcctcgacatggactacctgccttgaagcatgatctatctagttccacttacctcctccccgacgcccccattctgactcttctccagagtggaggtctgagaagaaaaaaagaaatgccgcatttcatctccttgtttcacacccaggagtacttctactctcaacagttggagtctttgcattgtgaacaaaagtcaggttgtgtgggagcaaagccagctgctcccagtgcagacccaggagcagagtgcagaggagaatgagtcagagttgtgtcttcaaaaattacgtaattgcgatttgctaagagtttactttctgtttgggaaattggaaaagagaaagaaatcttacttttatttcttttttttttgtttttttcgagacagggtctcactgtcacccagactggagtgcagtggcacaatctcggctcactgcaacctctgcctcctgggttcaagcgactttcctgcctcagccccgccgagtagctgggattacaggcgtgtgccactacagcccggttaatttttttgtatattttagtagagacggggtttcaccatgttggccaggctgatctcgaactcctgacctcagagttattcgcccacctcggcctcccaaagtgctgggattataggcgtgaaccttcgcacctggccaggtttcttgaatgttaggtttgggaatagaaaggaaaatggaaaactttagactttttttttttttttttttgagatggagtctcactctgtcccccaggctagagtgcagtggcatgatctcagctcactgcaacctctgcctcccgggttcaagcaatcttcctgcctcagcctcctgagtagctgggactacaggtccgtgctaccacacccagctaattttttgtatttttagtagagacggggtttcatcgtgttagccaggatggtctccatctcctgacctcgtgatccgcccgccttggcctcccaaagtgctgggattacaggcgtgaacgacagcacccagctactttagactatttatgtccataaatgttagtgctggaacccaactctaaaaactttattcctttggaaaacatacctccctctcacctcaaacaaacaaacaaacccaaacacacaagatgggcatggggtaatgttgaaagacatgacaatatcatcattcctgatttaaaagttggaaacgtggtgaacctagaagtatttgttgctgggtttgtcttcaggttctgttgctcggttttctagttccccacctagtctgggttactctgcagctacttttgcattacaatggccttggtgagactggtagacgggattaactgagaattcacaagggtgggggggtgtcccccccaggaggggtgggtctaagggtgatagagccttcattataaatctaaagactccaggactttagcatttttctggactgagctggtttcctcctgttattgtggaggcgactcacttcatcacaacttcttgatacttttgctgctggaggtcatatttctctaagatcttccagaaaaaagtcttaaagccatcttagccttttttccagtccagctcttaaatttttcccactcttctccaataatgacatgagtgtggatccagcttgtccataaagcctgccttgctccaaagcatctgactgtaaagactggtcacctatacctgtgatttgtgggcctgaagaaaaccatccatccttgcaaatgtcttctgctgagatgcctcacacagagactggtaagaaagaaatttatccttgaaagaaaggccaagttccttaagagaaaagggaaggagagagggttaagggatcatttcactcttgagcaataataccccattactataagcaagtgttaatatcacctaatcctctgaaaaaacccctgtttcaattgtaacttggtggcacctgccctttgaactatatcccaggtctcaggagtgtgcactgagttgaaggacacagaattcggcagttgaacagtatgcagtaaatttgagaacctatgggcttaggcatggtggaaacaaaaatgtatcattggccgggcgtggtggcttacgcctgtaatcccagcactttgggaggccgaggtgggcggatcacgaggtcaggagatcgagaccatcctggctaacacggtgaaaccccatctctactaaaaatacaaaaaattagctgggcgtggtggagggcacctgtag

SEQ ID NO: 916851 - DNA, 4001 bp, Homo sapiens
gtgcagtctgatctgtaccccagactccacggaagcccactggtggtggtggagggggtggtagtttgtgtcttcactgctgggtggctctttgagtctcttatctctcaggaccatgtaacctactggatctactcactgcatcctggccccatttcagtcttcgtttattaaatacagttctgctatccctaactcccgcgcaggggaagaaagtacttactctgaacccaacatataagggcgaacccaacatataagagacatttcttagtggggagaaccggtcatcttcaccttgcctggaataattcagccgggcgagacattttccatttctaccttggggcagctcaatttttatacctgaggccaacttctacgccattcccccccaccccaccacccaaaatcccttcaacctttcatatcttaaactcctttcctttcaggtcgggcagattaggcagcaggctgggagcttcagcaggagaagtgaccttgcctgcagcctcccagatgtctcagtcccagctaagcatcggtaccccggagggccctgccagtgcaatgctctgttaaatctttttccgtttagtaaaaatctcttctgtctcctctcatcattcactatctttgagagccttttcttctttagtctcataattttccatccctttcttattttcctacattttctttctttctgctttgtagagatgggatctcactatattgcccaaggctagtctcaaactccaggcctcatgtgatcctcctgccttggtttcccaaatgctggggttataggtgtgacccaccacacctggccccttatttttagttaaatttatcttggtaaaaaatgcctttcttgctgcgcgcagtggctcatgcctgtaatctcagcaccttgggaggccgaggccggcggatcgcctgaggtcgggagtcgagaccagcctgaccaacatagagaaaccccgtctctactaaaaatacaaaattagccgggcccggtggttcatgcctgtaatctcagctactcaggaggctgaggcaggagaatcgcttgaacccgggaggcggaggctgtggtgagctgcggtcgctccattgcactccagcctgggcaacaagagtaaaactcaatcagaaaaaaaagaaaagcctttctccctgcaaataatgcatatacaacactcaatattttagtatgtcctgcactcacgattttaaccctaataggaaggacaactggaattctttctccttagcatccacgaaccccatatgttataggacaaacagatggccagaccctggcctgtgcctccaaacacagaccttttcaaggtctaatgcttccagagaagtcttcacactggctctgagacccacacttgtaatccatacaaccaagcagcccgatcctctaaacactcaaccatctcgtcctcagtggcatatggttacctaaaataaacctgagaagcaaacacaacttctccgggtgactttcctatgataaggtgaacagaactgtatgacattcaaagagaactgatgaagcggcagcagtgcaggctagagacgaaatgaaaaggccttaagatagcttggtgacttaggagaaaatagaacaaggagattaccattaatatttgcctttctgagtgtatcccaaacaagcaaaaataaccagtaattatatcattcttaccttctgtgtccccatcgctgtaatctaattcaagtcttcaagaaagatctaggggtgattccagaaacagctttttcagccaacaaaaccttcaaaatgtccttctcagcagcaagttttctccacgtcctcaggaaggatccaaagtcttaccattacagcatctctgggtctcgctgggatcatgactatttataatctccgcaaagggtggagcctgaaagggcgacaagcccccagccccaccccaccccaccccacccccctgaagcaatcttgtgatctctcggaattctgtgttatcagaactacccccgcccccgccccacagacaataacgccctccctcccccctctcttaaaaccacatccttccactctctccaccctgggtttttttttttttttttttttcaaaagctcatccttactccttccctcttctaatagcagctagagcctcttagtttcacagacaaaatactaccagaaaagcctggagggagggcaaatacactattttatgctctcgcatctgcttgggattaaaacaatctacagagagattagaataaatctatccatacaaaacgaagtcaagtgggtgctactatcagagatttaaggttgttagaaagagtgttagtaagaattcttgatcctatgaatttataggctgggtctacaatcttttttttttcttttttttttgagacggagtacacaatcttaaaggggagggaaagacagcctgagagaagaaaatcagggaaataattttgccagtgttcctttcttcgcataatctcacctggagggaagaaaatctgaatttctaggagccagaccaactatcagggcagtaggaataagaggttcaactgtttatggaatacaatccatatcctttttttttttttttttttttttttgatatggagtctctctctgtcgcccaggctggagtgcagtggtgcgatctcggctcactgcaacctccgcctcccgggttcaagcaattctcctgcctcagcctcccgagtagctgggactataggcgcccgccaccacgccccgctaatttttgtatttttagtaaagacggggtttcaccatattggccaggctggtctcaaactcctgaccttgtgatctgcccgccttggcctcccaaagtgctgggattacaagtgtgagccaccgcgccgagccctatatttaataaggcatttgccatatcacccattctgaattctgcatcactttctgctagtctcaagcttatagcatctagaaatgcaataaataccgaattcaattaagcaggtatttgccgaatacacgctatgtatcaggtactctccaagaagctggtgattcttcagtgaataatagaaaaaaaggccgggcgcggtggctcacgcctgtaatcccagcactttgggaggccgaggtgggcggatcacgaggtcaggagatcaagaccatcctggctaacacggtgaaaccattctctactaaaaatacaaaaaaaaaaaaaaaaaaaaaaaaaattagccgggcatggtggcgggcgcctgcagtcccagctactcgggaggctgagacaggagaatggcgtgaacgcggcaggcggagcttgcagtgagccaagacagcgccactgcactccagcctgggcgacagagcaagaatccgtctcaaaaaaaaaaaaaaaaaagaataataggacaaaagagttctgacccacaagtcatttatagtgtttcccttcttccctttttataaagtataaaaagggactagggcaagtaattctcacataactggaaaagattattaatatcctattagttatggactgtgagtttcttgaaagaaaagtgttacataagtatctgattactaagctatacaagaaaactgaacaagctaagcaggagaagaaaataggaatgagaactgagggagggataatcggggagagagaagagtggttccaggttgagagtaaacaaagcaaaacaacttggtttgtgtttaaacagctgggtaagtgagagatagtatctaggcttttttggaggaggaatatcaactatcaaattcctaatgcccattcatttgtagcttgcaaccctttcagtactggaggtggcagggtgggtgaaggacgcttggtaaagagataaactttttcccagtggtgaattggagaaagtgtatcttcctttagggttttggttgagggcctagaattcaaattgatactgctgga

SEQ ID NO: 916852 - DNA, 4001 bp, Homo sapiens
atgctttcttcccaacagtctattgtctctatactgtattttctaaaccttggaatacagcttcaaaatttatgaaatctgctaaaaaggcacataaagaaaaaaaaattaccaaccacttgataaagggatgtaactaaaacaccaagagcagcaaacaccattccaaggaaattaaacttcacatcgtaataagaatttaggattacacctaaagttataggaatctgtaacgaaaaagaggtaaatgttgttcagattaaattcaagagacaaaaatttagtattcctttcacaatgtcttacaaggctaatgataaacacataactgggaaacaatgaacctgtataaatgttttctgttttgacttgggaaaactagttgttaatcctatttcctaaacgtgaaatatgacaaatctatattgatattcacatttaattccattctaaatttgtggtaaatatattgcactttgcaagaaaataccacatgaatacaaaggtgagtaaatggatccccaaactagtgtctaaacagcataagcataaatataaaacaataaaagcataaagaccttaaatataaggccaggcacggtggctcaccactgtaaccccagcgctttcggaggccaaggcgggcagatcacctgaggtcagagttcgagaccagcctgattaacatggagaaaccccgtctttactaaaaatacaaaattagccgggcgtggtggcgcatgcctgtaatcccagctactcgggaggctgaggcaggagaatcgcttaaacccgggaggcggaggttgcggtgagccgagatcgtgccattgcactccagcctgggcaacaagagtgaaattccgtctcaaaaagaaaaaaaaaaaaaagaaaaagaccttaaataagttactaagtgctaaaattgagtccacctccttttatttaaagatgcagacagctctaaagtatggtgctgcagacgttttgagacctactttatgctacatcttttcacgttttatcatacacgatttgattcccctgggggagaaaggctgtttttgtttgagcttttgcagatattctgataacactggactgtaccacccaatacagctttttttcttatcgatcacagcatttaacgatttccatcaaatggcagctactaaaattcacacatgcccactcttctgggctgacaagatggccttttccccctccctaaaataagcctaaaagttcacatgcccacagatgactcatttgtggatttcaagatgaagggaaagaccagtgtgcgttcgaatttcccggggccagtgcaggaggtgggtcgggagagcggcgccttgggaagctgaagctactcaccagcgtgagctggattctggtggagaaggttttctggtagcagaaggtctggatggctatgatcaccggcgtggtcatggccttggccagctgataggtgcctatggtgttgttctgcagagaaaggttagtgaagaccacaaagccacagaagctgagggccaggaggaggagcctggagggcggcagacttttgggggcaaagatgtccagcttctggcagatatacaagcccagccaggtgaccacgaagtgcaccagggtcaggctcatgttggggaagccgtggtacacataaatccatttgttgaggaacacaatgcagatggacaccagcaggttgaacaggagcccggcggcgattcgccagtggccccgcactcggtccaccagcaatgccatgatccccgcgaagctggggccgtctagcctcggaaggggcgccgggcctgtctccggctgcccttctactccaccgccgcgtcctcgcagacgccgacctcaccgtctgacccaggagtggcatgcacagatcaaccccgggcgagtagcactcttaacagaggacacacaccccgccgccgccctgtaagccagctaggacgccgcagcacgtcccacgccccgctcatctccgcccgcagccacgtgactcggggctccagtgcttccgcccccgagccgctggctgaacggccgctaccctgcgcaggcgcgctgagccttgggcgcgcgacgcttgcgtctttgggtcctatcctctgggtccccgacccccttggtcacctaacgcctacctgactggaccaatctaggacccctttcttgatgtttgtttcctgtgtgtcattgacccgatttgctagacaacttctctctggctgtgcagacactgttagccaattttacgtattaaatgctgagcaaatttagtagccctcgccagaggggggaaagaacttattgaaagcatgtttttattttttatttttggaaaaagacattcaaaatttactttccaacagacagcatcatcgggtataactacaagggtttctccttagatcatacattcacaaagcattattagctcaacagtgagaaaatgtgttctctaaagatgtccccttgacaatgtaaacgagtgctactgtgttcacttacaactcgagaaaaaaacgtacaacctggcaaaaccgtatatatatacagctgtctctaggggtgcatacaaatatatatatatgttttggatcaggtcaggtgcaatgactaagagatagaactttgagtaacagtcttgatcgacagtaaggtccttcacacagaagtcaggttcttcctttctccttcctccttaagtcgataaagaaagattatatattgtagatattacaggtacaaaaggagatttttaaaaaaggaatcacaaaaacatcttgaatgtccagctgttcctgccaatacatcaattcttagttttaagacagagtctaggattaattcagcagtcataaaattaaaaagagagactgtggtacaaaaaatttaaaataaatgaggaagtagggcatggtggcgtgggcctgtagtcccagctatttgagagactgacgtgggaggattgcttgagcccaggagttggaagccgggatgggcaacatagtgagacccccatctctaaattaaataaataaatgaggtagggaaattaaaactttcacacccaggacatgcctgttccaactttgtagccttcatgcaatgctcaaggaaaaagtcttcataattccttggcataagtcacaccaagaaaagtttttaaaacttagtatgcgaacctgtgataggcaacacgcccttccctgagtttcctctctagaatgaaaacccagttcttcaagagtaggcactgaggaactaaattaagttgcctgaaatttcccactcaggtgcccaccacttctggtgttcaggaagagaggcatttgggaattgtgaggagcacattggcactcttggggctccaactgaactgtatttaaataagcagcaacacacacattgactccctaaggactcaaaggagtccaattggctgggtgcagtggcttatgcctgtaatcccagcactttgagagatcgaggcgagtggatcacttgaggtcaagagtttgagaccagcctggccaacatggcaaaaccccgtctctactaaaaatacaaaaattagccaggcgtggtggcaggcgcctgtaatcccagctactagggaggctgaggcaggagaatcgcttgaacccaggaggcggaggtttgcagtgagatatcatgccactgcactccggcctgggagacagagcaagaccatgtctcaaaaataaataaataaataaaaattaaaaacaagtccatttgagggcatcctaattaagagtctaaggttgaaggaattttgtaattccacaaccttagtgggtttctgtgctgtgttttttaaaggacattcaaaaaacaaggcacaacaaaagacaaatacagagtgggggacatgcaaaacaagttcctaaatagatgacagaccttgtccatttacccacatacggttacgatggaagcataca

SEQ ID NO: 916853 - DNA, 4001 bp, Homo sapiens
ggcactgggagcggcgtgacgcgggtaccgcgaaattccttttgctgccatatgcacttgtgccttctctaactacagttcagcacaaacctcaggcgggcgatttggcaggcaaacggtgcccaggcagccgggtaacctactgggtcccagtgggtgctggggagccccatgcgccaggaggtggataatttagggggcaaggggctcgcacaagggcgaagatgcgctctcctcccggcaccgacccacgcgtttaaaggcctctgcggcaacgtttagggacgcgaactaggtgccgggggttggggaggaggtgggactggaagcgagagcagtctgcgcccaagaccgcgcaagaggtggccttttgttcgctggctccagcacatcccggctctcgaaaaaacactacctctgtcccctgccaccctctgcattttagaaaatcctcttcagggcaggaaaggacagtgagtcactgcaagcatcctttagtaatttctccccgcgccctcctacttccccgcgttacagaggggcagagcaccaggaaggacggcaaacatgccccggtttagtggtggtccgcggccgctacccagccggccgcacgcagcaccccccggacatcacacgatctcctctgggccttgcggacacaggaaattttcaccaaaggccggggattcaaacactcccagaacacggtcgcgccctcgggtcagctgcgctctccctccagacgtgcgtggttcctggctctcgtaaaaatggaaccagatctggtaccacactctgccacagccacaggaaaacacaccaaagtcacaggaaaacaaaccaaaaagtaagccacagcccacgcaaaggtgaactcgggggccctggcgcttcctcccgctgccgcgtgcgttcgggaagcacaggagacctggacttttcctctcctaaaagcaacatccgaaagcatcgggcacagccgagctctctctgctttcacgcccgcagagatgatttctacgttacctcctcctccgacatctaaatctccccttgccgctcgcccagccctccccgggaacggataatcaccttacctccggaaataaagggaaaggtggcaaaaggcgatgtggaggtgtccgcccttccggggtttttaccctcggcagtttgatgtcctttgtgtcaaggtctggctgcggaggccgggaaaatgtggcccccgtcagtaagggttgggcagggagcttggcgtggcctggcggatttcggaggaaggtgaagggcggaggctcctggcgaccttctggcggagtggcgtggccgccccagtccgcgctcgcctggctctcctcctttccgggccgattgcatcagaatctcccctcaccaccaacccccactcacactctgctcgccggcctcgcacttacatcgacatgcaccggcgctgagggtcacgaatcggagtcattctcctactgggggacgcgtggcccttccgcaaccatggcttgtgatggtttaacgcggacaggccattcctccccgtcccgcgcgcggtctcctcccctcctgtgcgcccgctctttaaccaaagctgcgtgtcagtgagccgtgccggtcacatggtgtcactgctggcggccgcaccttgctgcctccctcttgcagctctctgacgatgcagcgaccgcggctggcggagattgagcaacggggaaagggtgagggaggggttgcggggcgcgcgtgtgcccggcgcactgaagctggcaccgggagcagaggctgcgcgccgccctggcacctgcccctctccctcccggggcccggcggcgtgttcggaacccagctgcggctgcagctggagaatgagagcccttagggatgggggtggggcggctaaaggggcaccggcggaggacaggagggctgtgcgttccgctggggcctgcattttgggtacgccagagccccgccggggccgaaggagcgagggagttgcattgtgggaagggcgcagcatgaggatggccgcgggagtggcaggtccgagcgcagcccggagagccgcgggcagcgcctgggactacgggcagcgttggagcggagggctggccctgggcacagcctgcagatggcccgggttggcgggaaggggaccgaagtggcaggggcggcggggagctcgggcacctttaaaaaccctttgtccctaacctgaagcgggaggcacctcccctcttccggatccagcacccgcagacctggtcagcccttcctgagatctgccctgtggagctctgctttggggactgggtgtgaggtgaaccagaaggatttgctgagcaccgagaaagcaccggcctaggcgcaaagagccgggggccagctcttggagggcctggagaccccacgtggtcccgaccgaaggacctggtgcgtccaggttaacggagctggggcgctccaagtccgggggacgagggagcggcatggaggggagcaggggcaactgggcctggttcccttttttcccgcttactctttgtttcagacacagccccctttcactggctgggcacttgcttgcagaggagttgtgtcttaaaatggcgacaggaaatcccacctgcgcctcagccaattagactgtcatagcgcgaatttgcagggtggaaacgcgagctttttattgatagggaaggttcagtctcctgttcatggttcatcaaaacaggaaagggaaggtgaatcataattcaaaaattaactacctggagcgtttcaagtagacagtagtcattgtatttgggtgaattttgctttttcatcaccactggaaaagcaagatgataaccaaatttgaaactcatcacggactaaacttcttattcccttcgaatggcagtaaatggcctttattagttcaacagtggcttcctgagaatcctatttagaaggcatgctcttgagaaatactgaaaaacagaaagttcagagcaaaccaaaagggcaaacacatgggcagcctagctcagacagacctgcattcaatttcttcctctgacacttactgcttccctcatctgctttacttttgtcctaatcctgttttctaaatttgtgaaaaaggggagaagagtacacacaacatagcaatattctataggtcatcaaaaagttggttctttctaccttactagaggaagctaatttattgtgaaattaatgattttaagtagtgtgcaccttgcctggcacaaataattcttatcaataaggtaagaaatctgaataggtaaagtagatgaactgtgagccatagcttaataggcctgttggaatatttaccttattaaaggcagaatgtgtattcatcgctgtttggagattatctgaaccaagcttgtcttttggttccaattttaacttacttgctagtttctgtatatcaaaacgactgcagttatttagcactttttgaattggaatcaacagttatgaactgagctcctatgatatggcagctattgtgctaaggactttacatgtaaatatctcatttaaagctttcaatccctcagttgggtattatcctctttaagaaaacaagtacaaagttgaattggccatgttcacctaagacagtaattagtgaaggggaagcgattccctttcaggtctgaattcaaaatccgtgctcagtcttcacagtggtgctacaaccatttgcaatcagacattcttgggcctagagttagaaggatcttcaccccttctctggattttagttgacaacctagaaccagagtaaacatcaacatggaggctgctgttttctcaaattgaggccagggatgtctagatgattcctctattcactgtgtgcttactgagagacaaacagcaggttaaacacttcacagatggtctctcgtttaattctcatgacattcctgatagggcagcctatcctaatccctgactca

SEQ ID NO: 916854 - DNA, 4001 bp, Homo sapiens
aatatgtgatcaattttcagaaataagtacaacaatatttttaaatttaaaatcttattttaaatctagggtcagtgtctttttttaggttattgaagttaatcttttaattttacttaaaatttttttatttcaatagattttggggtatcagtgatttttggtggttatataaatgaattgaaagtgatgaaatctgagactttagtgcacttgtcatctgagtagtacacattgtacccaatctgtagctttttatctggcatcctcccttccaacctctggcttctgagtctccacagtccattatattactctgtgtgcctttgcatacaagatgtctttttcgaagtctgtcacacattcttcaaagtacttctgtgcacatacttctcctacctcctcaccacctttcatagatgtatattctcccagagactaaaaagatccaggtagtttccatcaagatatattttcagaaaagtatttttaaaagattacatagtcacagaatttcagaggtaaagggaactttactgatcaactttctctccctcctctggtagatatgtttaattcaatacatatggaatgctaacactataccaaatacttcacattcattatcttcattaaatctttaccatcactcagtaaagtgggtaccaccaacactaccaccagcatcatcattcccatttagcaaaagaaaaaactgaggcttagagatgccaaacaccttgcccaagattcctgggtgagtaagctgaggcctgatatttatatttgactcagagcctaagcccctattcaccaccttccatcacctggagtaacaacagtccaaaatgtgaaggataaacaaatacttatgaaaatgccagtgaggtgatcagtgaacacttctcccaagaggtggaaaagtggcatcagggataggccatcacaagtacacaggatttcagtaggcattctggactggaatccaatccacacagatattgaagcagaaaagtgatagggagggaatagggtgaactgtgagaaagaaaatatcaagagaaaaaattggaaagagatgagaaggcagattgtgaagggtcctaagtgtatggctaaggaatttagactgtatttgtgtgcaatggaaaccctcagaggtttttaaaagcaaggtcctttaacaaaatgtgaactgaattttagaaatataaacctcatgaaagaatggagatttaattaggggagcataacttgatatggaggagagaccaacaggaaagctgttccacctcagtaactggctgtttcactcttaaccatatgttgtgcttgcatttttctccaccgcccactcccactgcccctaggttgttcaaggcacctctatatctgtttcatatgtctccaagtctaggtaaggtgacagggacctgaacttgggcagtggaaatggagacaagaggacaagtgtgaggggtattttcaagggcctggtcactgctcaaagtgggaagggcagtacgagaaggagaagcagagaagaaaaagactctcattttcaaacttaggagaaggggaacagatgagatatagaacggaagggatggccaataatatcacaaagagatgaacaagatggcctgatcaaggtctcaaggtctcgatccaacaagtatttattaagcaggtactatgtgctggacattagaggaacaatgagtaaaatcggtttttgtccacaagcatcacccagagtaaagaaaagagtagcaatagtcagatatcagaaacatggtgctcctttcattaaatggccttaattcatgaagcatcataaaaaatatacataaacaacatacatataggtttaaagctccaaaacacctttaaaatctattcatctatctgttcaattatattacagtcaaagaagagtgcaataagtacttgctgttccttcttcctgttccttccgctggccttcttccctcaattatggaaatagctgatcccttttcatcattcgggtctgaggacaaatgttataccctcacaccgcccctcccggtgagtcactctatttcaagcatcctcccccatcacatgatcctgttttatttcttcattgcactaagaatacctgaaatgtatatgcctacatttatatagtctatttccccctgagaacggaagcttcatagaaggtgaaacaaatcttgttagttgctgccagtcgcacagtaagccctctgtagaaaatgtttattggccacatttttttaaaaagcgaataaacctcaagattaagacctcaaaccaaactattccagtttccaattgcttacagcgacatactgagaaatcgagtgactctcaagagaaaggccattttgaggctggggtcgaaccaaaatccagggggtccacaccaggtcagtaccccggaattggctgttttgcaagatttcgggagtaccaaattggcatgagacatttgacaacgaggccagccatgcaccgagctcaggttttatttccgttgtccttctgacgtcagaaaaagcacgagttgctgcacagtttcttttatcaaggtgacaaattacaccctcgctgggccctgcattctgcaaaccataaatttattttcctcctcccccttatattgaaaaatgtaaaaacccactgcagagaggtcaaaaccccttccaaacgcaaataaataccgttttctagcagaggcgtcttttttcacttttgctacacacatcaccgcggattcgtccgagaaagtacgtgatcctggcggcagttaggtttctaacagagaacgagggtttgtacaaaccccgggtccgcgccgcagagcaagacaaaggactctgaattgtagcaccaccttccccagcccaaggcagcctgtgaaaggcactgggagcggcgtgacgcgggtaccgcgaaattccttttgctgccatatgcacttgtgccttctctaactacagttcagcacaaacctcaggcgggcgatttggcaggcaaacggtgcccaggcagccgggtaacctactgggtcccagtgggtgctggggagccccatgcgccaggaggtggataatttagggggcaaggggctcgcacaagggcgaagatgcgctctcctcccggcaccgacccacgcgtttaaaggcctctgcggcaacgtttagggacgcgaactaggtgccgggggttggggaggaggtgggactggaagcgagagcagtctgcgcccaagaccgcgcaagaggtggccttttgttcgctggctccagcacatcccggctctcgaaaaaacactacctctgtcccctgccaccctctgcattttagaaaatcctcttcagggcaggaaaggacagtgagtcactgcaagcatcctttagtaatttctccccgcgccctcctacttccccgcgttacagaggggcagagcaccaggaaggacggcaaacatgccccggtttagtggtggtccgcggccgctacccagccggccgcacgcagcaccccccggacatcacacgatctcctctgggccttgcggacacaggaaattttcaccaaaggccggggattcaaacactcccagaacacggtcgcgccctcgggtcagctgcgctctccctccagacgtgcgtggttcctggctctcgtaaaaatggaaccagatctggtaccacactctgccacagccacaggaaaacacaccaaagtcacaggaaaacaaaccaaaaagtaagccacagcccacgcaaaggtgaactcgggggccctggcgcttcctcccgctgccgcgtgcgttcgggaagcacaggagacctggacttttcctctcctaaaagcaacatccgaaagcatcgggcacagccgagctctctctgctttcacgcccgcagagatgatttctacgttacctcctcctccgacatctaaatctccccttgccgctcgcccag

SEQ ID NO: 916855 - DNA, 4001 bp, Homo sapiens
cctggtcactgctcaaagtgggaagggcagtacgagaaggagaagcagagaagaaaaagactctcattttcaaacttaggagaaggggaacagatgagatatagaacggaagggatggccaataatatcacaaagagatgaacaagatggcctgatcaaggtctcaaggtctcgatccaacaagtatttattaagcaggtactatgtgctggacattagaggaacaatgagtaaaatcggtttttgtccacaagcatcacccagagtaaagaaaagagtagcaatagtcagatatcagaaacatggtgctcctttcattaaatggccttaattcatgaagcatcataaaaaatatacataaacaacatacatataggtttaaagctccaaaacacctttaaaatctattcatctatctgttcaattatattacagtcaaagaagagtgcaataagtacttgctgttccttcttcctgttccttccgctggccttcttccctcaattatggaaatagctgatcccttttcatcattcgggtctgaggacaaatgttataccctcacaccgcccctcccggtgagtcactctatttcaagcatcctcccccatcacatgatcctgttttatttcttcattgcactaagaatacctgaaatgtatatgcctacatttatatagtctatttccccctgagaacggaagcttcatagaaggtgaaacaaatcttgttagttgctgccagtcgcacagtaagccctctgtagaaaatgtttattggccacatttttttaaaaagcgaataaacctcaagattaagacctcaaaccaaactattccagtttccaattgcttacagcgacatactgagaaatcgagtgactctcaagagaaaggccattttgaggctggggtcgaaccaaaatccagggggtccacaccaggtcagtaccccggaattggctgttttgcaagatttcgggagtaccaaattggcatgagacatttgacaacgaggccagccatgcaccgagctcaggttttatttccgttgtccttctgacgtcagaaaaagcacgagttgctgcacagtttcttttatcaaggtgacaaattacaccctcgctgggccctgcattctgcaaaccataaatttattttcctcctcccccttatattgaaaaatgtaaaaacccactgcagagaggtcaaaaccccttccaaacgcaaataaataccgttttctagcagaggcgtcttttttcacttttgctacacacatcaccgcggattcgtccgagaaagtacgtgatcctggcggcagttaggtttctaacagagaacgagggtttgtacaaaccccgggtccgcgccgcagagcaagacaaaggactctgaattgtagcaccaccttccccagcccaaggcagcctgtgaaaggcactgggagcggcgtgacgcgggtaccgcgaaattccttttgctgccatatgcacttgtgccttctctaactacagttcagcacaaacctcaggcgggcgatttggcaggcaaacggtgcccaggcagccgggtaacctactgggtcccagtgggtgctggggagccccatgcgccaggaggtggataatttagggggcaaggggctcgcacaagggcgaagatgcgctctcctcccggcaccgacccacgcgtttaaaggcctctgcggcaacgtttagggacgcgaactaggtgccgggggttggggaggaggtgggactggaagcgagagcagtctgcgcccaagaccgcgcaagaggtggccttttgttcgctggctccagcacatcccggctctcgaaaaaacactacctctgtcccctgccaccctctgcattttagaaaatcctcttcagggcaggaaaggacagtgagtcactgcaagcatcctttagtaatttctccccgcgccctcctacttccccgcgttacagaggggcagagcaccaggaaggacggcaaacatgccccggtttagtggtggtccgcggccgctacccagccggccgcacgcagcaccccccggacatcacacgatctcctctgggccttgcggacacaggaaattttcaccaaaggccggggattcaaacactcccagaacacggtcgcgccctcgggtcagctgcgctctccctccagacgtgcgtggttcctggctctcgtaaaaatggaaccagatctggtaccacactctgccacagccacaggaaaacacaccaaagtcacaggaaaacaaaccaaaaagtaagccacagcccacgcaaaggtgaactcgggggccctggcgcttcctcccgctgccgcgtgcgttcgggaagcacaggagacctggacttttcctctcctaaaagcaacatccgaaagcatcgggcacagccgagctctctctgctttcacgcccgcagagatgatttctacgttacctcctcctccgacatctaaatctccccttgccgctcgcccagccctccccgggaacggataatcaccttacctccggaaataaagggaaaggtggcaaaaggcgatgtggaggtgtccgcccttccggggtttttaccctcggcagtttgatgtcctttgtgtcaaggtctggctgcggaggccgggaaaatgtggcccccgtcagtaagggttgggcagggagcttggcgtggcctggcggatttcggaggaaggtgaagggcggaggctcctggcgaccttctggcggagtggcgtggccgccccagtccgcgctcgcctggctctcctcctttccgggccgattgcatcagaatctcccctcaccaccaacccccactcacactctgctcgccggcctcgcacttacatcgacatgcaccggcgctgagggtcacgaatcggagtcattctcctactgggggacgcgtggcccttccgcaaccatggcttgtgatggtttaacgcggacaggccattcctccccgtcccgcgcgcggtctcctcccctcctgtgcgcccgctctttaaccaaagctgcgtgtcagtgagccgtgccggtcacatggtgtcactgctggcggccgcaccttgctgcctccctcttgcagctctctgacgatgcagcgaccgcggctggcggagattgagcaacggggaaagggtgagggaggggttgcggggcgcgcgtgtgcccggcgcactgaagctggcaccgggagcagaggctgcgcgccgccctggcacctgcccctctccctcccggggcccggcggcgtgttcggaacccagctgcggctgcagctggagaatgagagcccttagggatgggggtggggcggctaaaggggcaccggcggaggacaggagggctgtgcgttccgctggggcctgcattttgggtacgccagagccccgccggggccgaaggagcgagggagttgcattgtgggaagggcgcagcatgaggatggccgcgggagtggcaggtccgagcgcagcccggagagccgcgggcagcgcctgggactacgggcagcgttggagcggagggctggccctgggcacagcctgcagatggcccgggttggcgggaaggggaccgaagtggcaggggcggcggggagctcgggcacctttaaaaaccctttgtccctaacctgaagcgggaggcacctcccctcttccggatccagcacccgcagacctggtcagcccttcctgagatctgccctgtggagctctgctttggggactgggtgtgaggtgaaccagaaggatttgctgagcaccgagaaagcaccggcctaggcgcaaagagccgggggccagctcttggagggcctggagaccccacgtggtcccgaccgaaggacctggtgcgtccaggttaacggagctggggcgctccaagtccgggggacgagggagcggcatggaggggagcaggggcaactgggcctggttcccttttttcccgcttactctttgttt

SEQ ID NO: 916856 - DNA, 4001 bp, Homo sapiens
aaaaatatagacatatataattgtaaactggattgaaatatctatcattacacacaagactgctttaacataaaataccctccaacagcatagctctgatacaacatctttacttaatgtataaatattaactaggagttgactttcacaccagctatcttgtcattacaacaagataatcggatactctttcagagattacgcaccttctctaaatgctatagcaaattaaagcaatggaagcagagtcctaggtaactccctgaacccaacccatgcaagccgttttttcaaaagtgtcacaacttctcccaccttttcagagcagcttgcttggtggggtaggagtagttgaagtcgctgttggaactgtagctgctgctgtcttcatccggggaaatactgaatcgtcccatttcggccttcttcatgctaagcactgggaggaatcgggtgcagctagtagcgctgggctccttttgtccttggcggtgggtgcagcggcccgcgagtcggcctgcgaaagtagaggcggcgcgtcaggaccgcagcgccagcccgccgcggtcacgtgacgccgcccggaggcgcagcgcggctgattcatcccaggccaggcgagtggaaaagtaccagccgcgcgcgaggggcgggggcgcgccgaggggcggaaaagtacagacggcggagccgcggggagaacaaagatgatgccaccgctgtgttgcggccgtcgaggccccctactccggcagatttcagtatttcaccctctctattgtccctcgtcggagtggagggggcgagggggggttctgttttgctttttcccagtcgctccaaacttgcacaggcactcagggcacacatccagccccgaccctggctcgtgtgcatgcaacctaggcgcacggctttccgtttctagcatttggaacagcaatgctgcgtaatctgtcctttactgcccggagtccccacacggagaaatgcctctgccgcagacagccttccccaggaggcggaaagggccgacactactcctctctcgaggggggcgaacgcccgggccccgggagctgggggtttgtttacacacgcgcgccagtgccctcaagcacacccgtccacaggcagctggcccgcgagtgctacgcccgcccagcccctcctatgtccggaaagaaaactgatgcaatatcgatcgtcgattgtcaaatgttcccaactcgtcttccccaatcttggcctctcctgtaatacatgcccaagcccacctccgccgcccccagattcctggctccctggacttaattttttttttttattaaatgcaaatcagtcacaagacttgccgcagcagagccgctggccgggctagctcccctccccctaatgggaagatgcggctccgcaccgtgcaggcacgcggcccccgcccagcgcccgctctcctacccacgtcgcgggcgcgacacccgcgcggcgggccagggtggaaggctggccagcccaaccgacaacgcccgcctcgaaaggaaacggaccccgcggccgccttcccgcgcggcccctcccggaagcccctcccccactctcgcccgggccccgcgcccttcccacagacgcccccccgcacgcgttacctcggtggtctctattctcacgcagacgtcttcagtgggtttctctcagtcaaatacaaatcataaaaaacaaacaaaaaatttccccaaatccaacaacaggcaggaaaaataattttaataaaaaaggaaaagacaaattgccgccccaatcctccggcgtccgccgtgtcaagggaaaggcgcgagcgtgcggtaacgcgtggtcgggctgctgctagcagtactggaaaggcgttctaaggcggcggcgtcgcgcggctgtggagcagccctgcgagcggcgggttatagcggcaccccggggacgcgtcagtgggcgggaccgcggccgcccgggcgccttctctttgtgtatcaacaccacctgggccccgcctccgacccgcccagacctaggccccgcctccctgcccctccctctgcggcccgcgcccgcggcccagccccgcccgcaggcgcccccaagactctcccgcaaagcccaagcccactctctccagctttctagatagtctggaaagacccccagatgcttcccctgcctatccttttcagccagggttggtgctcaacacatgcggttgtctttgaggagccatctccttaaaattttctcctgtccgagtcaccagcagtccttgctttcgggggacacatcaaggcttttgggggacaccaccctcccaccaaacactttcttgattgttatttttgtgatttacagtgaagttttgtctcacaaacttgggccaaggcagcaaggttgtcctgatggtttgttgttctttcttttccacctagacctgctttcactcttcaaaactagccggaggtcggcgagcagctccttttcgggatgtgctttttgtacggccatggaaactggactagcggaaaggctaccttttggccagcaagccaggccccttagaaagaggccccagtggggagcccggcgctcctaaggccgtttgggagtccccagttttccactcgctgacacgttgcttctcttatcccaccaccgccgccccgggcaaaggcactgccttgtctgaatgcgggtctgaggcgctttctgcggagcctggtcctttcccttcaatggtgatgtgtgtggtcttgctgagccaggcaactagggggacccttcgctgtggaaaaattggtgctgcgggaaaggcaagactcactcccttgcaggaaacaaagaccccttaggagagagaaatgttcatggaatgaatgaataaacaagtttgacctactgctctcttccttttggggacttgggagaaattgggcagggcatagaggaaagggctgggtgtgatcgcagtttttgctttcaatgttttactgaggaaatccgtacaactgcctatttccgccgcacgtgaggcttcgggtgccctcgcctgcaccagtgtttatgattgacaagcgaggtcccgatttcccccatcacactcctgtgttccctaccccaaaccttctactctgttcaggccagtcttccctaccgcaaaccttctactctgttcaggccagtcttaaataatagccattcttgctttggtgtccaatctcctctcatccccttaaatgccgctgtcatgcaaggcttagtcttcgagccacaggaaagcgccccgcatgccttaatccctccgtactcagccctctttttgcaggtactattttctaaaacaatatggtgacggacttttaaaaatccgtgctgtcatgcactcaaaatcgttccagactatttgtagtatcatctgcccaaagattgtgaactccccaagggcaggtttggaatttgacacacaattagggctgaaaaaactatcttccttccacatacattccccaataaaatcaatcaactcttcttgtcacaacaatcttggtagtggtaggttagagaggagtcccaggaagtttctttatattaggtttcaactgataacaatcaaaaggtcttaaaccactttttcattccagatgaatctctggtcgtttcctctgcccagttagaggtgctaaggaggccctcagggttggtagttatgggtggcaagtggcactataagtaaatctcatgtcttttggactttttggtggtttgtattgcaacacatatttaggagaagcacaatacctgtacagctgagggcaaagtggagggcaggggcgggggggggagctgcaatattgatctggtctctgtatgatcagaacttgaacagtaaatgacaaaaaaagaagggtggaggggtgaaacttccatgtttttattgccagtttgattggtcttttcgagggccaaactgaggcatgcctgct

SEQ ID NO: 916857 - DNA, 4001 bp, Homo sapiens
gacagtctctgaacctgaacatctgcccttgatagttgcccttgggctaaagatgctgttttgggctctgggtgacccctgtcaaacccaatagctactcactgtcatttccagccatgccactgtccctcagttggcagtatgtgtctgagcatagataggcagggaacttccgattgcagaggcattgttttgattcatttcaagaactctgaaatgtcttaactaaggtaaagtaacagattactgtaccaatgtaaaaattttaaaaggtactagattttataccttattgtctaagtacatactttttttctgtcctgttccttttctcctttccaatcctccagtgttttaaatgaagatggagtgtatacatccttttgccctaacacaaacaaatgtcattttgaaaataaaaatattcacatttcgtcctcacacttttcacctcttcaagtgccctcaagtacctccttaatcccactgaagttccaagtttcactgatttaaaaagcaaaggaaaatgtgcagcactagatagagtcaaacaactggaatgctacttagcatgaaaaacgaccaaactatccatctactcaataacttgcatggatctcaagagcatcaagttgagtgtaaaaagaaaaaaactcagtctcaaaaagatcacatgcagtatgattccatttatataatagtttcagaacgatgaaaatatagagatggaaaacaagtggttgccggggtagcgaggagcaggtggagataatgataaagaggtggaacaagggagatcttatgcaagatacaggtggaagttctgcatcttgacaggcctatagtgggtcagattgcacaaatctacacatgtggcaaaatggcatagaaactatacacacattattccaatgtcagcttcctgggtttaatattatactaaagtgtgtcagatgtaaccactggaggaaaccaggtgaaaggtttaggtggcctctctgtgcaactggatgcaaatatataattactttaatatacaaagtttaaatgtcagcttcctgggtttaatattgtactaaagtgtgtcaggtgtaaccactggaggaaaccaggtgaaaggtttaggtggcctctctgtgcaactggatgcgaacctataattactttaatatacgaagtttaaatgtcagcttcctgggtttaatattgtactaaagtgtgtcagatgtaacccctggaggaaaccaggtgaaaggtttaggtggcctctctgtgcaactggatgcaaatttataattactttaatatacaaagtttatatatatatatatattccttacagatgcctctgtacagaaagaataatgaaatatagcatagtggcacatgccaaaaatgtgtcagataccttctttaaagcatactgttactaaagaattactaaagtattgcttcaaaagataagaaggaataaaacagtaatgactgcattctcaggactgcaataaaatagctctgttttccagtgttctcaacctttggattgcttttcaggcattcacaaagcaaagtgggaaacacgaacccttttagttagatccctttaacaatagaggtcagtttggtcatacggttttaaagaatactctgcatccttgaaacacattcctcccatttggaaaaattccagaaacaagactatagcctgaatagcactatctagcatgcacgaaacgcttcttaaaagcaaggactgccacagcctctcttcttaatgaatccctcccacccacctcgtttttcagtgctttgcagtatgtctttttctctttccccttccacgttcgtctcacccactctcctggaccctctaaccaagttgccacgcaaaagcagcaagcaaacctgtgtgagtggggtgtcccgaggcggcagcctcccgcgatcctccgtgcacgccaccacccggctcatgctccaggcgctgcgcacaccccagtggccgcccaggacgtgcggtcactggagagcccccagccacgcccctagatgctgctgggcggcctgcaggagtaccaacattgcagacagaacagcgacctatcccgccgtaagccaaagttgcctgttggtaaattgcgtcttttttctttttcttcaacatctttatagtaccgcgagtgtacccagtgttattaaattatgccaaaacaaagagcaaagtccctgcccttaggagtatgcagtgtaaaatgaataaatgacgcaaggcaaaatgacaggacaaacacagggtgggtagaaagagttacgagtgaaagggaaggtagaaacaataagactttcactggaccaaaacatggaaaggctgttagggccccaaatcttcatagcagattatagaaatgaagaattgcgataatatctatagtagcaatcctattttattgagtgtttacgtgccatgcagtatcatcatcacaataattctataccatagctgttgttttaaaaagtgccagatatgattctaaatgttttacaaatattcactaatttgatcctcctaaaatccctgtgaggttggaactattattttccccatttcagagatgagtgaagcaataaagtggactgacttgctcaaggtaactcaggcaaaaagtgggagagccaaaattggaacccaggaagttggatggtagagtcaagatctgagcccaggaagcccaactttatgatggcattaggattcatatccacattaccttgcctaccaagcttatactcttaatcatgtgcaatcatgcaaattaagtaaacaatttaaaagtatttgtattgactataaacaatgcacaaaatcattttgcaaaggcctttagtaggtccatgaaaaaaatgtttatttgaagaatattttctgtcaaaaaacagaaagaaacatgttttctttcttccttcattcattcaacaaacatgtaccagtgtctgtttataccaggcactgtgttaggcatcagggtgacagtagtgaacaaaagagacaaaattgaggggaaacaagggaactgagataatagtcattttaatcatgaatacacattagatttattgggaacaataggcagaaatagccaacaagaaataatcatatacagggaatgacattctctgggctggactgtctggcatgagtattatttagttcttttttccatctcctctcctttttcctttgttttagttatgatagaggaaatcacgctatcgaaaaacatttcgtatggacatttgctaacatttcaaataatgctttgggtggtagaagtaattgaattcccttcctaataacattatgaccaagagtattttacaagcatggatatggtaaagaggtatgcagacctctgagcttggaataaaaacctggaataatagatccttacaaaacaaaagttgtcaaagtctgttatgaaaacccaggatcttgactggcataaacatctactaaaaagataaaaggatagcatttgttactgtcattcaattccctacatcaccttttaaaaatacatttgtacttcctgactctgctataatatactaaaatgaaaaatatagccattaaaaactaaaatcagaagagaaatcccctccacctctcccctcataaaagcatagaagaacatttgtttggattttgttgtatgtttgtgtaaattttatctatgctaaaatagaatatgcccttgagaaccagaaaaataatttggttttccctcaaatggaaagataagactttgttgtcttatctttccatttgagcactggttttaaatcctaacattaaaagcaatcaaaaaagctgtatgctttctattatggggccataataaaataataaaatgtattgctaattcctatgttcagttactttgttctgttagcacaggtaactttcaaaattcaggggaggggcagagctaagggacacttgc

SEQ ID NO: 916858 - DNA, 4001 bp, Homo sapiens
catccacactcagctcagggttctgtggcctggaatggatgagacagcaagtcagcctcccttgtgttctctatcaacccgctttgagaggctcccagggattttagggggaatggggggactagccactgactggagatcctgggacccagaaaccatggaatgtcattcttaggaagatctgtgagttgtccattttctgccactgggggggacagaaaaaaaaggacgacaaccaaaagggctacgaatggctgggcacggtggctcacgcctgtaatcccagcactttgggaggctgaggtgggtggatcacctgaggttggaagttcgagaccagcctgaccaaaatggtgaaaccccgtctctactaaaattgcaaaaattagcccggcgtggtggtgtgtgcctgtaatcccagctactcaggaggccgaggcaggagaatcgcttgaaccggggaggcagaggttacagtgagccaagatcacaccactgcactccagcctgggcgacagagcgagactctgtctcaaaaaaaaaaaaaaaaaaaaaagaaaagaaaagaaaaaagaagtctacgaatttggagccaaatcagcccagagacactgaacagtgatactaagagcaagaaatttaagggcttagagatttggaggaggagagaattagaaggcaacggagggctagggtggtagttcacatctgtagtcccagcactttgggaagctgaggcaggcagatcgctgagctgagcccaggagtttgagaccagcctgggcaacacagcgaaacccttgtctctgtaaaaaatttttaaaattagccggctgtggtggtgtgtgcctatggtcccagctgctcaggaggctgaggtgggaggatggcttcagcctgggaagcagaggttgcagtgagccgtgaatgtgtcactgcactttagcctgggtgacaaagcgagacccccagtctcaagaaaagagagagaaggcaatagaagcatgagaggttttgaagagataccaaggagctcggttctgaagaatttgtaactccagggatctcgtgaggaagccagaacgaggcaactgggggcaagcactgagaggacctgggagatgtggccctgtggagtggaggaaggggtcagtacctgtgtgtggaattgtctgcagctggggatgcagcccgtccagtcagaggcccatgctgtcccaggcgaagcccctgaactcggcctagccccaggctgtggagaagccgcgccaagccccctgcagtcagcgtcccattctcgccgtacaggccaaacagctgggccaggtaatggttctgctcctgctcagcagggcccaggttggggactgagccccctacccagcccaagacgacccacacacagaagccggccagcagatgactcactggggaccccatcattggtgaggggaatagcttaggggctcaggttctggctcctattctccccgaaacatcctgaggactgtgccctggaagaatgaggaatgggctggagctgcgctctgctctccagctcaggtccatgggggagccagagctccttgcacctgctccccaccgagtccagcagcagcccctactgcagccttctttctcccttcacactgcctcctgcgggagcagcctcttgtttgctggttcctggagcacctccctgagtcagagctctcctcatacttcatccagagctgaccgtccattccttgtcccctaaaccccacccctcaactttgccccacctctttatcccccctcaatccccagggcctcacccctactggcaacataagagctgtcacctcaggtcccctattaggccttgctgtagacgttaagcagttcctgagtcagggaagggggaatccaggcttagcctccaggtgtccaggtggatcggaggccacgtcacatagaaggctgagatggacatgcaccccctcctagcccacctgccttggggcggggtcaggggtggggccagtgtgtgaaggctcacataagagaggagttaatggttcactggtctctggggtagggatcaaaagtcagtctctgctgggcccctgggtagggaggggccaccctctgccctgggaaagccacatggctaaggagaacctgggcctagtctttttcctcttaaataattcaccctatccttaacaccattagtaccattttagccctttccctcatgtacttccaccccacctaccttacagtctagcactaaacttcatctccaacccccatccccatattccttgggaaggttggacccaggtgtccctaacctggggaggaggggggaaaaggcagatcagtggcaagcccagatgcatgcatgggaaataaactgttcttagcagtttctcaccccaagaagagaaagagccagagctctagggatcgatgaccaagaaaggggaagccctgcggggggagaggaaacaaggatctgggctctcctctgatgtctgacctggcctaaaatcaggcaagcaaagtctgatcggggtgactggtccagggggttgaggttggcattacctgatagcaggagacaaggacacccagaggaagggggacacaaccttcttggttccagctgggggggcaggcaggcaggcgggcaagggtcacctgcagggagggggtaggggagggacactaccttaaaggggcaggtctgctttgcctgggcctccttacctgtaacctattttccttccaccttctagggacaccccaccttcccaaatgcctagttgctaacctcttccttttcccacagaaagcaaaggagtccaacacagagtagagtggtaacatttattaggaaggagagacttcagttagactcccatgtctcacacagaagaaacagatggtaactgccatttctttctttctttctttctttctttcttttttttttgagatggagtttcgctcttattgcccaggctggagtgcaatggtgcaatttcggctcacctcaacctccgcctcccggtttcaagagattctcctgcctcagcctcctaagtagctgggattacaggcatacgccaccatgcctggctaattctgtatttttagtagacacggggtttctccatgttggtcaggctggtcttgaactcccgacctcaggtgatccgcccacctcggcttcccaaagtgctgggattacaagcgtgagccactgcgcccagccagtaactgccatttctaaagaggaaagagagcaggcagagggtcctgactcccaggggacaggtagttcagctggacaatgagggagtatgagattagggtggataaggacactgctcaccaccctccactgaagttcagtggctaaaatactgctacaccagccaatcagtggaaggctatcttgctctccaggggacacttgggatgtggttggtggcaggaagaaagaatgtcatgctatctcttgctgctcctccgggtttctttgccgttactaacagggttgctggaagggccaggcgggcctgcaggtgtgtggttgggctggcttcgagtgattcgggtgctgggtgggtgggagggagtatgagggggatgtgggccaccaccgggacctggtggggcactcagtccattcccattctggttctcagaggctaattgtgggaggagaagaaacaaaggaattagttaacataggagaggggtccatcccaaggcctgtctccatgccccaaagagtggcacagtcttcaccatgcacaactgcatcttaatgccaactggaccaaatgcaaaagactgtgggctgcgagtatgaatggagctccagagaagacttacacgatcatttaggaagttgctacatgaacctcggtacggtatttttctcttgtagttatctcactattattgggaatcagacctagaattagctgtttagttctaggctc

SEQ ID NO: 916859 - DNA, 4001 bp, Homo sapiens
acggagggctagggtggtagttcacatctgtagtcccagcactttgggaagctgaggcaggcagatcgctgagctgagcccaggagtttgagaccagcctgggcaacacagcgaaacccttgtctctgtaaaaaatttttaaaattagccggctgtggtggtgtgtgcctatggtcccagctgctcaggaggctgaggtgggaggatggcttcagcctgggaagcagaggttgcagtgagccgtgaatgtgtcactgcactttagcctgggtgacaaagcgagacccccagtctcaagaaaagagagagaaggcaatagaagcatgagaggttttgaagagataccaaggagctcggttctgaagaatttgtaactccagggatctcgtgaggaagccagaacgaggcaactgggggcaagcactgagaggacctgggagatgtggccctgtggagtggaggaaggggtcagtacctgtgtgtggaattgtctgcagctggggatgcagcccgtccagtcagaggcccatgctgtcccaggcgaagcccctgaactcggcctagccccaggctgtggagaagccgcgccaagccccctgcagtcagcgtcccattctcgccgtacaggccaaacagctgggccaggtaatggttctgctcctgctcagcagggcccaggttggggactgagccccctacccagcccaagacgacccacacacagaagccggccagcagatgactcactggggaccccatcattggtgaggggaatagcttaggggctcaggttctggctcctattctccccgaaacatcctgaggactgtgccctggaagaatgaggaatgggctggagctgcgctctgctctccagctcaggtccatgggggagccagagctccttgcacctgctccccaccgagtccagcagcagcccctactgcagccttctttctcccttcacactgcctcctgcgggagcagcctcttgtttgctggttcctggagcacctccctgagtcagagctctcctcatacttcatccagagctgaccgtccattccttgtcccctaaaccccacccctcaactttgccccacctctttatcccccctcaatccccagggcctcacccctactggcaacataagagctgtcacctcaggtcccctattaggccttgctgtagacgttaagcagttcctgagtcagggaagggggaatccaggcttagcctccaggtgtccaggtggatcggaggccacgtcacatagaaggctgagatggacatgcaccccctcctagcccacctgccttggggcggggtcaggggtggggccagtgtgtgaaggctcacataagagaggagttaatggttcactggtctctggggtagggatcaaaagtcagtctctgctgggcccctgggtagggaggggccaccctctgccctgggaaagccacatggctaaggagaacctgggcctagtctttttcctcttaaataattcaccctatccttaacaccattagtaccattttagccctttccctcatgtacttccaccccacctaccttacagtctagcactaaacttcatctccaacccccatccccatattccttgggaaggttggacccaggtgtccctaacctggggaggaggggggaaaaggcagatcagtggcaagcccagatgcatgcatgggaaataaactgttcttagcagtttctcaccccaagaagagaaagagccagagctctagggatcgatgaccaagaaaggggaagccctgcggggggagaggaaacaaggatctgggctctcctctgatgtctgacctggcctaaaatcaggcaagcaaagtctgatcggggtgactggtccagggggttgaggttggcattacctgatagcaggagacaaggacacccagaggaagggggacacaaccttcttggttccagctgggggggcaggcaggcaggcgggcaagggtcacctgcagggagggggtaggggagggacactaccttaaaggggcaggtctgctttgcctgggcctccttacctgtaacctattttccttccaccttctagggacaccccaccttcccaaatgcctagttgctaacctcttccttttcccacagaaagcaaaggagtccaacacagagtagagtggtaacatttattaggaaggagagacttcagttagactcccatgtctcacacagaagaaacagatggtaactgccatttctttctttctttctttctttctttcttttttttttgagatggagtttcgctcttattgcccaggctggagtgcaatggtgcaatttcggctcacctcaacctccgcctcccggtttcaagagattctcctgcctcagcctcctaagtagctgggattacaggcatacgccaccatgcctggctaattctgtatttttagtagacacggggtttctccatgttggtcaggctggtcttgaactcccgacctcaggtgatccgcccacctcggcttcccaaagtgctgggattacaagcgtgagccactgcgcccagccagtaactgccatttctaaagaggaaagagagcaggcagagggtcctgactcccaggggacaggtagttcagctggacaatgagggagtatgagattagggtggataaggacactgctcaccaccctccactgaagttcagtggctaaaatactgctacaccagccaatcagtggaaggctatcttgctctccaggggacacttgggatgtggttggtggcaggaagaaagaatgtcatgctatctcttgctgctcctccgggtttctttgccgttactaacagggttgctggaagggccaggcgggcctgcaggtgtgtggttgggctggcttcgagtgattcgggtgctgggtgggtgggagggagtatgagggggatgtgggccaccaccgggacctggtggggcactcagtccattcccattctggttctcagaggctaattgtgggaggagaagaaacaaaggaattagttaacataggagaggggtccatcccaaggcctgtctccatgccccaaagagtggcacagtcttcaccatgcacaactgcatcttaatgccaactggaccaaatgcaaaagactgtgggctgcgagtatgaatggagctccagagaagacttacacgatcatttaggaagttgctacatgaacctcggtacggtatttttctcttgtagttatctcactattattgggaatcagacctagaattagctgtttagttctaggctcagggacctctgacaaaaatgcccctttactgggccaggcgtggtggctcacacctgtaatctcagtacggtgggaggctgacgcgggtggatcacgaggtcaggcattcgagaccagcctggccaacatagtgaaaccccgtctctactaaaaatacaaaaaattagctaggtgtggtggcaggcgcctgtaatcccagatactcaggaggctgaggcaggagggtcgcctaaacctgggaggcagaggttgcagtgagccgagattgcaccattgcactccagcccgggtgacagtgtgagactccttctcaattaaaaaaaaaaaaaaggccccttcaccaaaagtgattataaaactggagaagcatggcaaggggaagggcctgaagtctctgcgttaaaatatgaggcacttaaaaaaaaggtgtgtatgagtgtacgataatgataatgttcattttagaaaatatagataaccatcagtgaaaagattattattattttttatttatttatttttttgagttggagtttcgctcttgttgcccaggctggagtgcaatggagcgatcccagctcactacaacctccgcctcccaggttcaagcaattcttctgcctcagcctcctgagtagctgggattataggcatgagccaccacgcctggctaattttgta

SEQ ID NO: 916860 - DNA, 4001 bp, Homo sapiens
ataaacacatgacaatatgctaaacattaataataatgttaattaaaacatgataacattttcctgccatttggcaaatatgaaaaagatcaagaagacccagtgttggctgggcacagtggtacacacctgcaatccctagcactttggaaaggccaaggtgggaggattgcttgagcccaggagtttgagacccgcctgggcaacacagcaagaccttgtctctaaaaaaaaattttttttaattagtgaggtgtagtgcgcctgtagtaccagccactcaagaggctgaggtgggagggttacttgagcccaggaggttgagggtgtagtgacctaggccacagagcgagaccctgtctcaaaataaaataaaataaaataaatacccaatgttgatagggacatgaaaaaataaaagtacttctattttgacagtaggagtataaattgatacaaattttttggaatgcgacttgacagtatctacaaaattttaaacatagatattaattcataccctaatatccaacaatgctgtttttaaatctatcctatgaaaacattactatatgaatatatattcttataaggatagttattacagcaccaataaggaagaatgagtaagtaaattttggtatatacatacaatggaatatcatgcactcagtttaaaatgcagaaaatctttgtataccaatttggagagatgtattattaagcaatgaaaataagttgcagaaaaatatatgcaacattttatttttatttttggaaaaactctcatatgtatatatgtaagcatagaaaagaggctgcaagtgtatacaacgaacacttcacaatgataatctctggagaggaggagagttttgattcggagataaggaataggagaaacttcatgttttatttaataccctctaatgtttgaagtcattttaatgagtatatattaatttttattttaaaagtaagaaagtatttaaatataacattttgggaagattttcttttaaccaagctcttccaaggtctgtagagaagagttactttacagtcagaataactattctttcagaatttctaaaggggaaaaaagaaaaactcccacctagaaatagattctctcccagagtcagcatctgttcattttaccaagggataaattaaatctaaagtgaatgtttgagagtagtaacctacataaagcattttaaacagaaatggaataacaaaaaaagacagtaaagttaaataaagatgaaaacccacctgtactatatccagtaccatgccagctgaaactgttccaaaaccagctagcaaaaagggcacaagtatttgcaatgccatgatgccactggattcctttggtaattttggggtcacttctacaatagcatcttcatcaccatcactagatatatcttcatcttgtaacatggcagtggtttctgaagtctcccttccatcacagtaattataattggcatagtcatcatacttttggctgcagcttgatgatgcgtgcccattattggcatgaaaagactgctctgagaaactgtgatactccatgtgttgctcagatctattactaaaagtctgtactgcagttgataatccatcttgccaaatgccgtttgcttttttgtgcctgtcttcttggtttttctggtaaatcactggaaccatactcaagagtaaatttaaaaacttgtcggattgaattgtgtttaaacgtaaagtccaatctacaaaacctcctccactacttggaccaccacttgttttatcggtaatagatcttcctttactattagtcatattgtcatcacaaaagaccctgtactccttagatctcaagcttcgggaaccacagcagatgaatcagaaccgcacaaacactggtttaaattaagttgttgacttcattgtgtagaaaatatttccactaataaaagatgttcagaagttccacagaaggactggatctggaaaaataaaataatttttaaaaatcagagaaacaagatagtttcagtatcaagatagatacttcaattcttataaaggtattaaaaacacatgttcttaaaccaaccctacggtactgatactatactttgtgggcttaaaacataactgttttgtgccacacaactgctttgtgtacagaaatataatacagagctatttttgtgctcaatcttggttaaaagtatttcttatctttgcatactttatgtgatcaatatccacgtaaggtcttcaactgcctcttgaaatcccacagtggacaaatgttttaaataaagtaatggcttttattactattgcaaggactcagaatcaaattgctataccctttgcatctgtcagtacacaacaaaagatatatggcattatactttaaacattaaataataaaccatattactttatttacaacttaatataatatacattttattattaagatatgaagagacaaggatgatgtttactataaaaacacttggtaggtatcctgaatactatatagggcatttatttcacaaataaaatgaggctggagtcatatttgtagttctgagatataaaagctcattataattgatttaggaatataaaccttctttcatttaggaataacaaaactaaaaagaaattacaaatattcacttaaacctccatttgcaaaccagccagaagaaagcttgtaacgcacttatttatgccctgccctgtccattcatagttctcagtctgctctggcccataatcccagggtagaaccctgactggctggccactcagtgactagagtctctttgaagactttgaactaagagacacaaacacataactgtggcacatcaaagagtgatgggcactgaagctgcaaggtcacccacgacctgaccaggaagaaaacctgacaattgctgccatagctggcaaggctttccaagctatcaggtgtttctcagaaacacctaggcctgtcttatacttccaagagcatctaagaccaaaaaaatggcactgatttgataagggatgggtggccccaaaacctaactggactgcgttcctgccaagctagactgagaattgttgctgctactattgctgcttttaatgaaaactactatattcctcagtatttgtttccaatgtcttagaatatccatctcctctctggataggaagatcaatagcaaggaatggcaaagggagaaagagaaggggctatgtaggacgtaagtgggtgttagggcctggttcatcaattccatcactcactcactttcctttcctctctcttgtgattacagaggggtctgggatctgggaattccttctgaggaacatttttaaaatacagattccaggacaccagacctactgactcagaatgtgtgtgtttgaggcccataaatcttttttatttttaacttttccatgtgatgattatggtgcagacttcctgtggacttgcaatgagtagattaagcactagttcccatttttgccacttataggctggccagtatagacagaaagttggtgtttaaagaaaatcagattaatgaaaccaatggccagagtgaagcagagataaaacgatgtagtccccgaaagagagaaaagggcagagagccttccaggtaatgaaaggctgagctatacatctggaacttaggagattcccttcagcttcacatgagttagattgagtgggtgtctgttccttcaactcatctacctttttaaaaagtagtgagtatttcactgccccaatagatctttaatcaaataaaatgcaaaacaaaccccaaagagattgagctataagacaggtctattccataggaggaccagtgataggaaacttccctcctgatgcagaattaccaggatgatcaaaatggaaatgcagagaaatgtaggtaaacaagaaagagagatgacagtgtcaccattcagcc

SEQ ID NO: 916861 - DNA, 4001 bp, Homo sapiens
cagcactgcaagatttcagatctggagggaagtcagatgtcttttggggacatctcctcccactcctaatagatgaggaaactgtggcccaggatagggtcaaacggccaggtagggttcacctccacttgtaccaggccagactcaacacaaccagctgagatcccaggctggccctccctgctcatccttctcttgccttcggtcttcgcaatgcaatcatagggctctgacgccgccttccagaggggaaagcaacagggccaataggaaacaaaaaagtggcagggagaagtgaaccttgacaaacatggagggtggcggggtgcagtggggaaaggaactagggctctgtagataacgcgcagagatgggccagttgtcctcaggatcccacaggtggtgaggcagctgggcaggcagagaacaccctagccagggtgcccatccccccttcttggtgacccagtgctttgttggcattgtgtagggtggggccctgtatgcccctcttctaaggcattaaccccacctcatgctgcgactctacccagggatggcactcagcactccctgtggcagtgagtaaattagttatttttagttattccatttagggttcttttggccgaggattttagtaatggaatataatcatcatatgtaaaagtattatacgtattttcttcccaaagtcctttcccacacatattatttcatgtagctgtgtaatcccgggtaagcaatttatttaacttcaggcctcagtttccttatctgtaaaatggacataatcgtaaggcctacttcatgagactaatgtaaggattaaatgaaataagggaagcaggttgcttaacatagtgcctgacacatagaaagcattttttaaaatgttagaaagtagagataatatttttcatcttcataccaattctatggcgcagagaggttaaactgcgagcccaaatgtgcacaacaaggagcactggtcagcccagagcccccatcagcgcaccgatgcttccccttccctcccagaagcacagaaagggcggctggcctgcaggatttggcagagcttggctgaggagccacagcagacgggtagcaaaaaggcaccaacatgggtggaaagagaatgtccagtttctatgagatccctaacgccgtcctccctgtgggtctcagcagagggctctgcgggggagccctctggaaggagggagatgggcttccccagccacccctagccctcttcctttcccacttcttccctctctgccctcacccagcacccagggaaggggcgcctggggggcaggggatccctcagaacaaccgtgtgtgtgtgcgtgtgtgtgtgtgtgtgtgtttggggataggaggcgaccagcgccgcgggcgcgcggaggggacactgtcgtggggcaactgggcggagggcgacaggcagtgtgccgtgacagataacccgggcggcgcggcaggtctgtgcagccggcagtggcgggccgtcggcacccccaggtggcgcccgggcgggcatcgggtctcagaggcacccaggaatgcccaggagcccgggcccgcgtggggcctgccgccgccaaccgctgttttcgagtaaacactccacccgctccgcggggaagcgccgctcgcggggagcgtcctggagcagctgacggcgcccgccccgcagccgcgcacccgccccgcgccgcccagcgtcccggggtacctgcgagccctcccatggccgcggtccccggctgtcggtagaccaccgtccagacgaggaagatggagaagccggccacggagctgatgccggagtaggcggcgcggaggccgagctgcagcctggacggggccatggggctgcggcgccgggcgggccgagggcgagcgcggccgagagtcacaggtgcagggcccgaagccgccagccggagccgcgggagccgccagagcagccggcgccccgcgctccgcccccggcccgcccccagcgccgcccgcacagcgccctccccggccggaggccgcccgcgcccggaaccgcagacgccaccgccgctttgcgaagctgccgtgtcgtttgggggaatgctgctaaaaaggcggattcctgggcccatccccagacccgccgtgtccggattgttggaccttggaagggaccggaaatatgcctttatacgagcgaaccgcgaggattaaaaatctttacctctgagtacgatgcgtattttcgtttaaaattaaaattaaaatttcttgttaaaaattaataggtaaaacttaagaaatattagagtacgctgtgaatagaattccttccgcccgtccttctatcaaccaggttccctcccaccatatcgcagaggatttctccacacactaaagtctgggaacccctgcgaccatcaccttctgactgcaaacattctatacattctatcctcacgcacagctccccacaaatccctacttttttttttttaaacagagtctcactctgttgcccgggcaggagtacagtggcgccatcatagctccgcatcctccaacacctggattcaagcaatgctctcacctcagccttccaagcagccaggactacaggtgtgtgccaccacgcctggctagtattttttgttatttattttttgtagagatagggtctcgctatattgcccaggctggtccccaactcctggcctcaagctgtcttcccacctcggcctcccaaagcgctggaattacaggcttgagccactgcaacggacctcacctttccttttatcagcacaagccttatcctcccaaacccctcaccctgaccctcgggatcataccattgtaaggaagagacagatctgtagcaggagggcactgagctcccacgtgagcccagcttccggccgggagctggagggaaaatcccagcacaataacaagggctctgccacagcactaaggatccacatggggaggcccatcatatacctgcacaaaacataaccaataccccttgcattagttttttttgtgtgtgtgctgccgtaacaaattaccacaaatttactgatttaaaataacacaaacttattattattttacagttctgtaggtcaggaatccaaataatggtctcactgggctaaaatcaaggggacatcagggttgccttgtttctggaggctctaggggaaaatcagtttccttgactttttttttttttttgagacggagtcttgctctgtcacccaggctagagtgcagtggcgtgatctcagctcactgcaatctctgcctcctgggttcaggtgattctcctgcatcagcctcccgagaagttgggattacacgcttccaccaccacacccagctaatttttgtatttttagtaaagatggggtttcaccatgttggccaggctggtctcgaactcctgacctcaggtgatccgcccacctcagcctcccaaagtgctgggattacaggtgtgagcccaccgtgcccggccgccttttccagcttctagagtgaggctacccacatgccttaactccctcttcctccttttcccttctaaggacccctgtgattgaggggatagtccaggataatctccccatcgcaagatccttaattttatcacatcagcaaaataaatccctttgccgtggaaggtgacatattcataggttctgggatgaggacgtggacatctttgggggccattattatcccacccaccacaccccctctggaacataaacttcatgagcagggacagtgccagttttgttcacatcaacatctaaaagcatgtctggcatataatgaccccttaataaatgtttgttgaataggtgagtgtgagtgaatgaaggtaagaataaaataaaaacaaaagcaattatacacaaggaatctagacagggtgtgcttaactgccaaacaagggatgtaaaccagtgttaagcaca

SEQ ID NO: 916862 - DNA, 4001 bp, Homo sapiens
tgttcctcagataaatgtcaacttcctcagcatgggctccaaatggccctgtgtgttataaccccagaacacatctcatataccattcccctcatcgctccttgttgctgcaccacactggcctcatttcaggtctctaaccaggtgtgtccccctctgccacaggtcttttgtgtagctgttctctttgcctctcaggccctgtgatccccctcttccctcagttaacatttattcatcctttagctctttgcccagattttcttccttagcaaaatcttctctgagaccatgtctggaaccactgttatacacgcttatggcactgcctatctttcttcaaagcatttatcacagtttatgatatttatttgtgtgatatttgattaaaaatagtacttctcccctcccccactaaatgatacgctccaggagggcaagaacattgcctattttttcttaccattgtatcccaaacagagattgaatacatttaataggctttaagggggttagatatgcattttccaaaatcttagatattgttcttttcagacagagcaaggaaagaaggatgtatcttctattaattgtagcaaactattaaccaggaagaagaggagagagtcagtgtctgatactcattttgttgcaaactcaggatattttccctgcctcctcggggaaaccatccctgaggtcaacatggcacttgtttccaagacgtgtcatccttcctgagatggcccattaccctcttcagagccctgtacttcagacttgcctcctcttccaaccctctttccaaggcagaaaccacaccatctgattgcacaggaaacggggagtgagaattcaatgggctgccactcattcactgagtgtcacacaataaacattactccacaaagccctttcacaaacagcacttcgtctgatcctcaaaacaaccctgtgaagcatgcaaagcagacataactattcccattttaatagctggggaaactgaggttcaaagaggcaagtgacttactcaaggtcacaaagtttgtgtgaggcagaggtaggatttcaaactacagactctaacacttagtccaatgcttttccttacattagccgccccaacagttccaataccagttacttaaccttggttttttaattcccttaaataagcacctgttcctgacccctccacacatcctcagcccagtttgcagtccctacccagaagttttcaggtgtctgttcaatggggcagagggagtcacaaaccgggtcaccctatcagggattggtcccagcctccagagtcttttctggcttttcctctgaaccactgaggaaccagaaacccccagaaataaaaacacaaagagaagacgtgccccaccagagcaaggtccctgctaccctttctgcccacgttctggcaggacaacgcgaggccagacgccggccccttccaacagaaagacgcgaggagaacaagaggtcgccgcccgccggctgtcagggctcctgggcgggcggcgcaagggatgcggcagagatgggccagatcccaggttcggcccaaggtcactctctcgcagccctggcctggtccccaaccgcccggagcgccccctggtgtcccgggctggcctcccctcgccctcagggagcggcctgggaagcctgggctcgggggcagaaggaaggagggtgggcagaggatgaggaggctgcgccccggggaggagcgggaggcgcgggaggcggggccctacctgatagctgaggacgccgtccggctcgttactcccggcggccggcatggcggagccgaactaggtctcccccacgggctccaagccaagcatcagcagcccgcgccctctggtcgggtctgagcagatcactcgaacggcgacccccaccccggagccaacggtcaaccatcaaccgccgccgcctccatagccaccggcccgcgaggcatccgccgcaaccaatcagcgagaggcctgcgcagccaatcagggcgcggagcacgggaggacgctgtccggcggtaccctgggctaccgcggggagggggaggagccggggagccaaccgctcccgggcccggttgccttggaaaccgcctccctcccttcaggggcctctgggcgtgaaggtccttccaactgcttgctagaaaatctctgcttctatttgcagctgcacctgacccttgaaaactgggaaagtgtcggttttgcctattctgatttcattccttgggagatgatgtttaaattccgggcaaacatccttcgcgattgcaggaggaggtaattgcggatgaggggagagggccttctaaaattaattgtttttccttgagctaatggccagattaaagagcattaaattgaagaaggcaggcagtgtcaggctccctcacagtctcactatgacttaggtcttcttcttgagtctcaagtcagaagcaaaacacacggacagggtcgagctaaggatgactgttgaagcaattccacaaaaaggcttcgaacttttccaggaaatgatctaaggcaaactattatttagcaacagaactactgacttaacacaaggttagaatatcatgaataatgcattaaatttgatttggatttataagaaaagagaggctggctaaaatcgaagcaaccctctctcctcaagaaaaagaaaggtaccttttgggttttttttgttttttttttgttgttttttttgttttttttttttttttggagacgaagtttcactcttgttgcccaggctggagtgcaatggcgtgttcttggatcactgcaacctccgcctatccagttcaagcgattctcctgcctcagcctcctgagtagctgggattacaggtccccaccaccacgcccggctgatttttttgtatttgtagtagagacggggtttcaccatgttggccaggctggtctggaactcctgacctcaggtgatctgcccgcctcagccacccaaggtgctgggattacaggcgtgagccatggcacccggccgtggggccttttgttttatatgcactatcataccagacttcaggtaggtccaaattggggtcaggggaagaattgttgcaaataattctcagcccctaaagaagctacagttggggaaggtagtctgatacatgttaaaactttccacccctgcttaccatcctttgtgttggtcctgaaattggaaacaaggttgggcttcagtatccctgaagcagaattgtatttctgatgtcctgtataagcctcctgtctagtctctgcgttttagtgttcattgccacacactccatcaatctctttactaatcctgtcatcttgaatctggaattcacatcctaccctcatccccatttttgtccatcaaaatcttaaccatccttcaaagttaatctcaaaagccaccctcttccaagaagcctttctttattctactgtccctgatacccctaacagatgtcatctcaccctccccagaattctcaaggcacttcatacctttcttatagcagttgtcatgctgtggttatttaagtactttatatgttgactttagcttactaaaatattataagttctttgaaagcaatgattatttttcttatgcccttctgtatactcaacagagcctcaaccaatcccaggcacatagaaagtacttagtaaatatgaatgcttttaattcaatctaataaaaaatgtattgaacacctactaatgaacaggcccaagtaacactgtagaggcagagaaatctaaaatatatatctccaagggagcttaacaggcttatcagggaaacagggtatatgttaatgagtaatattatataaaccatgaagattgcaaaaattcagaagagaaaatgatcttcaggaaggtttcacagaggacatggattcgagctaagtctgaaaacatgggtaagatttagctgaccca

SEQ ID NO: 916863 - DNA, 4001 bp, Homo sapiens
tttgaaaccaacctgggcaacatggcgaaactccctctctacaaaaaaaagttagctgggcatggtggcatgcatctgtggaggctgaagcaggagaacagcttgagacccggaggtcaaggctgcagtgagccgtgatagctccactgcactccagcctgggcagtagagcaagaaaagaaaagaaagagagaaagaaagagaaaaagaaggaaagaaagagaaagaaggaaagagagagagagaaaggagagacagagagagtaagaaagaaagaaaaaagaaaaaaggagggaggcggggcagcagaaagaggaagaaaacagaaagaaagaaagacaaatttatttaaatatcaaaacaaaagagaaactgaactagtggtagaagtttctaccatagaaagttttcaaattattggctatttggagtcatgcgcgctccttctctgttgctaaggccccaaaagattgcagcacacgaggcagcgccggagaggaccactgagcagcacgggccctggcggggtaattccgaacaccggcttaggaggcgggtttaccaggattctcattccagccctgccactaattgttcagggttctcaaggtcgagcatgcacaaaatcacccggagggcttttaaaacacaagtcgccgggcccaacccgagtttcggaatatttaggtctgcggtggggcccatttcttttcttttcttttctttttttctttttttttttttttgatacggaatctcgctctgtcgccaggctggagtgcagtggcgtgatctcggctcactgcaacctccccctcccgagttcaagcgattctccggcctcagcctcccgagtagctgggattacagacgcccgccactacgcccagctaatttcttgtatttttagtagagacggggtttcaccatgttggccaggctggtctcgaattcctaaccttgtgatccgcccgcctcggcctcccaaagtactgggattacaggcatgaaccaccgcgcccggccaaaatttctaataagttctcaggtgattctgactggcgctgctggtgggggatcccactttgagaaacaccctctgctgtgtgagcagctgcctccccggtacattcggaataatcatagtaggtttaaagtttgctggggctgggattcacctgatacctggcacttggagcccttgacacagttcatggcacacggaatacgagctcttgttggatggagcacaaatgagaagcaaacctggggcaggaccccggggcccatggccgccccgccgcgtttccccctccggggcaggcctccgggctccgagcgctccaggctggcgcgcagcacattccggttccatgcacccgccgcccgcggctctgctaatgcctgtcctctttggggtgactaggaccctccaatctttttccgcgctgaaagcctggccgcaaagaccgcacccccggggcgggctgagacgcagagaagccggggcgcccctctgccggtccgccgggagttcccgggcccgcagcaggctgaggacacggcgggacccgctgcacctggccagggaggggcggggcgggcgcgttagtgcagctgggggaggtcccgccccggtcccaccctcccggccgtccggtggggaaacccgggagccaccccgcggcgcggctgcggctttgcctcggcgcgacaggtaagcggcagaaggagcccgcgaccctctccccgggagggcccccctgagctccccgactgctcggacttcccttcggcggatctcgcttctgccgagtcctcgctctcacctcctcctccgccagccttcgcctcttcctcttcctcctcactacccccgacagtaaaatgaaggggctgggccaggctggtccctcctgccttcgctctctgctggtcgcggtggcctgtagctcctccctcggtaggacccccctccaccttggcgcttacgagatgaatgaggagcccagacctctggaacttggaggggtgagagggggacaagccagagccagggctccacaccctcttcccctcacccacccatgccctgcattccttctgtgccccgtctccccagatcgggccaccccatgtgctctggtacggcaactcttgcagagaggtttcctcctgccctgccacgttgcgcctgagcagaaggggacagcaaggagaagcctcgctggtggaggtcggtctgagccctgcttggttgaattccctccagagcctgggggcttttgggggtgggaagggatctgcctcctgctgtggggaaatggaatctgctgggtgttcatgactgtgactgtcaccgacttccctatttcctcagttgttcagattcccaggctgacaaaaaggagaaacagcttttacttgcatccagggccaatcatcgcagacccagacgtctgcagagggtaggatggggctcttctgtgtatgggggtggagggtggtcagtttgcccacaaagcttacagcagaccccttctagcagccgacaacccattgcagcactctcagaaaggatgttaactctgtgctctgagctcgcccccaggcccacacacacaatttacaggcactgggtgaggttcatagttctggacacaccaaagagcctcgaggacttttgcgccttctaccagagatgtgtgtgcaccacacaggccctattctccgctccagacagatgagctgtctcccttcccatcaaaggaaaggttaagaaggatgagacagggaaattcatgtgatgatgaaaaccaggtcaggtgaggggtttgaaatatgctttggttccggccacatgtggtggctcatgcctgtaatcccagcactttgggaggctgaggctggtgcatcacctgagatcaggagttcgagaccagcctggccaacatggcaaaaccccatctccacaaaaaatacaaaaagttagccgggcatggtggcaggcgcctgtaattccagctacttgggaggctgaggcaggagaattgtttgaacctgggaagcagaggttgcagtgagctgagatcgcaccattgcattccagcctgggcaataagagcaaaactctgtctcaaaaaaaaaaaaaaaaaaaaaaagaaagaaagaaagaaagaaatatgctttgattccaattgcctagcaggagccagtagcattgcaggcatttccctagctccagttccttaatggtgccatgcactttaggaacccagaggtaatcagagaaagttgcttccaggggcaccagggcagagaacaggacaagaccctcaaaagaaagagggaagtgtgcaggagactgggctgctcaagatgacctcacctcagtaatgctgcccacagtcctacagtgggtggaacagctgactcctacctgtagcagcatggaagaactcagggcagagaaggggaggccctgatgtgtgtcaggtgccctgtgaggtcagaaacatatttgcccaagttcagctggaagaagtggggacaggaaatatgagcatgaacttagtccatgcaaccattgcctcgaacagacctcaggaccaggaggggcagctaaccctagggctgagggcctctcagtgcagggaggcagtgagtatcatgaaggcaggcagctgactcagccctgtcactaacttcgatatataatcttagccaaaacacataaacactccctgggtggggagcaaatgagaaggtgtatatgaagtgttttggcaaagctccaagcaccagtcaaatgcaagacaatgtgatgtcatagttaagagagtgggctttggagatacataggcctgaatgcaaattctgcctctgccacatttctagctgtgtgaccttggtcaagttacttgacctccctgtgcttcagtttccttctgtgtaaaacagagaagataactgtaacttgatttgatatggtaagcagtaat

SEQ ID NO: 916864 - DNA, 4001 bp, Homo sapiens
aaatacaaaaaattagccgggcgtggtggaaggcgcctgtagtcgcagctactccggagaccgaggcaggagaatggcgtgaacctgggagacggagcttgtagtgagtggagatcgcaccactgcactccagcctgggcgacagagcaagactccatctcaaaaaaaaaaaaaaagaaaagaaaaaaaaaagaaaatctgttcatgatctcatttactctctcatgccctctctctctctcccggttaggagagaccccctctctcccctttcccctctacttaaaccccttcagtggcttccccttgttcctcagataaatgtcaacttcctcagcatgggctccaaatggccctgtgtgttataaccccagaacacatctcatataccattcccctcatcgctccttgttgctgcaccacactggcctcatttcaggtctctaaccaggtgtgtccccctctgccacaggtcttttgtgtagctgttctctttgcctctcaggccctgtgatccccctcttccctcagttaacatttattcatcctttagctctttgcccagattttcttccttagcaaaatcttctctgagaccatgtctggaaccactgttatacacgcttatggcactgcctatctttcttcaaagcatttatcacagtttatgatatttatttgtgtgatatttgattaaaaatagtacttctcccctcccccactaaatgatacgctccaggagggcaagaacattgcctattttttcttaccattgtatcccaaacagagattgaatacatttaataggctttaagggggttagatatgcattttccaaaatcttagatattgttcttttcagacagagcaaggaaagaaggatgtatcttctattaattgtagcaaactattaaccaggaagaagaggagagagtcagtgtctgatactcattttgttgcaaactcaggatattttccctgcctcctcggggaaaccatccctgaggtcaacatggcacttgtttccaagacgtgtcatccttcctgagatggcccattaccctcttcagagccctgtacttcagacttgcctcctcttccaaccctctttccaaggcagaaaccacaccatctgattgcacaggaaacggggagtgagaattcaatgggctgccactcattcactgagtgtcacacaataaacattactccacaaagccctttcacaaacagcacttcgtctgatcctcaaaacaaccctgtgaagcatgcaaagcagacataactattcccattttaatagctggggaaactgaggttcaaagaggcaagtgacttactcaaggtcacaaagtttgtgtgaggcagaggtaggatttcaaactacagactctaacacttagtccaatgcttttccttacattagccgccccaacagttccaataccagttacttaaccttggttttttaattcccttaaataagcacctgttcctgacccctccacacatcctcagcccagtttgcagtccctacccagaagttttcaggtgtctgttcaatggggcagagggagtcacaaaccgggtcaccctatcagggattggtcccagcctccagagtcttttctggcttttcctctgaaccactgaggaaccagaaacccccagaaataaaaacacaaagagaagacgtgccccaccagagcaaggtccctgctaccctttctgcccacgttctggcaggacaacgcgaggccagacgccggccccttccaacagaaagacgcgaggagaacaagaggtcgccgcccgccggctgtcagggctcctgggcgggcggcgcaagggatgcggcagagatgggccagatcccaggttcggcccaaggtcactctctcgcagccctggcctggtccccaaccgcccggagcgccccctggtgtcccgggctggcctcccctcgccctcagggagcggcctgggaagcctgggctcgggggcagaaggaaggagggtgggcagaggatgaggaggctgcgccccggggaggagcgggaggcgcgggaggcggggccctacctgatagctgaggacgccgtccggctcgttactcccggcggccggcatggcggagccgaactaggtctcccccacgggctccaagccaagcatcagcagcccgcgccctctggtcgggtctgagcagatcactcgaacggcgacccccaccccggagccaacggtcaaccatcaaccgccgccgcctccatagccaccggcccgcgaggcatccgccgcaaccaatcagcgagaggcctgcgcagccaatcagggcgcggagcacgggaggacgctgtccggcggtaccctgggctaccgcggggagggggaggagccggggagccaaccgctcccgggcccggttgccttggaaaccgcctccctcccttcaggggcctctgggcgtgaaggtccttccaactgcttgctagaaaatctctgcttctatttgcagctgcacctgacccttgaaaactgggaaagtgtcggttttgcctattctgatttcattccttgggagatgatgtttaaattccgggcaaacatccttcgcgattgcaggaggaggtaattgcggatgaggggagagggccttctaaaattaattgtttttccttgagctaatggccagattaaagagcattaaattgaagaaggcaggcagtgtcaggctccctcacagtctcactatgacttaggtcttcttcttgagtctcaagtcagaagcaaaacacacggacagggtcgagctaaggatgactgttgaagcaattccacaaaaaggcttcgaacttttccaggaaatgatctaaggcaaactattatttagcaacagaactactgacttaacacaaggttagaatatcatgaataatgcattaaatttgatttggatttataagaaaagagaggctggctaaaatcgaagcaaccctctctcctcaagaaaaagaaaggtaccttttgggttttttttgttttttttttgttgttttttttgttttttttttttttttggagacgaagtttcactcttgttgcccaggctggagtgcaatggcgtgttcttggatcactgcaacctccgcctatccagttcaagcgattctcctgcctcagcctcctgagtagctgggattacaggtccccaccaccacgcccggctgatttttttgtatttgtagtagagacggggtttcaccatgttggccaggctggtctggaactcctgacctcaggtgatctgcccgcctcagccacccaaggtgctgggattacaggcgtgagccatggcacccggccgtggggccttttgttttatatgcactatcataccagacttcaggtaggtccaaattggggtcaggggaagaattgttgcaaataattctcagcccctaaagaagctacagttggggaaggtagtctgatacatgttaaaactttccacccctgcttaccatcctttgtgttggtcctgaaattggaaacaaggttgggcttcagtatccctgaagcagaattgtatttctgatgtcctgtataagcctcctgtctagtctctgcgttttagtgttcattgccacacactccatcaatctctttactaatcctgtcatcttgaatctggaattcacatcctaccctcatccccatttttgtccatcaaaatcttaaccatccttcaaagttaatctcaaaagccaccctcttccaagaagcctttctttattctactgtccctgatacccctaacagatgtcatctcaccctccccagaattctcaaggcacttcatacctttcttatagcagttgtcatgctgtggttatttaagtactttatatgttgactttagcttactaaaatattataagttctttgaaagcaatgattatttttcttatgcccttctgtatactcaacagagcctcaac

SEQ ID NO: 916865 - DNA, 4001 bp, Homo sapiens
tggaaggcaatgctgcccaggggtgcctcgccctggaagatgtcactagagcccaggcagagtgtgtcaccaatgtttgttgtgccgttaaggccctgtccccagcaccagttgaaccagcctcactaggaaaccacctgccagaatctcaggattggagtcctctgggtaatggcctaatagagaggaaacttctgcaggcttgtcccatgtagctcaaggaccagtgctgggtgagggagaccactgaaggcactgaactgggccccgccactcccctgagctttgatcccgcccccacctcccattcaacagctctttaaactaaacgtgcatcatcttttcaaagccctttcttgcagacaacttgagaaaacctatagccaggggacctgtgcaatagaggaaagacagttttccttaattgtctttccatagagaaggcagagctgtttgagaaccttgctgcctaattttcctactgatcccaagataactaccaccatcacaactagcaccaccacagtaattatggccaatacctatctggcacttactctgtgtcaaactctattctaaatgctacaccttgcatcatctcatttaatcctcccaactggatgaggtaggtgatattattttatttttgaggaataggcacaaaaggttgggtaagtcacccaaggtcacccagctagtaagtggtagaatctggtccgaaatacaggtactggtacaccttagccacttgggtgcctgtttcagtggaaagggggtgggtgtggaaggggaaggaaggggagtacaaattctttaccaactatcttggaagagtgaatggggctgaggacctggaacaagagtattcctttcaagaagcagggcctgagacctgaagaacttaccttccccaaaaatctttccccttgcctgggaatcaaagatgctaaaggtagaaaggaccatagcgagcactactgttgcaatccgttcactttggaagcctctttttttcactaagcccaggagagtaaatcccaagaattttttcacccttagaggacgcctctcagtagaagggaaagatgccaggtgaagatcgggggacggggaggagtgaagggagggtgatgatgacgatggacggggagagatttcgatgtggcagtgacagtctgcccccaagaaaacgcctccagaggtctgcagagtccccttcccccgcgccctgcatggtcccagcccaccctgccccttacctcgtaggtgctggtaattcccagtttgtagaacaccgggaggaagacctccgcgctgatgaccaccacaaagaagtaggtgaaggcaaagatgctaaaaatggccccaaaacggtagacctcggagggggtgcccaggacagtgacggctgacatgaagctagcggtgagggacagcgccacgggcactgcggtcattctgcggccgcccatcaggaagtccttggaggtctgctggccgcccccagcgaaggcgtagtagatgccgatggcggccgagatgaccagcatgcccgcgaacaccacgtagtcccacaccacgaaggtgccgatgccccgtggcgtgtccatggccgcacggtcgcctgagccctgcgcgcaaactggtggccccgcggcgcgcagccggagcccggcgcgcacttcttatcccggatccctggcgcgcaggcgtggcgtcccgcggggactggaggcgtcctccaggtgtcggcctccgaacgcaccccgaggcggggtgagggctggcagtcgcccctgcacccgccgctgcgagccgcgcccctcaaacccaggtatgggacctcggaaaatcgacccgctgccctgagtgctcaccacgtgaggaactggagtggccgagttcgccaaggcgccggggacacctgagcagatgagaactggagcctccagctgcttccagcgaatctacacagggagcgctctgggcaggttttgttcaagtggtacccgaggggacgcaccatttaaataagcaggcgaccggtggaggaatgtgggacaaagggcaattgtcacgccttgaattttagctttccagttcaacagtccgggtccttacggaaagggacgcctggagtttttagactgccttatttgataggttaatgggtgacagtagattaatgcaggtgacaatctgtagtgaacagagatcacagtccttagacaggtcatcgatcgtaaaggagagcaggaaatctgtgctactgtttccttgtgtttttactcaacaaacgtttctgagccccttcagcctgttgttggaaatagtagttattggaagattaacaataatatccgctttttaatgagccttcatgtgacacatacatgcttggcacgttttatattagtcagtgtaattcttttggtgaaccagtgtaattctcattacccttgagataggcattttcaaatgcagaaattactgtcgaatgattaagtcacttgcccaatcaactggcagagattaagatctttaatctaggtctgatttcagagtttgctctcttaatcacaatgtgtagatacgtgttataggtaggcaaaatgtgtacacttaaatgaagacacttgaaaacactgaagaaaagatcatttccagcatcaccactcaggacatattttaagtggcttgtcttgaaatactattaacacatgaatcacactcaaataatatgattctcaggttttccttctaaaatagacgctccagccaaatgtgctcagctatcaatccatttcaggcagtccttgttcatttgtatacaactttataatataccatctggtcctaggtaaacaatccacagaatgcatttagtctagcctagtgtatgataaaaaagctatatcagattttattttttgtaaactgatgttatttgtataatattttcagaaggaaataaagagggaaatagaaactaaatccaagtaattcaattggttaaacaaatatgtggtttggaattacgtcctaccagtgtgaaatgtactatatttatatattacatatgatgttatacatacttatatataatacataaattatatgtgtatattatataacttatatatatatataaagcaacctgttagagtaacacacaaaagaatccaccttgatccttctgggaattggattcacttctgggaacttctttaaagccaacagccctagatatgggaaaatgctatctaaacaaaattcatcttcttttggacacctagagttaagaacagaacttcaggcagctaatgatcaatacatttctatagtcatgttagaagcagaatagtctgaggttaaatctgtagactgcaaactcacctcttgactgccacctacgagccatgatatcttagccaagtgctttcttctacgtcttagtttcccatatcttagatggggatattggtttttatctcacggaattaaaatgggttaaatgagattatatgtgaatagaccctgacactataaaatactagcactgtatgattgtttagctgccttccaatttattgagaattgggctactgtaagttatggcttggaagtactgctattagacacagcttttgttttcccaagctatgtcatcttgctttataacatttacataatgccatgaactatgtgtaatccataccctattcttctttcacatctttcgggtgtctgatgtatgtctccaaataatattttcatgaagaatacatgaatgctctatttcctgagcctttgaatatatgggattgttcatttgttgtcttcacatatgagaaaaaaaattcagctgagaaaattcttaggtcatagtctttttcttcaaaaaattttaagtattttttctgttgtcttctggcatttcttactggagagctatctgagaacagctagatttttgtttcctcataaattacttgctttat

SEQ ID NO: 916866 - DNA, 4001 bp, Homo sapiens
cctggaatcatcaccaaataaattaacaaactagtgagcgagcttgaaaacacgcatgaaaatgcaccagataggaaacccaagttctaatccagatctagctgttaatgataataacaacaggttgacatctgagtcagcagtatgttaaagacaggcactctttctacgtattattgaagtgcatcctcctaagaatctctgaagttaggtgtcactattagctccactttatgtgtgaggaagtgaagctccaagagattaaggaacagtgcctggcacctgcagcgcctgggggacactgttctcaatgctagaatacacttaccaagacaatgagtcgtggagctgggtctctaacttgctgtgtgacctcaggcaaatcacaccccctctctgaactctaagtttccctggaagagagaaagaccactgctcaaaggggttttcggagggtgaggggataaaaacaagactcaataaagagacggagaactgaccgcctctactcgcgggccatagcgttgctaatcccagggcgagccccaagcacaagggcccttagggcggtggtcagaaatgagccttactgtttccagaccacaggcagctgtggcaggaccaaggtggtctcaagggctgggagagtggaggcttgctgggggaaggagtaaatgaagggaaagccggaggggcgcaggggcagggaagcgaatcacagaatccagtttgggcccaggatttgggtttcatcagaaataggggaagtgcaaaaagagaacatgagctggtgaaccgacactgacgcaacatgattttttaaaaataaaaatgaaaataaaaaagtaatcgggaggagcgtaacttgtggttcagaatgaaaatccagaacggcagaatgaaagcaagagcaagtgaaaaggacagctggccccgagccgtggtaactcaagagggaacacgcttaaactgcagcaagagggatttaagttagactcagggaagaaatggcccagaggatgttagacaccaaaacaagctgtactgagttctcctttctgggctacttttaaaaggcaaaggactacacaccccacccccgctgtgcccttccacctccagcttcggctggccgcctctccagcccctcgagtctcctccaaggccgcccacctgctttgctaagccgggacaggggggtgaggggtgggggatgggcctcatcatacttcagtgccctccagaagcaaacacaccaatttccacaccgggcttggtgctgcccagagagcaaatcttcaagagactagaaagtccaaagttaagtctgttttcaggagctgggcatgtcgccagaggcccagctggggctagcagaggtgcagacgagaccagaaatgctgctgcccatgtgctgctgggatcccagctctgtcccctttgctccccagtccagcataggaatagctcagaccctgcacacggggggatgggacacccagcccctgcttcagtccacacccacataccaacacccattcccatacacacactggtgccatttcccgtcacgtcccttcgcacacacatacctgtgtgcatggcaccaaaacctggctctctctgtagtccttcacaccccgtgagtgccggtctcagctggtggctgcctgcaactcccctgagtgcccccctcgggtacaagcacacccatagcatccaccgcccaaagccaagacagcttcctcctgggaggcgcctggcacccagctcgtcacgctcagccggcaggcagcgggcaggaacccctcacctgtgatcatttattgcagttcctgggccctcgggaatgccccgaggtttctcctgtccacttctccttccaccttgctgggcaccacctgcttcccctcccctcgtcagatgaccacccctgctttcacccactgccgtgaccagctgcccatcgctggactttcctgctccacaggctaatcactgagctgctcccacgctggatggggcggagctagggggcaccccttgtcctgagagtcgtgggcatcagacttgccctttggcctgaggttattgcaggtcctgccccccgctgcagacacgcagttccacagagtctcgcttcccagggctctatccctccagcccctctgagcagcagttggagactgcaaagacagagccagcccctccacttcccgctcacctcagtccccagcaccggctcctgtggtcagcttggctgtgggcatcaggtctccaggagagtcccaaggcagctgcttatgggaaagccaagagagccgggacctgaaagggaaactgccctccacgttcacgccttaccctgttcctcccagcgcagaatcccatgtgacttgtccagggactcccagacagaaagaagccgtgtgtgtatgtgttggggcgggggctgtgtgtgttggggagtgaaaggacagagaaataccaggagcagcaggagggactgaggccaaaagtttgtgaaccgagattacaacatccaacctcaggaagtcaagtcctctgtccccagcgctcccacccccatcccactcccactgtgaacccactgtctccagaccggtgccctccccgtgggcacagtcccatgatggcccctccagagctgggctgagctgctgctcccttgggcaggggaaggggctcagagactcacaccctgacctcatctcccctcctcctcctccttgcccttcccccttcccccttttcccctatccccctccagaaccatctccttcccagggatgaggagacgggtatgtgcagcacaggggacagccctctcttaccagagactccaggctataaactgagaaccttgggaggggaggtgacctcactgacgagggcaagggaggagggtgaatcacacgctggagttttccaccaagtacctgccctctgtggcttctaggcaaggccctggaccttcacaacccttctccttgggattttcctagagaaagcacccagagcgtacctcaagaagcaatgtagagaggacccaggattgggaccagacagacctgagtttcttctcctcctctatcatgtatcagtcacgacagctaggcaagggtcagccttggtttcccagtctgtcaaaggtaggtaacaacacaatatctactttgcggggttgctgtgagggtgcagggatatcataggtgcttaaggggaggtgtgggtgtttgttgtgtgtcctctggaagcagaggctgggatggtggggtgtctggtcccaggcacctctggtcactgcatagcaccaggcacctagctagaatttgtctggagtggcctgccagctatcaatggggaagggtattttttgaatacatgtgccctatgccgtgtgcccagtgagctcctccagaacagcgtcctggtcactgtccctgagcacgcccacctggtgtggggtacagcactgtcccaccgcccttcattcagaatagctggtgcctccttcaagacaaaggaggtgcttcttcagctctaggtggtatgaagggagaggaagttgcagggagaaagggaaatttccttttacatgtgcttcctctgtgtattttagaacttcccagcaggggtggggtgtgaagtgagactctcagtctgtagttttccatcaagcacccccacgatatgtctctcgggcccctctcagcctctcctgtggggttccacatgaagaggaaggcagagcaggtctcagctctcagacccattgcctctatgaaagcagaagccgggctgggggtcagctgtggcacagtaggacatggcccagccagaatccatacttgagctaccccggtgctcaggtgtggcctgtccctgcatgtcaggtccaccatggattgaccacagagttattgcagaggggacatcaaagtccatgtgatcacctagctacagctactccagaacaa

SEQ ID NO: 916867 - DNA, 4001 bp, Homo sapiens
ctcgcgggccatagcgttgctaatcccagggcgagccccaagcacaagggcccttagggcggtggtcagaaatgagccttactgtttccagaccacaggcagctgtggcaggaccaaggtggtctcaagggctgggagagtggaggcttgctgggggaaggagtaaatgaagggaaagccggaggggcgcaggggcagggaagcgaatcacagaatccagtttgggcccaggatttgggtttcatcagaaataggggaagtgcaaaaagagaacatgagctggtgaaccgacactgacgcaacatgattttttaaaaataaaaatgaaaataaaaaagtaatcgggaggagcgtaacttgtggttcagaatgaaaatccagaacggcagaatgaaagcaagagcaagtgaaaaggacagctggccccgagccgtggtaactcaagagggaacacgcttaaactgcagcaagagggatttaagttagactcagggaagaaatggcccagaggatgttagacaccaaaacaagctgtactgagttctcctttctgggctacttttaaaaggcaaaggactacacaccccacccccgctgtgcccttccacctccagcttcggctggccgcctctccagcccctcgagtctcctccaaggccgcccacctgctttgctaagccgggacaggggggtgaggggtgggggatgggcctcatcatacttcagtgccctccagaagcaaacacaccaatttccacaccgggcttggtgctgcccagagagcaaatcttcaagagactagaaagtccaaagttaagtctgttttcaggagctgggcatgtcgccagaggcccagctggggctagcagaggtgcagacgagaccagaaatgctgctgcccatgtgctgctgggatcccagctctgtcccctttgctccccagtccagcataggaatagctcagaccctgcacacggggggatgggacacccagcccctgcttcagtccacacccacataccaacacccattcccatacacacactggtgccatttcccgtcacgtcccttcgcacacacatacctgtgtgcatggcaccaaaacctggctctctctgtagtccttcacaccccgtgagtgccggtctcagctggtggctgcctgcaactcccctgagtgcccccctcgggtacaagcacacccatagcatccaccgcccaaagccaagacagcttcctcctgggaggcgcctggcacccagctcgtcacgctcagccggcaggcagcgggcaggaacccctcacctgtgatcatttattgcagttcctgggccctcgggaatgccccgaggtttctcctgtccacttctccttccaccttgctgggcaccacctgcttcccctcccctcgtcagatgaccacccctgctttcacccactgccgtgaccagctgcccatcgctggactttcctgctccacaggctaatcactgagctgctcccacgctggatggggcggagctagggggcaccccttgtcctgagagtcgtgggcatcagacttgccctttggcctgaggttattgcaggtcctgccccccgctgcagacacgcagttccacagagtctcgcttcccagggctctatccctccagcccctctgagcagcagttggagactgcaaagacagagccagcccctccacttcccgctcacctcagtccccagcaccggctcctgtggtcagcttggctgtgggcatcaggtctccaggagagtcccaaggcagctgcttatgggaaagccaagagagccgggacctgaaagggaaactgccctccacgttcacgccttaccctgttcctcccagcgcagaatcccatgtgacttgtccagggactcccagacagaaagaagccgtgtgtgtatgtgttggggcgggggctgtgtgtgttggggagtgaaaggacagagaaataccaggagcagcaggagggactgaggccaaaagtttgtgaaccgagattacaacatccaacctcaggaagtcaagtcctctgtccccagcgctcccacccccatcccactcccactgtgaacccactgtctccagaccggtgccctccccgtgggcacagtcccatgatggcccctccagagctgggctgagctgctgctcccttgggcaggggaaggggctcagagactcacaccctgacctcatctcccctcctcctcctccttgcccttcccccttcccccttttcccctatccccctccagaaccatctccttcccagggatgaggagacgggtatgtgcagcacaggggacagccctctcttaccagagactccaggctataaactgagaaccttgggaggggaggtgacctcactgacgagggcaagggaggagggtgaatcacacgctggagttttccaccaagtacctgccctctgtggcttctaggcaaggccctggaccttcacaacccttctccttgggattttcctagagaaagcacccagagcgtacctcaagaagcaatgtagagaggacccaggattgggaccagacagacctgagtttcttctcctcctctatcatgtatcagtcacgacagctaggcaagggtcagccttggtttcccagtctgtcaaaggtaggtaacaacacaatatctactttgcggggttgctgtgagggtgcagggatatcataggtgcttaaggggaggtgtgggtgtttgttgtgtgtcctctggaagcagaggctgggatggtggggtgtctggtcccaggcacctctggtcactgcatagcaccaggcacctagctagaatttgtctggagtggcctgccagctatcaatggggaagggtattttttgaatacatgtgccctatgccgtgtgcccagtgagctcctccagaacagcgtcctggtcactgtccctgagcacgcccacctggtgtggggtacagcactgtcccaccgcccttcattcagaatagctggtgcctccttcaagacaaaggaggtgcttcttcagctctaggtggtatgaagggagaggaagttgcagggagaaagggaaatttccttttacatgtgcttcctctgtgtattttagaacttcccagcaggggtggggtgtgaagtgagactctcagtctgtagttttccatcaagcacccccacgatatgtctctcgggcccctctcagcctctcctgtggggttccacatgaagaggaaggcagagcaggtctcagctctcagacccattgcctctatgaaagcagaagccgggctgggggtcagctgtggcacagtaggacatggcccagccagaatccatacttgagctaccccggtgctcaggtgtggcctgtccctgcatgtcaggtccaccatggattgaccacagagttattgcagaggggacatcaaagtccatgtgatcacctagctacagctactccagaacaaaacaccagcctctccataaaaaggagaaagaggggagaggatcagacaagccaagatggtgaatttccttgttggttccctcaaaaattatatttagcacatacagtgtgacatgctttctgtgaggatgaacagcaacagcccagcagtcctgtcacctctccttcaccttgtcagagaacagctgcctggttgacctggcccagggggtacagtttgactttcccccaaaagagctacctggtccctccctgtttttatctgactgcctctggccttagtcccaccatcttaatgttgagcccttcctcactcaagttttcctagcctccaagacccacttggtattcagaccagttagtaaacttctggaggccagagactctctaatgttgagcccttcctcactcaagttctcctagcctccaagacccacttggtattcagaccagttagtaaacttctggaggccagagactctctaatgttgagcccttcctcactcaag

SEQ ID NO: 916868 - DNA, 4001 bp, Homo sapiens
aggatgaggatagccacccagtgggaatcagaggccttgagtctctgttatgagggagaaggcaggggaaaagagggaggaaagagagcctctgggttcagagtatgtgatcagacccatgggggccttgagcactggagcctggggatgaaaaaatggggagttgggccccaggggagaagttggtaacatctgaacccaaatgtggatgttgctacagaattaggaatgaggcaccctgagaaatgaccctggaatcatcaccaaataaattaacaaactagtgagcgagcttgaaaacacgcatgaaaatgcaccagataggaaacccaagttctaatccagatctagctgttaatgataataacaacaggttgacatctgagtcagcagtatgttaaagacaggcactctttctacgtattattgaagtgcatcctcctaagaatctctgaagttaggtgtcactattagctccactttatgtgtgaggaagtgaagctccaagagattaaggaacagtgcctggcacctgcagcgcctgggggacactgttctcaatgctagaatacacttaccaagacaatgagtcgtggagctgggtctctaacttgctgtgtgacctcaggcaaatcacaccccctctctgaactctaagtttccctggaagagagaaagaccactgctcaaaggggttttcggagggtgaggggataaaaacaagactcaataaagagacggagaactgaccgcctctactcgcgggccatagcgttgctaatcccagggcgagccccaagcacaagggcccttagggcggtggtcagaaatgagccttactgtttccagaccacaggcagctgtggcaggaccaaggtggtctcaagggctgggagagtggaggcttgctgggggaaggagtaaatgaagggaaagccggaggggcgcaggggcagggaagcgaatcacagaatccagtttgggcccaggatttgggtttcatcagaaataggggaagtgcaaaaagagaacatgagctggtgaaccgacactgacgcaacatgattttttaaaaataaaaatgaaaataaaaaagtaatcgggaggagcgtaacttgtggttcagaatgaaaatccagaacggcagaatgaaagcaagagcaagtgaaaaggacagctggccccgagccgtggtaactcaagagggaacacgcttaaactgcagcaagagggatttaagttagactcagggaagaaatggcccagaggatgttagacaccaaaacaagctgtactgagttctcctttctgggctacttttaaaaggcaaaggactacacaccccacccccgctgtgcccttccacctccagcttcggctggccgcctctccagcccctcgagtctcctccaaggccgcccacctgctttgctaagccgggacaggggggtgaggggtgggggatgggcctcatcatacttcagtgccctccagaagcaaacacaccaatttccacaccgggcttggtgctgcccagagagcaaatcttcaagagactagaaagtccaaagttaagtctgttttcaggagctgggcatgtcgccagaggcccagctggggctagcagaggtgcagacgagaccagaaatgctgctgcccatgtgctgctgggatcccagctctgtcccctttgctccccagtccagcataggaatagctcagaccctgcacacggggggatgggacacccagcccctgcttcagtccacacccacataccaacacccattcccatacacacactggtgccatttcccgtcacgtcccttcgcacacacatacctgtgtgcatggcaccaaaacctggctctctctgtagtccttcacaccccgtgagtgccggtctcagctggtggctgcctgcaactcccctgagtgcccccctcgggtacaagcacacccatagcatccaccgcccaaagccaagacagcttcctcctgggaggcgcctggcacccagctcgtcacgctcagccggcaggcagcgggcaggaacccctcacctgtgatcatttattgcagttcctgggccctcgggaatgccccgaggtttctcctgtccacttctccttccaccttgctgggcaccacctgcttcccctcccctcgtcagatgaccacccctgctttcacccactgccgtgaccagctgcccatcgctggactttcctgctccacaggctaatcactgagctgctcccacgctggatggggcggagctagggggcaccccttgtcctgagagtcgtgggcatcagacttgccctttggcctgaggttattgcaggtcctgccccccgctgcagacacgcagttccacagagtctcgcttcccagggctctatccctccagcccctctgagcagcagttggagactgcaaagacagagccagcccctccacttcccgctcacctcagtccccagcaccggctcctgtggtcagcttggctgtgggcatcaggtctccaggagagtcccaaggcagctgcttatgggaaagccaagagagccgggacctgaaagggaaactgccctccacgttcacgccttaccctgttcctcccagcgcagaatcccatgtgacttgtccagggactcccagacagaaagaagccgtgtgtgtatgtgttggggcgggggctgtgtgtgttggggagtgaaaggacagagaaataccaggagcagcaggagggactgaggccaaaagtttgtgaaccgagattacaacatccaacctcaggaagtcaagtcctctgtccccagcgctcccacccccatcccactcccactgtgaacccactgtctccagaccggtgccctccccgtgggcacagtcccatgatggcccctccagagctgggctgagctgctgctcccttgggcaggggaaggggctcagagactcacaccctgacctcatctcccctcctcctcctccttgcccttcccccttcccccttttcccctatccccctccagaaccatctccttcccagggatgaggagacgggtatgtgcagcacaggggacagccctctcttaccagagactccaggctataaactgagaaccttgggaggggaggtgacctcactgacgagggcaagggaggagggtgaatcacacgctggagttttccaccaagtacctgccctctgtggcttctaggcaaggccctggaccttcacaacccttctccttgggattttcctagagaaagcacccagagcgtacctcaagaagcaatgtagagaggacccaggattgggaccagacagacctgagtttcttctcctcctctatcatgtatcagtcacgacagctaggcaagggtcagccttggtttcccagtctgtcaaaggtaggtaacaacacaatatctactttgcggggttgctgtgagggtgcagggatatcataggtgcttaaggggaggtgtgggtgtttgttgtgtgtcctctggaagcagaggctgggatggtggggtgtctggtcccaggcacctctggtcactgcatagcaccaggcacctagctagaatttgtctggagtggcctgccagctatcaatggggaagggtattttttgaatacatgtgccctatgccgtgtgcccagtgagctcctccagaacagcgtcctggtcactgtccctgagcacgcccacctggtgtggggtacagcactgtcccaccgcccttcattcagaatagctggtgcctccttcaagacaaaggaggtgcttcttcagctctaggtggtatgaagggagaggaagttgcagggagaaagggaaatttccttttacatgtgcttcctctgtgtattttagaacttcccagcaggggtggggtgtgaagtgagactctcagtctgtagttttccatcaagcacccccacgatatgtctctcgggcccctctcagcctctcctgtggggt

SEQ ID NO: 916869 - DNA, 4001 bp, Homo sapiens
catcaaaaatgtgttttacttttgtaatataaaaataaaagccggttttaaaaaaaaatcctgtcaaaggattgggagaggttgagtgggaccaggaattgtgagtaagatgaggtggtctaagtactccttctatgtctctctgaaatcagcgtaaggcagagatttactatgcgctctttttcttttttggtgatgacaaattaggagtctgtgacagtagagaagatgatataaataaaaagccacagttttaaccattcactgtcagaaatggcccattccagaccactgttgggattgaggatgactggacgtggcccacatttagttagcaactactatagactaggcacttcacatacattcttttcatttaattctcacaacaaccctgagatgtaagcattattacctccactttataaataaggaagttgcagctcagagaggttaaataatgtgactgctgctgccatatagctactaacttgcacagccaggacttaaacccactctgcccctgctctttcagttccatccctttgattacattggctgcctaggttcactggtgtgtctactaaaagcatcttctaatgactctgccttgattttgcagagtggcctcttttctggagaaggaggcagatggacttttttctaagcctcaagcaaagttcatgttaacagaactttctcagcagtaacctcttctggccacagactctactttggctctgacccagaaaattagaaagtcagtgaacaggccgggtgcaatggctcacgcctgtaatcccagcacttgggaggccgaggcgggtggatctcctgaggtcaggagtttgagaccagcctggccaacatggtgacaccccgtctctacgaaaagtacaaaaattagctgggcatggtggcaggcacctgtaatcccagctactcaggaggctgaggcaggagaatcgcttgaaaccaggaggcagaggttgcagtgagccgagatcgcgccactgcactccagtctgggcaacaaagcgagactctgtctcaaaaaaaagaaaaaaaaaaaaagtcagggaacagcaggcatctatgtttatctgataaattagggaatgagctcctttctacaaaggagaaactcaagtaactggtcccaagagggctcctcagtccttttgggaaggttgtctaaggtactgactgtgctggcctcccctccctttaccagctgatggatctctcccagtgatggaaagccttcccttctccaccctcccagaccctaggagaaacagtagccttctcctggctcccttagcctcattagagctgcttctcagaggtagcatgttgtgtctgaaaggtcatgagctgtagagtcagatgaggccaggttcaaacattagttttttctcataccaatgtctgacttcagagaagttaatgaatgactctgagccttagtttgttcatctgtaaaagtggggatgatagataggatatacttagctataagaattaaatgaggaaatatacatatgtatacacacttaatagaataacaggtactcaaatttttgttttctttcagtcctgtcagagttgatcattgttctcttttctcagagaagaaagactttgttttcttggagttaaatccagttgtctttcctctcaatctagggctctctctttccaaatcacagtgtcacttaagtcaacagccacccaagtttcagaaagtcaagaaaatagcacataatctttgcatttgcacacatacatgtcagaagcgtactttctaggcgagggtaagaaaaaagtcctttggttgtaagtcccatggatcccaccaacctgcagtctgagacgcagaaatagaaaaaaaagagaagaaaacatttcgaaccttagtgaagctgctgccagaggtccagtcaggggagaagaattatctaagggggaaggagaaggtgctggctatttaaagtgtggttccagaacgcctctgtggcacttgaaattctaaacttggcccagcccacattccacccttgtgcctccccctccccttttctcccctcccctcccctcggccactggacaacccacacatgagtgatttcgcagtctggggagtgtgcacgccctggcaggtcgggccagttgctggtgagcttatgaagtgtggtctcctccccggagctcatgtgcgcttcccacctggtgagctcagggtctctctggagggatcctgcctcccacccctgtctccaacacaagtgctcctataaatccatcaagaataggtattcctttggtcaggtgctgtgtagattaatttaaaaatacatttatcttaccgtttcgcagcttgcaatgtggaatggacgatgatttagaacaaagatacatagatacagaactctgagatgtcagaaaaacttcccaaacatacacagacatttatacacatatagaaaaagtctgaaaaaatcttcgctaaatgattaatagtagttacatttgtagagtggaactgagatcaggagatggcagtaagggagattttttccccactttttcaatattgtttagattttttaatatgctagaattttaaaatattttttaaatcaatagagaaaaggaagtgccaacgtttaaaataaagcaaagccctaaagctgttataagggaaggagcaggcggtgagcgcgaggccgaggtcatccagggagcttcgtttctctgcaggaacagcccacagaggcggctgtgagagtagttcattcagcctggagtctaggacagggcagagtcccacctcagccatgtgctgaagcacagtacatgtagtggaaacctgctcagactttgacaccagagagtgtggggtctgagtcctacgtatgccactgtctagcttgagatttcaggagatgatgactaactgtaaatggcagctgttattcatccttaagggattattcacagtgagcagtgagcccggaagtcttcttgaaggagacgggactgagagacccctgagctaagctgggctctggccagactgtgagaatgagttaggtaggggatgcggcaatgagtgagtgaggtgatagagacatcttgagatgacggagaagtgtggaaagaaagacggatcgaagagtctaaggtagtttccgtttccttgatccctcatctaactcaagggcatggggtaggggcatggaaacactgcatggtaatacctggagagcttcccagaagcttcttggaaattattattcttatgtttcagcggcccctgttcctctcccctttcaagctttcatctgttagactgagctctgtaaagcaataaaccaaaagcgtcctgagacagcctacaaactcatgtaaaaaaaagaccatcttcaaagcagtgctattgacttccatttttacgtatcactgagtggtacttactaatggcctactatgcattataaactttggcatttgtaatctaaaattaccagataacgggtgttttctcagataccattcagcctttggcaatgttgcacagccccttctgtgtcctcacatatgcaaacggttgcaatttccagcttccaggaaagactgtcagtgataaggacatcatcaggcttatcctgagttggttgtgagctgctgctgttgtatgaaggaatgttggctttacttaccaactcttttgtttttacataactgctgccatgttaccatgttgactcctattttattcctctccaaatctttgttatccccaatttctttttcctctataaagtgggaatggctatggtaggttttttgtcctgcttaggttgacaaaagttaaagaaaaaaaaaaaaagcttgagaaccactggtagataaatgttggcgacagtccctcacaacttcccgtctggggttccacacaaaacaggcatgactagccttgcatctacctcacgttg

SEQ ID NO: 916870 - DNA, 4001 bp, Homo sapiens
gtaagcggcagcgggctccggcattaggctggtcctccacttctgtaggatttatgctggacagaaagcctgaatttgctgttgagccgccctctttccgtgtgtgtgtgtgtgtgtgtgtgtgtctttaaccctcgccttcccttcaaaacctaacactgttcaaagaagatttagtccatcattaagtatttattaagaacgtacaagtcaagcccagtactgggcgcctaagacataaataggtctgtgtttcagcaatgatcttgcagaaatgaggttgggtgggtgaggggcttgttggggctgtgtctgcacataataattcctcaaaacaaacactttgttgctggcacagcagaaaagcaatcaggcattgacaggtagaaaatagcttttacagcatgggcgatgaggagccccaaagcagcatataaagcaaatccttcatttctcccatacgtcttaagtagtgaaccgcaaggatggtgcagactaagattgggtctacctataagatctggaggggaaaacggcaagaccagaagaaaccgtcgcagacttatttgcataagcacccaaacactgcttacgtcactgcgccggagtccggaccccgccccgtcttactccagcctttcccagctagggaggaggatggaaagggaaagcgggacgctggagagcgcgagcctgggggctttgcttcctaaaacgcacatcaaaggctgcttctcagctcaggaaaaataattcccgttcccgcagcctgtgccactgggtgggtcatgcctgttcccgaacgcctcgggcgtcttgattcattcttatgtatccagttggtgcgctacgttagagtgcaaggatttccctgtactcaataccgtcttcttcccagtcacacacagaccagcctagtgaaagaaaggtagaaacgatctgggtttctaactgcttcccatcttcttacagtcccagcagcaccaccctcaccgccacactctcaaattccaggatgcgcagaaacacaggagccgtgatttctccagcagccacgtgcctttcgtacggcgaaaggccccctttcgggccatttatcacaggatacctcaagcaaaggggaactgtggtcacgtgaaaacactctgtcctcggtagtcgccttctgcctttgctaaagcgaacggaagcgaatgaggaataaagctctctgctctccccgccccatcgcccacctgcacgaggtttagcttccaattcacctcgcgtctctctctgccccaaccctcccaactttcctcttggactttcccgtgttggaccccacccttcaaccaaccccgacttggcttggaaacgagtaggtctctggggatgctgtgggcaatttccacgacgggaagaaaggatggcggcacgtttcaacccatgtgcttccccttacatgtgcagcctgtcgccccccaccctgattgtacagagatgcagagttagacggttgcccgcccagcccagcttctccctcccagggcttttgagctgccctccctcctcccaccccaggacgcagcgagtccttcccggcatccatccatcaattcgttcccggtgctggtgcccaggctcctgggtggctaatggcgagccccacctcacccccagttgtgcccttagcgtaggcgcttgccattaccgtcagtgtgtcttgaccaagcgcctcttgctgcttccacgtccgggcagcagcagcagcagtcgcgaaagggtagggtccaggtggctgtgacggaggccgaagaggagctgttggcagagaagcagcttcttgcctaggttgggacccggagctgggttttgggggtcgccgccctgcaggctggcaaggagagactcgtgagcgcctgtgtgtctgccagggaaacagcacgggatacaggcgcgcgggtgcgggtgcgcgtgtacatgcgtatgtgtgtgtgcgcgcgcgcgtgtgtgtatgtgtgagggtgtgacggaggcgcccacgtgctcggcccgcccgtgttacggccgcctaccggctgcagaggagaagggtaggctgtgggcggcggcggggcgcggaggggtagccaggagcgcaggctgggctccgcacctccctgccccaaaacccattgatgcagcggccactgcggctgccgagcggcgtcttcccagagcccggggctgtgcccgcccgatgcaggatgcaactgaggaagcccgctccaaagcaaaacaaaacaaattcctccagccatgccgtctttctccaacccactcaagcgaaagaatggacaccagttaccagccgctgacttttgtctcagtgagaataataataggcatggtgctacctggcaccatctgaatattctccaagagtcagtaatgggactagaaaaaatgggtgacccaaagaacccttttccctacctattcccccaagccggccatttacatctcttgcgaaagaaaaagcctctgggcattggcttctccgtcaggcggtggcctcatagcgctcagtgattctcgccaggttatgaaaggccgttttagaaagctggccctcacccaccctgtgttggtgcctcagcagcagacttttttccaaggggtctcattacaagatgaagcctgacttacctctgctaacaatcaaggcatgctcgtaattaagccacgtggagaattcctaaaatatacacctctgaacacaaagcttagcctccttttgaaaatggctgaaccgtcccctaaacagtgcgtatgctctaaggatgaaattttccgtccttgaaacgttcaaaatttgaaagaaatacaaaatgaacctagaagctaggtagaaaggttcagtaatttagcaaagttaatttttcacttccagattattaatattactcttaaaaactacttttgtgcacttttaggccttttaacaatcccttagatttttacggttcgtatccaattaagattgaattaaattaaaaaggccattgcaaacaggtttttcatgcagtgaaaaatctcttggaaagaaatcacaagacctaaatttcaggtcagaacattgctactaatccttagcttttaaaacagccaagagagttttttctcagcctctcttccaatcccaactttgaaaaattaaaagttaagaaattaaattagatttgattccctgatacgcctcccctgccatgagtaaataaatgctctttgatagatgcgccacgtgaaaaaataaaaacagtcaaaataaaccttttataggactttttttgctttttacttcacattttggtgacaggcaaatatttaatgttgatatataaagaaactgaaatacagtaccaacattatcaataacaactgagaaaattttaggaaaataaggagagctgtgtccaccatgatcaggattaggattatctgtgggaaacaaagttatccatatgctggcagaaatcgtttacggtagtaccaagaagtacgaaaattatttctctcccacgctttttcactagtgtctgatacctaattccaatacatatgcataggtcacaaaatatttgtagagcgatgccctccataatgactgatactaatttatgtctcaatgccaatgaagagaagtaggagaaagcaactattgttttaagcttcccactaagtacctggggcttaataatatcttatttaatcctctcaactaattaatgaggtgatttttcctaatttagagattagagagaggtgatactcaaaaaaaattgcaaaaagtcagaaaacttgttcaatgacagaatggagaaataaattcagatatgctggcctcaaacttcatgtgcttttatactatcctgtaaccctttaacaaattatctattttaacaggaggaaagggtggaatctcaacacaagtggtaggcaactttgaaaacaataaatagatgaagaatggagagacc

SEQ ID NO: 916871 - DNA, 4001 bp, Homo sapiens
ccaaggccctgcccattcagcgtgcagatcagatacgcccttcttcctgagaacccatgaaaacctacccagtcccacctggcccccagcctgaggccagaatgccagggctgcaagggacttgggacttgagccaagattcagagtctcaggcttctggggcaggtgggtgagatacatgtgggaagtgggcagtgggcgggattgcagaagccctcaaaacaaaacaaaacaaactctacttctaggggtggacttggcctctgggccaccagtttgagacgtagagaggcttgcccaccacattttacagagcccactaagcaatgctgttgttctgtgtcttacaaggagccaagctttacatggatgacctcattctatcctcacgacatgccgagcgggggtagcactagcattccattttacagatgaactaactgaggcacagacaggtgaagccaggcttgtttcccccctgcatcacgcctccctcatgcagtcctcagaacaattctggaaatgtcacccccccgccccccaccccaccctgcacagcagggagaggggctcagaggagtgttttttgttttttgtttgtttcttcagatggagtctcactctgttacccaagctggagtgcagtggcgcgatctcagctcactgcaacctctgcctcccgggttcaagtgattctcctgcctcagcctcccgagtagctgggattacaggcacacaccaccatgcccagctaatttttgtatttttaacggagacggggtttcgccatgttggccaggctggtctggaactcctagcctcaagtgatctgccggccttgacctctcaaagtgctgggactacaggcgtgagccaccacacccagcagaggaattccagaacctgcccaaggtcacacagcaagagggtcacagagcccacagcccctccgacagggaacttaagggcaagaaggaagttgagttgctcaaagaccgcgggttagcagtggggccgggctggtcaccaccatgtgcctcttccctcaagaccagggccaaaatggcttcaatatatttcaaaggaattaaactggaaaaacaaaagtcctcagcaaactaaatttcctgttttggctttttcatgtgttctacgatgagtatgtcttatttttgcaatcaggaaaccaaaccccataaaaacgtttttttctttaagtctgcgcaggtgtttctcaatgtactggcagcctgaggggagggagaggaggtagggaggggaagagaggtcagaaaggcgcctgtcccagccaggttccttacctgtccacggaagacacggcccttcctcttctatggttctcccgaacccctccaactggagtccgagttactctatttggcaccaagttcaaacaggacacccctggtttcaaattcgtctcggccacttactatctgtgtggccttaaggaagtcacttcacctctctgggcctcttattcctcatgtgtgaaatggacacaaatgctggccgacgcggtatacaataagagctcaataaatgttcgcgtccctgatgtccccaacacctgaagatcagcatgcgtctcgtctctctttgctgccgatttattttactgattcactagtgagcatttattgagcgccttctgtacgcgtgggccgatgcccagcgctcggatggtcgccgacctgctaagggacaggggcgggaaatcggggctgcgcttcccaggaaagagacctcaggaacatctccgtgctccgtttcccgtccggacggaggctgagaagtcgaactcggggcgcccgggtcctccggccgtgcggggaggcggctctttcttacctcgggccgggcctgggaccagcaaactccgaacctcgacctcgcagggcctcgcagccttccaggtccctggccgccggaccgaccttgcgccagcgaagccgccagtccgggtgccccgcctgctgcagcgtccgggcccctactcttcccgtccgggcccgccccggctcgccccgccccggtctcggccacgccctcaggacacgccccctcggggctcgccccgcccctgcccttaaaggtacagctcccggggagcttcgtagggtcttcccactctccaccgtcctctccctccgctttgaaactgagatacaagccgatgggtaaggactgcaggaagccggagagggacatttagagggtgaaactaggaggttcatttcccgagggtagaggaaccagagggtgtcaagctgctcctggtaatgaatggtgacaaagaggtttgggaaaatcccaggtggagaaagccccaccctgcccaggaaagttctcgcggtttcactgaaatccttctgagatcctaattgggttcaacattcccctctagtagcatagctttttttttttaatttaaattttaattttttaagccagggtctcactctatcgcccaggctggaatgcagtagcagctgtcacggctcactaaagcctcgacctccgaggctcaagcaatcctcccacctcggcctcccaagtagctgggactgcaggcaagtgccatcatgcccggctaattttgttcattttttgtaaaatgttcttactatgttggtcaaactggtcacgaactcctgggcttatataatcctcccgcctcagcctcccacgtagctgagaccacaggtgtgtgccaccaaaccaggctagtttttaaaattttttatagagacgaggtctctatatgttgcccaagttggtctcaaactcctggtctcaagcgatccttctgcctctgcctcccaaagtgtcagagctgtgtaaaccagagcaactccatctcgagtggggctgggtaaaatgaggctgagacctactgggctgcattcccagacggttaaggcattctaagtcacaggttgagatagaaggtgggcacaagatacaggttatcataaagaccttgctgataaaacaggttgcagtaaaggagccagcccaaacccaccaaaaccaagatggtgacaagaatgacctctggttgtcctcactgctgcactcccatcagcgccatggcagtttacaaatgccatggcaacgtcaggaagttaccctatatggtctaaaaaggggaaacatagataatccaccccttgtttagcatatcatcaagaaataaccataaaaatgggcaaccagcagccctcagggctgttctgcctatggagtagccattcttttattcctttactttctcaataaacttgctttcactttactctatggaatcaccctgaattcgttcttgcgcgagatccaagaaccctatcttagggtctggatcaggacccctttcctgtaacaaaagtgcttggattacaggtgtgagccaccatgcccacctttttatctaatatttaaaatttgtatttaattttttcccttttctttttgctaatctctgtattgttccaattttagtatatgtgctgccgaagggggcacatagcatcgtttttaaaagaaggtggcaaacaaatcaagaccgaggagttagtgatctgctgatggatgtaccagtatctccccctatttccagtttcccagcctcctggggaagctctgttcatcctgccttttcttctgttggggggatgggggaatgggaggaggcaggcatggggcctggacctggggtccttaaggctggagtgtgtcctcccaggccactcctgcctgcagccccacttctgccattagcatgcatctagtcaccccatctcttatccttacggtaggacctgcttcctcgtcatgggcaggacccaggcccaacgccaagcctggcattcaaggcccttcagcatccagccctagcacacctttctgaaatcgtctttcacccctacctccacctcctgcccagtagtgctccctgttccctgaacgtatcggcctct

SEQ ID NO: 916872 - DNA, 4001 bp, Homo sapiens
aaaatttatcaattatttttgtgagacctaaatagaaatttatgtgaaaaggacctagaaatttgaatagcattcttaatatgaatcaaaactgattgactacagcatagtatggccatatctctagctattttttatattgaataccatttgtggatattctctcttcccactataaaccttctcagagtgtattcttaagagcaaactattttcacctagttttataaatcagattttatatttaaaagcaagtcctactaaatcaagtacaaatcaaatttggaaaaataatttattctactttacatgttaagaaaagaaattagatggatcatgacctcattgcttttcccctaaaacacatgggttgcctaactagtttggttttattcgcagagtgaaagaaatcagtggctattctgactcatgtctagtgctaaataatctctgtatttataaagctggtcctactagcttctagcaataatgccctttcaacttatttcaacaacaaagtttaaagcaaatttgttaaaaatagttctttcatgcttcctaatgaattttgcttaatgagtatatttctaagttcagagaaacagagaaacctaacttgctattaagcaattgcctctcacttttacctgataaacttgtgcttacagcattttgtcttaacatccacattaatatctaaccttgctaaactccaaagcaatcaaaaattaaagacctcttgtttataaataccacttgacttttctccacaaatgcttttaatattaatagctaatatttattgaaagtttacaatattccagtcattgtttcaaacataaaagaatcctataaggtgggaatgttgctattacccttttcagatgagaaaactgaagcacaaaaagtttttcttaattaacataccatttcaggcaagtctattttttttagatttatatcataattctccaattttgtatacatgtttaaatttccccaacacacatataaatggaaaacaaacttctgatagggagaaaatgagtgacagtgtcttagttttgaaaccacttgcaggcactagctatagaatcaggacaaatgtccagatcccttggtttatcataaattcaaatttgtttgaatataaatgactttgaagctagaaaacagaattttctctgaaatagaaaaaaaaatcagaacagctgacaaaatggccatttttcttacaggaaattattgttatgttgccaaagcttaaagaaaacatttgttttgctgggtaattgcatacaaatcaacaaagcatttctgtgcaatgagccattttcggagagtgactcccacatttctctgggttagaaaccctgcaagagtgagcatggcctttgatccagaaaaataaatcctgccacagtatgtgtgcctggaaatttttaggatcctgtcttccatttaagtctctcaaagccatttaggactaacttgcctgaatcaataatcctgtgtagacacaccctcagttataaaaccaacttctttaaagcaagaaattatcaatagaacaggcaatatggcattaatattagatcacttcatgcagataggagcaattttaccaggactgtcgtattttaaaaactagtgtacatgcacatatatccacatacaaaaattccataccttcaacttggaaagacatcttattctatgggtttcaattcttttctcagtttctcccatgttgctcttcagggtgttccaagctatttatgttttaaatcttgatatgtcttacttctaccctttcaagcaaacaaaaaaatatgttaaattaactacaaaattgtaaagcatcattcttttgaagtaagtgctgaaaatgaacaacataattgaaatccattgcattacaaaaatacctggaacgctttaatacagattagaaaatcatggtgttagagaagatttagttgttggttttctatttcaaaaggtacatcaaataactttagtgactctttagtgagattaaagatattagaattgtttgttatgatcttgcaaaataatggtcacatggttaaaagaaagcttttcacttctctagccaaaacaaatagtaccaaaagacttccatgaaaatagctacttttaataacacacatactttgagttgtgtttgtactaaaaacctgcttcactaaccctaccaaggctcaaaaatctttttttggccaggctctcttttcaagttatttgcattccaaggcttccctagagtctcaggaagggaaacactttctggggcactgctgatacatggaaacctggggagacacggaattttaatcatgaaaacaacctagtaaaaataacaaacaattctatgatctggaaaataatcccacgattgcaaactaagatgtaagacttaggagattaaacatataaatgggtatctatatgtagctatacgtaataggtatagatatatgtggaaatatatgtacagatgtataacatacaggcacacatttttatatgtaaaacaaaaagttgaattaaactcaaataaattctactaatcccatcaaagattttgtttgttttacatcttgaaactaaggcaataatttgtatcaaaaccaaagtgtttcactttggcaatatttattctagtttctagaatgatttcttaacagtatccccagcattaattaattaagtcctttaaacaatatccatttaacaagtgatcctgaatggcactaattttttaaaaaaccaactgctttacctctacaaatgtgctgaatcccaaacacacacacatcaaggcatagtcgctgcactattatgtttgagttttgttattttaacacattctctcacagatacaacaaatacttattgaacatctactctgtgccagtcatggtgctacgcaccagcattcagcagtgagcaagaaagccaagtacgtgcctacagagagtataaactagcgagagaagtatgtttctgtggaagatacttggacccagattccaaggaacttaaactttcattgggaaagataaaacttttaaataaaacacattggaatagaaccagacagtgtagaaggaaatgcaatttgcttggtatgtaagtggtgaaaaaattcacaggttattgttctgaactgccctcatttctttcttctcgtgcatttagaacccaatctctctccccttttctcttctctctctcctaaccattatcttagcccaatatagtcaccgtatcaaacactaagggagagaacttattcttctcccacgtcaaaattgccttcactcttctttgtggctaaaaacattactatattaaatgtctattttttcatatatagccagagggcataaaagctggaggtagtgccacagaaaatcaccatataggggaattctatatagttccctccatgaattgtgacactaagtaaccatctagagcaggttttttcactatgtctggaagatttgcttcaaaatgttttaacatattgaaaaaaggggttaaaaaactattatcttaactgaagtaagaggtaatatttaaggctaagcacttgaaaagaattacatgggattaaattaaccctaaactttccctagttttccaacttatatgatgaaaatattttatattttcagatacatttcaaacatcttcatggaggaaaataaacaaattaacaaaatctattccatttattcaataaaaatccataaaatccaacggttaatatcatagtcattgttgtccatcttggccccaaatcaggaaattccgtgtgccgtcttttcatcttctcgaggctgtgctagtgccagccatgtgaacagtcctcttttgttagcacagtgttgtttacacagtgacttctgctcccaggaccacacagtgtcaccaacaaatccctgtcaatcatcacttctaatgaaaaa

SEQ ID NO: 916873 - DNA, 4001 bp, Homo sapiens
tgaaagaaattctaatcaatatagatataaaattctcaaaaatatttatttctgttgctctgtcaagatttttgaagctgcttagagaccagccggattaaaaatttttaatttggcaaagataaataaatctttgctcagcttatcaaagaaaattctgcaatagacaatgcccaatttaatttttttaggctgatataatctacttgtagcttcaaaaaccaggtgactgtaagagataaacagatacggttactaatccttttttcaatctagataaaattgtaaggtatatatctcagaaattggcaaaatgaaagattctaataactaacatattcttctgtaaaaattttgattgttttcaacaaacttgaaagaaaaccaacttatcaattgacagtaatttttgatattgcaacacaatttgaattttgacatgtaactacagagggttcaaataaccaagcgacattactgtagtaaaatgccttccttcaacaacatcttcatgtaaacatatttcctagtgcttacctctataaaacaataacagaactgataataaaccttgtatcaatctagcaataagcagagcacagccatggttcaatattgcacagtgaccttcatagagacaagataaaactagggtttctgtaagtgaaaactgcctttccagatcaggtgctaatagatttcaagaaagaaacacgggcccatgaacaagacagtgcttcaaaagacactgtctatgtatgtctttcttcccattctggtcagcttgccttagtggctcagcaacaatatgaaatgttgggtcagtgcagtgggctgtgatcccagcactttggtaggccaaggtgggcagattatttaagtccaggagtttgagaccagccttggcaacatgatgaaaccacatctttacacacacacacacacacacacacattagccagaagtggtagtgcatgcctgtagtcccagctactggggaggctgagatgggaggatctctttagctcaggaggtagaggctgcaagtgagctgtgatcgtaccaccacactccagcctgggtgacagagagagacactgtctcaaaaataacacacgcacacacacacacacacacacacacaacaaaaaacaaaaaaaaaagaaaaagaaaagtgcagggagacatactgcagttagagcaagctattcctgaacaaggtgatacggccacctccacaaaatctactgtgcacagagaagaaaaagtgcttagaatgctggtcctggggaatagtaaattatcccatcgagaggcttgtataacagtttttttcttcagatatttagatatttctcaacacctgggagtgggtggtacactcaagccaataatatcaattgctaaaaagattaattcacataaaataacagatccttccactactatttcactaacaattgcttaccatcttgtcaggaagatgatgatagtaacatagcaggcacttcacaaagcaccgtaagtgtgctgtgaaataaccaaggtagtcccattaaaatcaggaacaaggggagaggagccaagatggccaaataggaacagctccggtgcacagctcccagcgtgagcgacgcagaagacgggtgatttctgcatttccatctgaggtaccgggttcatctcactagggagtgccagacaatgggcgcaggtcagtgggtgcgcgcaccgtgcgcaagccaaagcagggtgaggcattgcctcacttgggaagctcaaggggtcagggagttccctttctgagtcaaagaaaggggtgacggacgcacctggaaaatcgggtcactcccacccgaatactgcgctcttccaacaggcttaaaaaacggcgcgccacaagattatatcccgcacctggctcggagggtcctacgcccatggagtctcgctgattgctagcacagcagtctgagatcaaactgcaaggcagcagcgagactgggggaggggcgcccgccattgcccaggcttgattaggtaaacaaagcagctgtgaagctcgaactgggtggagcccaccacagctcaagaaggcctgcctgcctctgtaggctccacctctgggggcagggcacagacaaacaaaaagacagcagtaacctctgcagacttaaatgtccctgtctgacagctttgaagagagcagtgggtctcccagcacgcagctggacatctgagaacgggcagactgcctcctcaagtgggtccctgacccctgacccccgagcagcctaactgggaggcaccccccagcaggggcacactgacacctcaaacggcagggtactccaacagacctgcagctgagggtcctctctgttggaaggaaaactaacaaacagaaaggacatccacaccaaaaacccatctgtacatcaccatcatcaaagaccaaaagtagataaaaccacaaagatggggaaaaaacagaacagaaaaactggaaactctaaaaagcagagcgcctctcctcctccaaaggaacgcagttcctcaccagcaacggaacaaagctggatggagaatgactttgacgagctgagagaagaaggcttcagacgatcaaattactctgagctacgggaggacattcaaaccaaaggcaaagaagttgaaaactctgaaaaaatttagaagaatgtataactagaataaccaatacagagaagtgcttaaaggagctgatggagctgaaaaccaaggctcgagaactacgtgaagaatgcagaagcctcaggagccgatgcgatcaactggaagaaacggtatcagcgatggaagatgaaatgaatgaaatgaagtgagaagggaagtttagagaaaaaagaataaaaagaaatgagcaaagcctccaagaaatatgggactatgtgaaaagaccaaatctacgtctgattggtgtacctgaaagtgatggggagaatggaaccaagttggaaaacactctgcaggatattatccaggacaacttccccagtctagcaaggcaggccaacgttcagattcaggaaatacagagaacgccacaaagatactcctcgagaagagcaactccaagacacataattgtcagattcaccaaaggtgaaatgaaggaaaaaatgttaagggcagccagagagaaaggtcgggttaccctcaaagggaagcccatcagactaaaagtggatctctcagcagaaaccctacaagccagaagagagtgggggctaatattcaaatttcttaaagaaaagaattttcaacccagaatttcatatccagccaaactaagcttcataagtgaaggagaaataaaatactttacagacaaacaaatgctgagagattttgtcaccaccaggcctgccttacaagagctcctgaaggaagcactaaacatggaaaggaacgactggtaccagctgctgcaaaatcatggcaaaatgtaaagaccatcgagactaggaagaaactgcatcaactaacgagcaaaataaccagctaacatcataatgacaggatcaaattcacacataacaatattaactttaaatgtaaatggactaaatgctccaattaaaagacacagactggcaaattggataaagagtcaagacccatcagtgtgcagtattcgggagacccatctcacgtgcagagacacacataggctcaaaataaaaggatggaggaagatctaccaagcaaatggaaaacaaaaaaaggcaggggttgcaatcctagtctctgataaaacagactttaaaccaacaaagatcaaaagagacaaagaaggccattacataatggtaaagggatcaattcaacaagaagagctaactatcctaaatatatgtgcacccaatacaggagcaccaagattcataaagcaagtcctgagtgacctacaaagagatttagactcccacacattaataatgggagactttaacacc

SEQ ID NO: 916874 - DNA, 4001 bp, Homo sapiens
gatatagaccaatggaacagaacagagccctcagaaatagtgccgcatatctacaactatctgatctttgacaaacctgagaaaaacaagcaatggggaaaggattccctatttaataaatgatgctgggaaaactggcaagccatatgtagaaagctgaaactggatcccttccttacaccttacacaaaaattaattcaagatggattaaagacttaaatgttagacctaaaaccataaaaaccctagaagaaaacctaggcaataccattcaggacataggcatgggcaaggacttcatgtctaaaacaccaaaagcaatggcaacaaaagccaaaaatgacaaatgagatataattaaactaaagagcttctgcacagcaaaagaaactaccatcagagtgaacaggcaacctacagaatgggagaaaatttttgcaacctactcatctgacaaaaggctaatacccaaaatctacaatgaactcaaacaaatttacaaaagacaaacgaccccatcaagaagtgggtgaaggacatgaacagacacttctcaacagaagacatttatgcagccaaaaaacacgtgaaaaaatgctcatcatcactggccatcagagaaatgcaaatcaaaaccacaatgagatactatctcacaccagttagaatagcgatcattaaaaagtcaggaaacaacaggtgctggagaggatgtggagaaataggaacacttttacactgttggtgggactgtaaactagttcaaccattgtggaagacagtgtggcgattcctcagggatctagaactggaaataccatttgacccagccatcccataagtggatatatacccaagggattataaatcatgctgctataaagacacatgcacacgtatgtttatagcggcactattcacagtagcaaagacttggaaccaacctaaatgtccaacaacgatagagtggattaagaaaatgtggcacacatacaccatggaatactatgcagccataaaaatgatgagtttatgtcctttgtagggacatggatgaaactggaaaccatcattctcaacaaactatcgcaaggacaaaaaaccaaacaccgcatgttctcactcataggtgggaactgaacaatgagaacacatggacacaggaaagggaacatcacacaccggggactgttgtggggtgggggagaggggagggatagcattaggagatatgcccaatgttaaatgatgagttaatgggtgcagcacaccaacatggcacatgtatacatatgtaacaaacctgcatgttgtgcacatgtaccctaaaacttaaagtataataataatgaaataaaaaaagaaaaaaactgtactgagaagactttttgcttatttaattggagataaattatctagaaaatatatttcccttcaccctgtatcaaacttgagttgaaacaaggaaactgaggtggttatgtgactttgagacacctgttttttatgtttgccaattaactcttccctctactcccacccttggctgccttcatccagttaagaagacatcaaagaaataaggagtctagtgtgatcagtcaatgtagttgacaaaaataattatcctgtagcatattttaagaaggtaactagagcttcatttttgagacttgatttttatttgtttggaaattaataagaccaagatttgaaactttatatttaaatatataaaggtattattttctctactttatttttaacagtatataaacctgaggctcttctactcccagaaggaatatttactatgttttaagggctcagaatgtaagcgtgtggaagacacagagcataaaattcgtaatatttttcaagaccatcaaaatcttcttccgtgaaaatttcttacataaaatatatgtaaaaattagagaatctcaatggttcttacctggatttagaatcctacagcaactgcaacaagtccaccctttattcctcttaaagtagttggctttttgaaaacaagtccagtgatgattaaccaccttattatgtcattgctctagtcaaacatataaaacctagttagttttaagagttcactccagttgccaatatttaaagattatatttctcagaattctcacattattttttgttaatcttaacaagtaaaccttacttttgggaatggcttttacttgtttattcaattaagttggtggcataagatttttttctttaaaaatatgagtacaataaattattccaggtatttaaaacttccaaataggaaataatttaagacaaataaaaaatatgcctacaggttacattggcatttaaaaattaaaatataccctctttgcttggtacataagtatggttctaacgtggtatgtatggagactggagataccacctggaataagagagtcccaattaactgcaagaccatttttctgaatgatgaaaattaagactgctttatgcgatagattctttacatcaaaacaggaaagaattattaatatcacagtttccttttattgacttgacttgtggagaaaggaagagcttaactcagttaaaagttttcttgagtagagatgaagtttaattaattcaataactcaaacattttagactctcaattataccttggacattaagctctcttctgaaataaagtacagacccttctctcacataaatatatatatttcagaaaagtgtgaagatatatgtatgtatatacacacaaacatacatgtatacatatatacacacttttacctgtatacacatatgcacatatatatatgtggtaatgtgaggatgcatatatgagaatatggttaccccttatcattcatgggacatttgttgatatggttgcagcaaaatgtatttgatgtctgtgccacagttatctgattgattagttctattcttggttaattattgagagtattggaatcatgagacaaactaaagagtagtgtagaggggaagaatgactgtgcagaactgagaaatgtagacccaaggccaaaatattagagtaaggcttccaaatactctgctgagtaagaatctactggcgagttgtcaaaatagcaatccagtcccatacccagcagattctggctcaggagaccaaagattatgcctgttaaataagcactttgaaaaattttcatgtactgccagattttgatatcataacaggaatgcagaacattttccatcatttttatggacttccttttattcacaatgggaatacagtttgggttttctcaggctaatggttttctcctcagacatccatttcattgaaaacacatcaacatgtttggagactaatatatatattatatacaatgaagataaaacagtacaaactaactaacaacctttataatcctgagctaaaggtgccagttgtaaaattctccaatattttcagaggtcaaagagcattctctgtgccccttttctcttcctaattgtgtaaataattagactgctcattttgtgggatcatggaaaaacaagagtacaccaggggaaagatgttgcaaaacatctttcaagatcaatattatgctaacagccacgcatcagttagatgacaaaaattgatttaaagaatcagctgatatttttttcaggaacggctatcacagctctgatgaaatatcatggcctttgaagtctgaaagacttaaatgccgatatgtctctgctacctgccagcagtataaacatcagtaggttatttaccatttctgagcatcagtgcactcatctataaagtaagaagtctatatttggaataaagatttagtgtatgtaaagtgccttacataatgcctggcacattatagattcaacacctaattagattaattgtatgatatttgcatattataaattttagagcagttaatttatattaaatgaatacaaataaaatctctgagat

SEQ ID NO: 916875 - DNA, 4001 bp, Homo sapiens
ctatgcatatcatgtccattcttggaatcattcaaagatccctcttacaacaaaaataaaacttacacttcctatttgagggtcttcacagcctaaatgaatccaagtttttagtcccatttcccaatacaaccataagcacttgcagatgtatggaaccactgtcccaacagaaaagctctctaccttcatgtatatgtcttccattcctggaatgtccttccctatctcttggctgtaatgcggctccaaatcacaccactttaatgtttccctatttacctctagttgaaataaactctctcatcctctcatccttctgtaccactggagaacatacccgaataatcattacttttttctgttatttcccgtactttccaagacaactattccacacctctctcttttatgttcagataaaatacccatccagaaaaataagaaatgtgggcacttggtttctcatctctcagaaaggttaaattgtatcaagtaggccgggagcagtgactcatgcctgtaatcccagcactttgggaggccgaggcgggcagatcacctgaggttgggagttcgagaccagcctgaccaacacagagaaaccccatttctgccaaaaatacaaaattagctgggtgtggtggtacatgcctgtaatctcagctactctggaagctcaggcaggagaatcacttgaacccaggaggctgaggttgtggtgagctgaaatcacgccattgcactccagcctgggcaacaagagcgaaactccttctcaaaaaaaaaaaaaaaaaaatgtatcaagtaagtacaaagtacctacaaaacttgaatatcaatttagccttgaataaataccacactttttacttcattgtggcattttaagccttatttagaagcgtttaatatattttgctctgaacatattatttctgagttccaaattattgacataaataaatgttgaggacacaatatgtttatagacagagccacaggcatttgtatgcagcattgcaactcttccctgaacagaacaggtcagttcttcacagtttgattgggctgaagtagagggcagaatcttaccagcctctgcttatttctgtttagcttttcatatttaaggggttatagaaaaccagtgcaggccaagtgacccagtttctagcatgtacctatggaactgaggaggataaaagggaaaacagcatttcctaacttcttagattgttcagaggagagaatttctgcatccccaccttactttcacaataaaaataactgtcttatcagggaagccaccttcctgaatgggtgaaggggaccattatttattgagctgttaattctttccaagagctgtgcccagaagatttttttctcttatttgaacagagataaaaaagttatctagaaaatctctttcccctcaccctaaatcaaacgagttgaatggaggaaagtgaggtgattaagtgactttgaaacatattttccacccctccacccgcccactcctacttatccagttaaagtgaaatcaaagaaatagggagcctggtatagtaattcaatacagtttatacaaataattatcttatagtatattttaagagagtaactagaagtccatcctttcagacttcatgtttcatttgtttagaaagcaatagaaataggactccaaactttatttttcactttataaaggtatgatttactcttatttttgagtatataaatctgaggctcttctatttctagaagggatatttacaaggctttaagggctcagaacaaaagtgtggagaagacacagagcataaaatctgtaatatttatcataactaccaaaaacattttcactgaaatttgttaaaatttcttacataaaagaaatgttttaattagacaacctcgacggttcttaccttgactttgaatgctacagcaactgcaacaagtccatcctttttctgatgttaaagtctcactttaaatggttagttggctttttatttgtttgtttttatgagtccaatgatgattaaccatcttattaggtcattgtcctaggcaaacagaaaaaacatacctagctaattctaggagttcaccccagaagcctatcttttaaacattttattaataatttctcagaatgtacacattatgttaacattagaaaataaattatttctgggaatgatttatttcttattcaattaagttggttgcataagattttcttctttagaaatacaaatacaacacattatccaaagtatttaaaactattccaaatagaaaatatgtcaaggcgattttttaaaatgtccctacatgttacattagcattcaaaaaataaaacataccctctttgcttgttacatgtgtatggatctaatatgacgtacatggacactggatatctcacatggaatactaaattgccaattaattacaagactagtcttctaaatgacaaaaatcaagactagtttgtatgatatattccttacatcaatgtgtaaaggaagaatgatctccttctattgacttgctctttagagaatggaagaccttcactcagttgaaacttttcttgagtaaggatgaagtcaaattaattaattcagtaactcaaacatatttgactccctactatatctcaggcacatggctgtgttttagaagtgtactataaaaatataaataataaacggagtcttctctcacatgtatatatacacacacatgcatgagtgtatgtatatatgtatttatgtgtatgtgtgtatgtatatagcaaagagagaatgcatgtatgaaaacattgttaccccttatcactgacaggacagttgttgatacagttgcagcaatatgtatttaatttctatatcacagttatttgataaactagtttttttttttttttttgagacggagtcttgctctgtcacccaggctggagtgcagcggcacgatctcggctcactgcaagctccgcctcccgggttcacgccattctcctgcctcagtctcccgagtagctggcactacaagcgcccgccaccacgcccggctaattttttcgtatttttagtagagacggggtttcaccatgttagccaggatggtctcgatctcctgacctcgtgatctgcccacctcggcctcccaaagtgctaggattacaggcgtgagccactgcgcccagcctagattagttctatacctggttaattcatggaagtattagaataatgaaaggaaccggagtgtggagggagagaaggattagaaaatgtggggaacactgaagtgtagacctggggcagggaaaattagatataggctcccaaacacccctctgttgagtcaaaatctactggggagcctttgtcaaaagtgcgatccagccccacacccaagagattctgattcacgagttcggagattatgctttttaaataagcacttagaataatttttacatactgtcagcttttgagaaccatcatagcagagatactaaacattaattatcagttttatggcttttcttttattcagaatgggaagacagtttggatattctcatgctaatggttttctcctcacacatccatttcattcaagacacatcaatttcatttgggacaaatacatgcatagaatgaagataaaatagtacaaatgcactgagaaactttctaatccctaaactaacgctatcagtggtaaaattctggaatgttttcagaagtcaaagagcattctctgtgcccttttttcttcctatgtaagtaattagacttccctttttgtgggacttgtggaaaaaataagagtggtcagaggaaacacattgcaacactttttttcaagataaatattatgctaacagctgtggatcaatacaactccaaatttgcttaaaacaatctgctgtttgttgccgcaataatcatcacagttctgatga

SEQ ID NO: 916876 - DNA, 4001 bp, Homo sapiens
tcccagctactcgggaggctgaggcaggagaatggcatgaaccaggaaggcgagcttgcagtcagccgagatcgcgccactgcactccagcctgggcgacagagcgagactctgtctcaaaaaaaaaaaagaaagaaaaaagaaaaagagaagaaattccctgtgttagaggaagacttaagatgaaagtttctgcttttgtccagcagaattaatacagacagagacagtctcagatatatgctggtatattttcagagatttagagataagagattcatatcagtgcataaaaattacaatggcattaatttcttatatacaacactgaatgttataaaacagtagataaataatttaaacgttttaagaaaaagagattttgaatgtttaattccatatccagacaatttatcacttaaatatggtagtcaaataagcacattttccaagataatatgccacattttaaattcttcctaaaaaaataattacagtcatcccttagtgtccatggggtattgcttctaggatgctctgtagataccaagatttgtggatgttcaagttccttaagtaaaaaggtgtaatactgcatataacctatcccctatccataccctcttgtatactttatatcaaatctagataacgtctaatacttaatataatgtaaatactatgtaaatagttgttattctgtgttgcttttatttgtattatttttacaattgtattgctactttttaatttttatattttttgaatatatcttgcatccacggttggctgaatccatggatgtgggaactgtgtatagagaaggtcatctacacatgaagctatattccagaaagactaaagatgagatttgaagtcacaagattcaagaaacagaggtaagcaaagaaacaaaactgataatgatgttcaaataagtgctgttaaacaggtgcaaagtttaacaaaaatatgaaggatcaatttattaacaaaaggagacattcagtgaattaaactttaaaactaataacattctaattctaaaatccttgatgatttcattgagcctgagaggtgaaagagtgaaggacatgtaaagtgtaatatctttgaatcacaaatattttgaactgatttaaagagatgtcttcctttgacaattacttttaaaatattatttagttaagcatattgtaaatacagttacattagaaacaaaaatcgtataaaatatttgcagtttatgtaacagacaattgggaggtccctctaaataattagaaagtgaaaagaagaggtaaatttagcagagactgtgagctagcaatacataagaaaaaaatttcaattattatttaaaacttcactattgttgcagaaatacaaattaaaatgaaggcaacaaagcaatatcttcaacgttcccccaaaaagactttaacccctcaattgtgtaccccgttaaacactagaatctagtgtaggttgctcctatacagtccctccctcctaaaaccataagaattatagtcctccctcagcctttcttcacacaggggcaccttgaggcaagggaggtaaagcttcacaaggcattaatttgcaaacaatgagtttgtgtaggattagagtttttcaacatcatcactatagacattttgggaaggattgttctttgttggtaagtctgtccagtgcattgcacaatgtttaacagcatccctggcctctacccctgggtaccagtagcatcctcccttcctcagcttatttatggcaactaaaaatgccttcagatattgccaaattgctcatgagggacaaatttacacctggctgagagccaagtgttaaaaacagtttttttttaacatatgcaagtatggttattaaaatagaaaataaaaagctacctatttcgaagcttccatcaattaaaccaacaagagaagaggatatctcaaatctcctttctatttgagtggttgatattttcataaaaattccagctagtgctttagcaacatagctgaatgacaggagtgtcaagaagatctgaaaaacagcagaaagaaaagagaaaattgattaattaaagaactatataatgtttataggtacgtggaattaaaatagtttttttctttacttacaaacattatttttatcttaaaaagcatactcatcttttttcctgtacaagttggaacttgtcagccctataactttttttttagtgattttttttagttcatgagttttgggggtacaggtggttttggttacatggagaggttctttagtggtgatttctgagattttagtacacttgtcacccaaggagtgtacactgtaccccatatgtagtgtcaccctcattcccctcccaaccattcccccgagtccccagagtccattatactactgttatgcctttgcatcctcattgcttagctccctcttataactgagaacatacaatatttggtttcccattcctgagttacttcatttagaataatggtctccagttccatccaagttgctgcaaaagacattatgtcattcctttttatggctgagtagtattccaaggtgtatatatgccacattttcttttcttgtttttatttttattatttattttttattttactttaagttccaggatacatgtgcagaaaatgcaggtttgttacataggtatatgtgttccatggtggtttgctgcacctattgacccatcctctcagttctctcccctcgccccccaactcccaataggccctggtatgtgttgttcccctcactgtgtctatgtgttctcactgctcacctcccacttacgagtgagaatatgcggtgtttggttttctgttcctgtgttagtttgctgaggatgatggcttccagcttcattcatgtccctgcaaaggacatgatctcattcctttttatggctctgtagtattccatgatgtatatgtaccacattttctttatccagtctaacattgatgggcatttgggtcggttccatgactttcccattgtaaatagtgttgtaataaacatacttgtgcatgtgtctttagagtagaatgatttataatactttgggtatatactcagtaatgggattgctgggtcaaatggtatttctgattctagatccttgaggaattgtcatactgtctcccacaatgattgaagtaatttactttcctatcaacagtgtaaaagcgttcctatttccccacagcctcacatcttttgtttcttgactttttaataatcgccattctgactggcatgaaatggtatctcattgtggttttgatatgcatttctctaatgatcagtgatgttgagctttttatcatgtttcttggccatataaatgttttcttttgagaagtgtctttcatattctttgctcactttctgatgggttattttttcttgtacatttttgcaatctacccatctgacaaatgtctaatatcctataacagtattatcattacactagtaaagcatgattttctaacttggtgacaatattcgattgttagaggagtataatcagggttgttatttttaaattaatatcattaactgatttataggaagctagacactgttctcagatggccacaatggtgagctattttttatttccatgtgaatagcataggctaactgggaggggggtggtggtacattcgcaaaggtagcatttccaggagccagctaaaatattgaactttgtggaggcaaagaggaattttatgaccaacagaagtgactgtatcaatgtgagatgtagtggttatagatgttttcatttccaattttattttaacaaaatgtattgattcatcctttctcttaaagctcacatctacatccttaccctattcctttagccctactattaaactattacccacttctgaacttcaggtttgtgttccccccaaatttttatgctgaaa

SEQ ID NO: 916877 - DNA, 4001 bp, Homo sapiens
gtttgggaaatgcagagttatacaatgttaaataggtatctttactacaaaactatgagtaaaaatattgccaagcaagagatatacaaaccagaaaggttttaaaataagaaacggataattattaaatttctggcttaaattgcaatattcttcaaaggattaaattatataattcaaattggccttctgtttttggggattcagatatcatattatttctcatcagtcataatattaaagtcagtgaccagaaaatacaaataaattgtttaataataaaatctgctatcatttatcctaaatttatctttaaaagatccaaagtgttacatctagaatgctaatgtcaaagagaaaaaataattatgttaaaaacactactgaaaaacttgagatactatagcacattttaagttatctaatatatggaggtgttgacacaaaaatcactgtaactaaaattcaaaagtataatgaaatataaatatagtcatctcagttcactttgtgttagggcaaaataggatccagcttaaactattggcactgcatagctttactgaagtgtcttgatggttaatgcgcaaattattgcaagtgtagtatgttccaaggaggctacagttcatcccctgtaaaaagagagggaaggaagctcaatgacatgaacggaaagatccttggggcctgcaggctctctctcttcatttgcaactgcagaagtagagcaagagtacacagttattcagaattatttgcatttggcaaatccttaattgatctctggccacttgaatagattcttccaggaaaagacatacgacagttttcatccaataccctgggtttggagcataacttattctggaggccaaagaaaaacaagccaagcagtttctcttcctttggttcaaaaacattgaataatcagtcctcattagtttcaaaatcagccctccagattttaaatggagagagcaagtggcttaggaaggttgtagttagatcccgcagatgtactcaacccctctgctctgcaactgactcggactctgtccagcaatcagtccccaaggactgccacagagaaagtcctaaaggcaaccacgctcctccctctcttctcttggccatctcctgtgaggaaaacctctgtcctggcttgacttctggacaccaggatgcctcccttcagacaaactaaaaaatagcctcacggcacttgctgcagaggagtgtgtgttgtttagaaactaatttctcacctaatacaaattatctgtgtcagattcagatttaataagtactatttttgtgttgagtaatgtacgtactttttctaatccttaaaacaacccaacaaacgtaatattagaattccattttttaaattagatggcccaaagcaattaagtgacttgtcaaaagctaaacaatttataagcatgagactcaaaatttgaactcaaatttgagtttatctgatttctttaaccaatcttctctcttatttccatcaaactaatgaggggatcatcacctttcactgatatttttatggataaaacataaatcgcacagaaattaagggttaatctcccataagaatctgatgtattagtcacaaaatataaaatgagagaaccaagtcttacctggaggaagagatcaaagatagccagttcctttcaatgtgctcagcaagaggatggaccacacaccacagactgaaagaggaaactgaggtaaactccacagcaattttgaacaattttgccaggtggggagagtgtgggtggacacaagcagaggagattagggaaaagaaaagatgaagggcatggtctcacccctgagcgatctcttctctttcctctttcttcctggcctcttttttctggcagtcagcagagaattggccacgctggcaaggccactgacgtgcatctcagctcccagggcacagaaagagctgaagcttttgagccatttctttgcaatttgctgcaagtttaaggccacacgtgataaagctttctttatgggagagagtgaataaaagaaaagaccacttgtgatcttacttgctgattcccagaaaacacaactccgcagggggcagagggtaaggaacagaagccagaggagggcggaagtttataacagagacccctcctccttccagaaagtttttaagccaactattccttagggacatcactgggatccttgtgttttctttgtttgtgtgttttggttttggtttgttttgttttgtctttaacggttcttgggctaatttgctacatggttttcttttccattggtgttctagaatctttaaggaccaagtatcaggtcacaatcaaagctctgcagcgctctgtacaaaaagagttaattctcagagacatgatcagttgctcatatttacaatttctatgagttttgaaaacagaaaagaaacacgttgaatttttggcattcaattgtttattctgcctaattccaaggataaataaatccttgcactgagaaagtccacaattctaatacattctttttccaagagaaaaactttagaggatcttaagcagtagtagtttgcatttattttctaccaataaataaatttgctaccagaattatccaagattcaccctactcttaagtggctgagactctgggatggtcacttaattttactgagtctcaacttcttcctttgtaaagcagaatttttttgtttaaaaaaaaaaaaaacagatttatagggctgttttaaggattaaattatataatgtattcaaaagcacattgcaaatgagcggaaggtatcatcattttatatatatatatatttagttcacataatggtcagaatagttaatattattcaagcacattttactacaaaagaaagaaaagaaaatgcaagaaaaatgggtttatattaaaccttgcaatgaagcaatggtgttttcacactctgaaaggccaaatattttactttaacaatcaaaccagacttttccatcggaaatagtgagcaaacatccgaatacattgagtgttagtctagacttctcagtgtctaacaggtggccagaccactgttttattcaagaggagacagtatttaccagcccaaagggcataattttcctcaccaagaaatgaaattctcccttgagaatgtaattttgtctattcccaactggctcagtctcactctccaacacgattccttttcttatttccagagtccacagttaatgttactgttttgaatgcacataatgtttacacttattcagagcttcttatgtgcaaccttgcattggattgtagcctacttcagcctttcattcccatttccaaactctagatgagggagttaacaaacttctataaagggacaaataagaaatattttaggttttgtaggaccatgcaatctctatcacaaccactcacctctgccattctggtggtaaattaaccacagacaacatataaatgaatgcatttcctaagactgcactaacaaagtactacaagctgagtgacctaaaacagaactttattgtctcacacttttggaggccagaagtcaaaaatcaaggtgtcagcagagccatgctccctctgagacctgtagggaagaatcctccttacctcttccacctcctggtgtttgctgacagcctgaactccttgttttataggtgtatcactccaacagctgcttctgttaccacatggccatcttctccctttatgtctctgtcctctgtacttaaaaaaacgctagtcatctttggctggggaccaccctcatgacctcatcttaacttgataaggtctgctaagactctcttttcaggaaaggtgacattcacaggtaccgggggttaggacttcctcatatctttttgggagacacaattcaagccagtacactcatattttcattttcctccttacttgaatttttt

SEQ ID NO: 916878 - DNA, 4001 bp, Homo sapiens
gaaacggataattattaaatttctggcttaaattgcaatattcttcaaaggattaaattatataattcaaattggccttctgtttttggggattcagatatcatattatttctcatcagtcataatattaaagtcagtgaccagaaaatacaaataaattgtttaataataaaatctgctatcatttatcctaaatttatctttaaaagatccaaagtgttacatctagaatgctaatgtcaaagagaaaaaataattatgttaaaaacactactgaaaaacttgagatactatagcacattttaagttatctaatatatggaggtgttgacacaaaaatcactgtaactaaaattcaaaagtataatgaaatataaatatagtcatctcagttcactttgtgttagggcaaaataggatccagcttaaactattggcactgcatagctttactgaagtgtcttgatggttaatgcgcaaattattgcaagtgtagtatgttccaaggaggctacagttcatcccctgtaaaaagagagggaaggaagctcaatgacatgaacggaaagatccttggggcctgcaggctctctctcttcatttgcaactgcagaagtagagcaagagtacacagttattcagaattatttgcatttggcaaatccttaattgatctctggccacttgaatagattcttccaggaaaagacatacgacagttttcatccaataccctgggtttggagcataacttattctggaggccaaagaaaaacaagccaagcagtttctcttcctttggttcaaaaacattgaataatcagtcctcattagtttcaaaatcagccctccagattttaaatggagagagcaagtggcttaggaaggttgtagttagatcccgcagatgtactcaacccctctgctctgcaactgactcggactctgtccagcaatcagtccccaaggactgccacagagaaagtcctaaaggcaaccacgctcctccctctcttctcttggccatctcctgtgaggaaaacctctgtcctggcttgacttctggacaccaggatgcctcccttcagacaaactaaaaaatagcctcacggcacttgctgcagaggagtgtgtgttgtttagaaactaatttctcacctaatacaaattatctgtgtcagattcagatttaataagtactatttttgtgttgagtaatgtacgtactttttctaatccttaaaacaacccaacaaacgtaatattagaattccattttttaaattagatggcccaaagcaattaagtgacttgtcaaaagctaaacaatttataagcatgagactcaaaatttgaactcaaatttgagtttatctgatttctttaaccaatcttctctcttatttccatcaaactaatgaggggatcatcacctttcactgatatttttatggataaaacataaatcgcacagaaattaagggttaatctcccataagaatctgatgtattagtcacaaaatataaaatgagagaaccaagtcttacctggaggaagagatcaaagatagccagttcctttcaatgtgctcagcaagaggatggaccacacaccacagactgaaagaggaaactgaggtaaactccacagcaattttgaacaattttgccaggtggggagagtgtgggtggacacaagcagaggagattagggaaaagaaaagatgaagggcatggtctcacccctgagcgatctcttctctttcctctttcttcctggcctcttttttctggcagtcagcagagaattggccacgctggcaaggccactgacgtgcatctcagctcccagggcacagaaagagctgaagcttttgagccatttctttgcaatttgctgcaagtttaaggccacacgtgataaagctttctttatgggagagagtgaataaaagaaaagaccacttgtgatcttacttgctgattcccagaaaacacaactccgcagggggcagagggtaaggaacagaagccagaggagggcggaagtttataacagagacccctcctccttccagaaagtttttaagccaactattccttagggacatcactgggatccttgtgttttctttgtttgtgtgttttggttttggtttgttttgttttgtctttaacggttcttgggctaatttgctacatggttttcttttccattggtgttctagaatctttaaggaccaagtatcaggtcacaatcaaagctctgcagcgctctgtacaaaaagagttaattctcagagacatgatcagttgctcatatttacaatttctatgagttttgaaaacagaaaagaaacacgttgaatttttggcattcaattgtttattctgcctaattccaaggataaataaatccttgcactgagaaagtccacaattctaatacattctttttccaagagaaaaactttagaggatcttaagcagtagtagtttgcatttattttctaccaataaataaatttgctaccagaattatccaagattcaccctactcttaagtggctgagactctgggatggtcacttaattttactgagtctcaacttcttcctttgtaaagcagaatttttttgtttaaaaaaaaaaaaaacagatttatagggctgttttaaggattaaattatataatgtattcaaaagcacattgcaaatgagcggaaggtatcatcattttatatatatatatatttagttcacataatggtcagaatagttaatattattcaagcacattttactacaaaagaaagaaaagaaaatgcaagaaaaatgggtttatattaaaccttgcaatgaagcaatggtgttttcacactctgaaaggccaaatattttactttaacaatcaaaccagacttttccatcggaaatagtgagcaaacatccgaatacattgagtgttagtctagacttctcagtgtctaacaggtggccagaccactgttttattcaagaggagacagtatttaccagcccaaagggcataattttcctcaccaagaaatgaaattctcccttgagaatgtaattttgtctattcccaactggctcagtctcactctccaacacgattccttttcttatttccagagtccacagttaatgttactgttttgaatgcacataatgtttacacttattcagagcttcttatgtgcaaccttgcattggattgtagcctacttcagcctttcattcccatttccaaactctagatgagggagttaacaaacttctataaagggacaaataagaaatattttaggttttgtaggaccatgcaatctctatcacaaccactcacctctgccattctggtggtaaattaaccacagacaacatataaatgaatgcatttcctaagactgcactaacaaagtactacaagctgagtgacctaaaacagaactttattgtctcacacttttggaggccagaagtcaaaaatcaaggtgtcagcagagccatgctccctctgagacctgtagggaagaatcctccttacctcttccacctcctggtgtttgctgacagcctgaactccttgttttataggtgtatcactccaacagctgcttctgttaccacatggccatcttctccctttatgtctctgtcctctgtacttaaaaaaacgctagtcatctttggctggggaccaccctcatgacctcatcttaacttgataaggtctgctaagactctcttttcaggaaaggtgacattcacaggtaccgggggttaggacttcctcatatctttttgggagacacaattcaagccagtacactcatattttcattttcctccttacttgaattttttcatgcaattattttaatcacttccttctgtataccctcaattctcctgtttctctttcaatttattgatcttcccaggcaaagctcacctcagataaatccactttcttt

SEQ ID NO: 916879 - DNA, 4001 bp, Homo sapiens
aaaatgatttccctgttatctttgaagattccttttccacatttaattacaagggtttctgctacattctttgccatagctataaattattagacagatgaatgtaaagcccttcctttaggcttatacaataatcttccttccttccttccttccttcctttcctttcctccctcccttcctattttttgagaccggtctcactttgttgcccaggctggagtgcaatggcacgatctcggctcacctgtgcttcccaggttcaagcgattcccatgcctcagcctcctgagtagttgggattacaggcgtgcaccaccacgcctggctaatttttttgtatttttagtagagatggagtttcaccatgttggccaggctggtctcaaactcctgacctcagatgatccgcccacctcgacctcccaaactgctggcattacaagcatgagccaccacgcccggcctctttctttcttttgaattagcaatggggtctcactatgttccccaggcaggtctcaaacacctagcctcaagagatcctcctgtctcagtctcccaaagtcctgggattaccgacataaaattatttgataaaccgaggttacaaagatttgtgaagtcaccatgtccatgtgacttcagattaaaaccgtactaaggggcacactctagttcctgcttcctcccaggcccttcctgtgtgaggcaggcagagagaggtgggagtcttcccacctgggctgaggcttccaggactggtctggggaaggggatgttgaacaattctttctcactgggattaggaaaggccttcacctacctcttggagaaggagtagtcaggaggctggtcattgtcactagtggttgagtttcttggagaagaggcagatctgtaggaagaggggcaaagacaggaatgtagcgggtgggcccctatggctttgagtcctggaagtcccaggaaagcctctggtgccaggttctcccaagtcccttcccctttttctcttgtcctcttctggtttccctgaatatctcctcaggctccaggtaccaacagctctccacaggagcaggtctgaggccgcatgcagtttgacggggtgttaccttcatacgctctctccaggtcctttcaatgggccaccaaatttacttagatctctcaaggcctgagaaagtcaggcaaaggttcgcaaatcagcagcgaacccagtttcgccaaagcgcggtaacaggtaccctagggttccacagctaggagttctggtgacgccatccaccaggtgtcaggagagggccgggaaggtcaggacccgcgcccaggctccagagcggagtgggcgcagcgcagtagccgggccgggaccgggaggcgacggccgtgggccgccttctggctcgcctcggacgctgggacgccggactggccgccccctccgggcctgctttcgccgtccagggcgcggtccgcgcacagcctgccaagcctcactgggccccagcccgcgccccgcgccccggagatcctcgacgcccctgcgaacgcggggtggacgcgacgggctgggttggtcctcgccccgcggccccgcccccgtccccgcccccgccccgagccccccgcgttaccagcaccccgcggagcgcgctgcgctgggggcggccggtgcgtcggggagcggcgttcccagccgccgcgaccctctgccccagcggagcgctgagcttcggccgctccgggtttcggttcctgccacggccgaggtggctgcggcgaatgtgggcgacccggctctccggcgcccccgcccttccctcgtgctcacctttccagtcggacgggctgctggtgaagggccggcgccgctccgcgcgtccttttgaactcaacgggggcgggcaccgcggagtcgcggaggccagcagaggccgaacgaggaccccgagcggaggaagccgcgggtggcgcgcggggttggcgcagaggccggagggggtggggggcaggccgacggggtgggacaggaaaagcggagagaaaccgccctctgcaggtccccttggctcccccgggaggaaaggcagcctgcccttctccgattgtcactttactctccatccggagccgcttcctttctcgccgcgaggctcggggttggggggggaccagattggagccgcgggctaactgggatccgtcccatttccctgggcttgacgttctctgaatttttagctaatgtggaaagttacatttatttgcatttgtttatcgcttgctcacataggtctgtgtcctgaagcttggcagatgagcgaacttagccagcacacccccggccgtgaagcagggaggtgaagcggggagagcaacgagccccacccgggtcttgccagctggacgttcttgtggggcagcgttgagcagcggttaggagtgccgtggactttggattcaaacagccccagctcttctgcttgctagctgggtgactttgggcaaattaacatctcgaaaatctgtttcctcattcctaaaatgcgggtctgaaagtgatcatgcctgtaaagccatctcatatccatggttctagaagcatggtgagcacctcaatttgaataatcagtgccatgctttagctacctcttgactcactcgtttgtggcaggaaatgttcccaaattaatcagaagaattcagtgactaagaggatgtaatagtatatagcgcaggcactggaatcagctctgctgtgtgatcttggacaagctgcttctgttccgtttctcttatctggggcaatacctgtctgaatagagtgactgttgggacgaaataggttagtaaatatgtactgtaaggcattagaaccttgcctggcacatagtaagtgctcaataaacgctaggtcttgttaccttggcttcccgtttaggattggaacccttgtgattattctttccctcccagtgatagacttctgtgcttacttcgcactcctaggcgttctgtaggtttgtaaaccagtatttatacagaaatactttctgtagaaagacaggcatcatcagattgtgcatgttaatccgggaacagaccgaaagggaaggtctcagaggagagaggcataaagggagaaaacaaaacaaagtcacaagcaaagcaagagtagttgcttttattcctaaagtgttcattataaaagaaaccagagggcagggcactgtggctcccagcactttgggaggcgggtggatcacttgaggtcagtagtttgagaccagtctggccaacaaggtgaaaccctgtctctactaaaaatacaaaatccgctgggcgtggtggcacacacctgtaatccctgctactctggaggctgaggcacgagaattgcttgaacctgggaggcagaggttgcagtgaggcgagatcacaccattgcactccagcctgggcaacaacagcaaaactccgtctcaaaagaaaaaaacaaacacaaatacaggaggaaaacaaacaataaaaaagtgatgaaattcattttatataaatatattgtgagaaatatatgtaaatatgtgcatgggaaaatgccaatccaaccaagaaaggcaaagaaagtgatatgccagctatgcatatgtaacttaataaaagaaaggtgagcctggcttgtccttagataagagaatatccaagagaaaaggaaattaaaatcctagagggctaaatccaaaggaggacaattgctggcattgacatacttctagctgtccaccttgatcatgaattccaggagaagttcagatcgttcttggacctgggtctgtctctttcacattttctattatgtgttgaagattgtttagaactatagactcagccaggcgcggtggctcacacttgtaatcccagcactttgggaggccgaggcgggtggatcacaaggtcaggagttcaagaccagcctggccaacacagtgaaaccc

SEQ ID NO: 916880 - DNA, 4001 bp, Homo sapiens
aagggaaagatgggtttctaacaagtactcagtgctaataaccaacgtgactgagtgcttacgagatactacacactcttctaggtgttttatatgggttgtctcatttaatcttcataaatcataagataggtactattttccctattttgtgaatgatgaaaccggagcttagaggttagcaatactatctttagcaggtttttaaaaaatgatttccctgttatctttgaagattccttttccacatttaattacaagggtttctgctacattctttgccatagctataaattattagacagatgaatgtaaagcccttcctttaggcttatacaataatcttccttccttccttccttccttcctttcctttcctccctcccttcctattttttgagaccggtctcactttgttgcccaggctggagtgcaatggcacgatctcggctcacctgtgcttcccaggttcaagcgattcccatgcctcagcctcctgagtagttgggattacaggcgtgcaccaccacgcctggctaatttttttgtatttttagtagagatggagtttcaccatgttggccaggctggtctcaaactcctgacctcagatgatccgcccacctcgacctcccaaactgctggcattacaagcatgagccaccacgcccggcctctttctttcttttgaattagcaatggggtctcactatgttccccaggcaggtctcaaacacctagcctcaagagatcctcctgtctcagtctcccaaagtcctgggattaccgacataaaattatttgataaaccgaggttacaaagatttgtgaagtcaccatgtccatgtgacttcagattaaaaccgtactaaggggcacactctagttcctgcttcctcccaggcccttcctgtgtgaggcaggcagagagaggtgggagtcttcccacctgggctgaggcttccaggactggtctggggaaggggatgttgaacaattctttctcactgggattaggaaaggccttcacctacctcttggagaaggagtagtcaggaggctggtcattgtcactagtggttgagtttcttggagaagaggcagatctgtaggaagaggggcaaagacaggaatgtagcgggtgggcccctatggctttgagtcctggaagtcccaggaaagcctctggtgccaggttctcccaagtcccttcccctttttctcttgtcctcttctggtttccctgaatatctcctcaggctccaggtaccaacagctctccacaggagcaggtctgaggccgcatgcagtttgacggggtgttaccttcatacgctctctccaggtcctttcaatgggccaccaaatttacttagatctctcaaggcctgagaaagtcaggcaaaggttcgcaaatcagcagcgaacccagtttcgccaaagcgcggtaacaggtaccctagggttccacagctaggagttctggtgacgccatccaccaggtgtcaggagagggccgggaaggtcaggacccgcgcccaggctccagagcggagtgggcgcagcgcagtagccgggccgggaccgggaggcgacggccgtgggccgccttctggctcgcctcggacgctgggacgccggactggccgccccctccgggcctgctttcgccgtccagggcgcggtccgcgcacagcctgccaagcctcactgggccccagcccgcgccccgcgccccggagatcctcgacgcccctgcgaacgcggggtggacgcgacgggctgggttggtcctcgccccgcggccccgcccccgtccccgcccccgccccgagccccccgcgttaccagcaccccgcggagcgcgctgcgctgggggcggccggtgcgtcggggagcggcgttcccagccgccgcgaccctctgccccagcggagcgctgagcttcggccgctccgggtttcggttcctgccacggccgaggtggctgcggcgaatgtgggcgacccggctctccggcgcccccgcccttccctcgtgctcacctttccagtcggacgggctgctggtgaagggccggcgccgctccgcgcgtccttttgaactcaacgggggcgggcaccgcggagtcgcggaggccagcagaggccgaacgaggaccccgagcggaggaagccgcgggtggcgcgcggggttggcgcagaggccggagggggtggggggcaggccgacggggtgggacaggaaaagcggagagaaaccgccctctgcaggtccccttggctcccccgggaggaaaggcagcctgcccttctccgattgtcactttactctccatccggagccgcttcctttctcgccgcgaggctcggggttggggggggaccagattggagccgcgggctaactgggatccgtcccatttccctgggcttgacgttctctgaatttttagctaatgtggaaagttacatttatttgcatttgtttatcgcttgctcacataggtctgtgtcctgaagcttggcagatgagcgaacttagccagcacacccccggccgtgaagcagggaggtgaagcggggagagcaacgagccccacccgggtcttgccagctggacgttcttgtggggcagcgttgagcagcggttaggagtgccgtggactttggattcaaacagccccagctcttctgcttgctagctgggtgactttgggcaaattaacatctcgaaaatctgtttcctcattcctaaaatgcgggtctgaaagtgatcatgcctgtaaagccatctcatatccatggttctagaagcatggtgagcacctcaatttgaataatcagtgccatgctttagctacctcttgactcactcgtttgtggcaggaaatgttcccaaattaatcagaagaattcagtgactaagaggatgtaatagtatatagcgcaggcactggaatcagctctgctgtgtgatcttggacaagctgcttctgttccgtttctcttatctggggcaatacctgtctgaatagagtgactgttgggacgaaataggttagtaaatatgtactgtaaggcattagaaccttgcctggcacatagtaagtgctcaataaacgctaggtcttgttaccttggcttcccgtttaggattggaacccttgtgattattctttccctcccagtgatagacttctgtgcttacttcgcactcctaggcgttctgtaggtttgtaaaccagtatttatacagaaatactttctgtagaaagacaggcatcatcagattgtgcatgttaatccgggaacagaccgaaagggaaggtctcagaggagagaggcataaagggagaaaacaaaacaaagtcacaagcaaagcaagagtagttgcttttattcctaaagtgttcattataaaagaaaccagagggcagggcactgtggctcccagcactttgggaggcgggtggatcacttgaggtcagtagtttgagaccagtctggccaacaaggtgaaaccctgtctctactaaaaatacaaaatccgctgggcgtggtggcacacacctgtaatccctgctactctggaggctgaggcacgagaattgcttgaacctgggaggcagaggttgcagtgaggcgagatcacaccattgcactccagcctgggcaacaacagcaaaactccgtctcaaaagaaaaaaacaaacacaaatacaggaggaaaacaaacaataaaaaagtgatgaaattcattttatataaatatattgtgagaaatatatgtaaatatgtgcatgggaaaatgccaatccaaccaagaaaggcaaagaaagtgatatgccagctatgcatatgtaacttaataaaagaaaggtgagcctggcttgtccttagataagagaatatccaagagaaaaggaaattaaaatcctagagggctaaatccaaaggaggacaattgctggcattgacatacttctagctgtccacctt

SEQ ID NO: 916881 - DNA, 4001 bp, Homo sapiens
gaaattggagttgcaggaccctattatcttggcacctcatctttaaccaacagcactgagggttgtaaaattctggaggtttataaagttcaggtcatggaagcaatacctctggggctctaagagagacatttcttaggggaactctgtaaagccatgattccccctataatgtagcctaacaagaaaaggtacaaggaagtgaaggagggcaagttgactgagtgagcttgtgcattttgcttctgaagactgggtataaatgtcttcataggccctcctagacaggaagggccatccactacccagcctgatggagaagagcaagacaacatctaccctgtccgaggaaactgtatctgagacaagtaaccctggccctacttctatgtttccacactctgctacctagtagcatcctagccttccattctaatttgaacctgagccaggagactttctttttactttttgacccgttttctccccactcatcacaaagaagacagtgcctctcagtgagaggtgaaaagagatagatctgtgaagggaaaggtaaatgacaaagagctaagagcatggaagctgaaccaggtcacaactgtcaattcccccaaggccggaggctaagcccctagcctgatctccctgcaaaaggtcaaaggtagaagcctgggaataagagcctctcacaggcgtagagacatgccatagaaatagcagctatttgtcaggattctcacacccagagagaccccaagggcagggccaggctcacaaccagcatcagtaggaagttctcctaagccactaagcacacttctgacgagctgcaaagccggcaggaagaactggggagctgaaagaaagccataaagagaatccctctctgagggtagtgagaaaaagagaggcagaccatttccagagaaaaccaggcctagagacaaagacgacaccaggaagaggtttggtagaaaagacaggtaaggattcttgaaccttttgttcaccaccttatgatctccagttatggggtttgggtgtgaggggctagagataggaagctcaccctaacctctcgaccccaaacccagggtactgcaaagctaggttgcaaggtgacttcattgtaaaatcgaggaaaggtttcggaaggggccgctacccaggaactcctataccccggctccctgagagattctgttgccccttagatgaaggtgggggatgagcggcggagacaggtgatccctgggtggagacctttttcaggctgatgagcagccaacggcttgctctgtgactgtttaccctcctgctttccattctctctctctgaacatacacaaagcaccggagaggcctcagccccgctggtacctggctccgtggggagctctggcgggcacgctccgggttgcgggggagcccattgggcacccggtccacacccggccggccgcctctcccagaaaagccaggagggcgatggctgaggggaaggtgggctaatggcaccggggcccgccgggcagtagagaaaaacaaggggcagagggcgcagcagtgggggcgggggctgggctcagaggctgggggtgcggggagagggaggctgggggaggggcgcgggagcgcaggagggcgcgcggggggctgcttgggaggccgcgggggaggggctggggcgcctggagggtaggcaggatcccggggctgcagggccgcggtccctttgtcccgcccccggtccccgcgcggcccggcccggcccgcgtaccttcttgtagttcttgccgagccacagccgcacgttgtcgaactgggtcacggtgtccgcggcctcgtagtacttcacgttggggccgccgtccttcttccgcaccgccatcttctccggctcgggccccgccgccgcccgccccactcagctcagctcccgcctcctccgcctcctcctccgcccgcctcccgccgcctcccgccgccgcggccgccgcctcccgccgcctgggccggccccggtccgcgctgcgccccctgccggcaggccgggcgcggcggcggagctccaggcgcgggccgaccctggcggcctccccggcagcggaggcgggagcctccggggagaaggacgcttcctggagggggcgccattctcctgagatcgctcttaccagacgcgaagccctttccctctttttgcctcagctcgggagtgtcacctcgctatcccactccaggcggccgccagtcgctggagcagccccaacccgtagacccgagtggtcctcaccttgcgcattcctaacccgacgaagcccctcgtcccccaaaaccccaaacccctttccccaagaagttccttccttccatccattcacagcagctccccatttaaacttttcagagtctccctcactcctcgcgccttgtccacccagcactcccctcacttgttaacccaaatgtcccctagtcgccaccctggcggcccagtgccttccctcaactgcttcctccgcaggcctcgctgtcgcctcctaagtaggtgtgagctcctactcgagaccccgactcttcgctaggcaggagaccctccctccctgggtcacccagtccatccgactctttttctttgggtggcgtagataggaggtaaggaaccgaggggtggggagtcctcaggtgtgtgtgtgtcggggccggtaccctgcttccggttcccgcacgcattcccggattgcagtgcggaccccttctgtaagcgcgcgataaagcgcggttttggaagtcacggtggccgagtggttaaggcgttggactcgaaatccaatggggtttccccgcacaggttcgaatcctgttcgtgacgggttttttttttttttctttcttcttcttattattaaaagggagtctcgctctgttgctcaggctggagtgcagtggcgcgatctcggctcaccgcaacctccgcttcccgggttcaagcaattctcctgccttagcttcccgagtagctgggaccacaggcatgcgtcaccatacctggctaatttttgtatttttagtagagacaggttcaccatattggccaggctggtctcaaactcctgacctcaggttatctgcccgcctcggcctcccaaaatgctgggattacaggcgtcgacttttttaacccctttcacagcacataaaggtaaccccagttctcacacgtttctttcgtgcactttctctctccaaaagggaagccgccaaaaggtcttaacccctggatttgggaggatgggagtgatcttgggaagtttaattatgcacgactgtattggctgctagactgtgaggcattttcagaattttgtaacttcaggcttcctgggagagctttggcacatgtctcattcttttgagggcatagggaaggatttggttgaagggttacattttgggaatgtgagtggctgttttgcaatattagtcaaacttagagtttcctctaaatttcatgaccagaagtcacaccttgtaggtctgattacaccgaagacccaggaaacaggattctctcatctggatttccttgaggtgtacagggctagaagggagtagtctattgaaacatcattgcagatccagttagagccaaggtatgggaagataattctcactttttattgagtgcttattatgtgccagatactgttttaaattatctatgtgtattaaccaagcaaggaaattaatctcatctttaacctttaaccctcctatactcatctcaccccatttttcctatcccctaatttctgattgtggggaggatctaggctgcttgttgaggattttgttgtttgttttggggggttgtttttgtgacagggtcccgctctgtcgcccaggctggagtgcattggtgcgatctcagttcactgcaacctcaaactcccaggcccaagcaatcctccctcctcagtagctgggactacagg

SEQ ID NO: 916882 - DNA, 4001 bp, Homo sapiens
catcagcctaagtacaagtgcatatagtgggatgccaggtggacaaagtcatgcaaggtgccaggttcccaaggtagcagagcagttacagcgaaaacatggacaagggtatatttgtagtgcaagagacatcaagagcccctccccctttgccattctgttcttatcctcctaatgtaattctcagtttgtaggcggaagggagagatgcaatttaaatgccaaggagagttgtgctgtgcctttgatttctcatcctaattctgctgaaggttcctgggtcctctcctttggctctctgcctagtactttcctgtgttaccttgatgggacgtttcaaggcctcttggatatctagccgtttcctcatgatagtctggtccagtttcctttcaaaagccaagagatccatataggcctgggattctggtaccagttcacgaatcttaggaacagaaaaattaattgaaatctaggatgatcatctctatactcaaactcaccacactttccagaagacatatagcctggactcaccctttgaggtagaattttgtcagccatcttctttttctttgcactgttgggaataaatactattatcaggttgggacagaactagtcagaacgtgaaaataagctgtcagcacgtccatttatagtaatgtgaagggactgcaaagcttctctcaaagaactaccaccaccaccaccaccaccaagcattctcaaggatgagttctgtagcaccatctgctgacacagcaccaccacttcttggttcaggtactcccaccacctgtgtcctcccaggctccctccctccctccctctgccccaggatcatcttacttgtggtttcgattttggaccgcctgctgctggacctgctggatctgctgaggggcaggtctcttgcgggactgatccatccctgactgggccaggccaggtcggactgaagggttccccccatagccagggggtcccatggaaggtccctgaggtgtcattcggctgcctggcaacatacctggtctctacagaggggagaggacccagagatgtcatggtttcacctgctaaaccccatcaagaaagaaaagcagggaacgcctgagatctttgaatgaagtaaggtttagggatggaatggaggacaatgagaggagaaccctttgctccagtagtgactccatagaaaaacagagtccaaaagctaagcgagagccagattatactcaaattctcagtctattttggatgggacacatcggacatcgccagttccacatttactctgctagctactatctctttagaagctgacctcaatttgtcagctacacgttctgtgttcctctgatcactggagctgctcaagcccctttgcactccggccctcatacaggtatccctggacccacttcacccacccaggttctctaccgactccccagggaaacaatgcccctaggagcaggtgtgtaactgcctccccctctctttctgcgcactgcctcccccaacccccacccagagcccgaacccctcccaagggagtccctcctacttctccccccacccctgtcactcccatgtccccgctcggccccgcccccggcccgcgcgcccctcctcctgccccactcaccggataggccgctccgggcatcggggagcggtacagcccttgacccggagccgggcccattcgcacaggaggccccggagttccgcccgggcccaaggcagcagccgcgcccgcccctcctgaggctccggcgccgccgcttggagccacagactggaaacccgcccgggccgccatcttcccggagccgccgatgcagccgcacaaagaaccggaaccggaactccccccgccccccgagcgccccccgagcgcccgcctgttcccccggccggccggccggcacgggaggctcagggcagcgagactatgggatagagcggggcgactagcggaaaaggcgtgctggccacgccctcccgccttcacggtccgggagggaaaaccatagagaagagctctgcaatagagaggccgcgtgagcgggcgcccccaggccgacgggaggaagacaaggacctggaaagggggacggaccacagcctcagccccagtctcaaccccaactcgagccctctgatgaagaggggcttggagtaatagcttcatcttggcgcatggcgttaactttccaaaacgctttgactgcttttcgtttcgttttcttactgctataactatcaggggctgaggagggaaacacagtttattccattttacaaatgggaaagctgaactcacaggtgaatgacttggcaaaggtcaaccagcaagttagccataaagccgaagccaagattccagatacccttgctcatagcccgggactcattccacagataaagtgcctcaataagtacctcacgtgggaacttcatcctaactttctctctgacctaacctgcttccggattattattttttattttttatttttttttagatgaggtctgtctctctctcgcccaagctggagtgcagtggcaccatctcagctcactgcaacctccgcctcccaggctcaagtgatcctcccaactcagcctaccaagtagctgggaccacaggcatgcaccaccatgccagactgttttgtatttttggtagggatggggtttcgccatgttgcccaggttggtctcgaactcctgagctcaagcgatctgtgctcctcagcctcccaaaatgctgggattacaggtgtgagccattgtgcctggcctcagatttttttttttttaaatattaaaaaatagggatggggggctgggcacggtggctcatgcctgtaatcccagcacttgggaggcccaggcgggtggatcatgaggtcaggagatcgagaccatcctggctaacacggtgaaaccccgtctctactaaaaacacaaaaaaattagccgggcgtggtggcgggcgcctgtagtcccagctactcgggaggctgaggcaggggaatggtgtgaacccgggaggcggagcttgcagtgagccgagatcgcgccactgcactccagcctgggcgacagagcgagactccatctcaaaaaagaaaaaaaaaatagggatgggggtttcactatgttgcataggctgatctcgaactcctggccgcaagtgatccacctgtctcagcctcccaaagtgttgggattacgggcatgagccaccgtgccagcctgcttccagattttatgataagttccagtttatcttgaattttgactctgctctctctctctaaagcatcctttgtattggggattctgttttggaactttgttgcctttgacttctccctctttccctgcccagtggttcaaactattcctgatataatggtcagcctgtcccatcccagggggaccacagtgtccctactcaaaccttctccttactcatcccctaattggccccaaaccaagctcagctttaggcacttagtgagaatatctaaatactttttcaaataagagaacaacactgaagaggagatggttgaaacccagtttattagaccagaggcatgcgtcacccagagccctgcctgctgttcccctatccaatgcacactttttggcctcattcctgcttccctctggggaggtatgatctctgaggaaactcttaggaaccaagagattccaaagatcctacagccttactctccagctccaggccaatgcagctgctcacaggtcctgttctgggattgaagaccaagacacagctagggaaggaaggcctgaagaggggttggggctcaggcctggaaggagtgtctggtggagggagggggggcaggccctccacctcacttgtctctcattaagatagggtgagacaacagcagagctttcaactcctcctctaggcctctctttcctcccaaacccacctcaccaga

SEQ ID NO: 916883 - DNA, 4001 bp, Homo sapiens
gagcctatgggagatgatgtgatttacttagagtcagatataagaagtaaagccaggactcagagcttccatgtcctcacagctactgataaaaagattttccccacctcccacctccaaagatgacctagaccagggctctccaatagaacttcctgtgttgatgaaaatgttctctacactatttgatacagtagctactagccacatgtttctattgagtacttgaaatgtggccagtgcaactgaggaactgaatttacagccacacatgcccaacgactatcatgttggacaactcagaattttctagagcaacggtcatcaaactatggccagcaggccaaatccagcctgccacctgtttctagaaatgacattttattgcaacacagccacacccattcctttacaaatcatctatgactccttttgcactgcaatgagagaattgaatggttgcaagagaaatcatttggcatagaaaggctaaatgtttactatcttgccctttacagaagaagcatgccaacccctgttctagactatcaccttcttctatgatgttgggtgtttgctacgatccatcagttgaatgcagtaaataagagctaaactttggagaatcaagctgagttcataatccagcatcaacacttcacagctgggccttatcttattgtctgggggcctcactttttcctctgcagaatggggctaacaatagtaatactaatattattagagatgtgaggagtaaaattgtgcttaacatggcatcaggtaaatagcagacacttgccaatgttatcgatctatctattaaaataaaagctgtggaaatgggagcaattagtaacgtttaacttcaaataacacagtaataaaaataatgcttacacatgtgcagcactttcagttcataaggcactttcactaagttgtttcctctgaccctcatgattaccctgtggttagccaaccatggcacatcttgttacctctattttatcagaggaagaaactggaacacagagatgacctgggacttgtccaaagttttattgctagaaaatggtagaatcagcatggaaacctgcaaattctgactataagttttgcagtcatcctactattacacataaaattaatgcccaatgcgtcttaatgggttggctaacagccatcttacctcaaaaacaatccatcttttgaagccaacttttgactagtgacatagtgcaagtccttagtgctcaaagtgtggtctgcaggccagcagcctcagcgcttcctgggagcttgatgcaagctgtccaacctagtgcagatactagatcccacccagactcattgaaccaatgtctgccttttagcaaggtttcaggtaattcatacacatatgaaagttgggagttactcatactctagaccttttaaaatagactccttcttctccctacaccccatgtcttcattcttgtgtgcttaccccattggctttctaggattgtttggtacaaatggagtgaatccctcctccttcccccatatcctataaaaacttttaaaattacacatttagagaagcatcagtttcagttacaaggaacaatcaactattttaaaagacagttgatgaaatcactaacttacattgtgaggggatttctccaggcctgaccacccagattaccctcttggttcctgctacctggacaatttgggatctcagaaatttgtcaaagccatggtactaataatcagggattcgacgtcactataggctcctgacaaggtcataatgagacggtacgctgtgaaatagtatatacctggagatagctttgctcttcccaatttggtaatcccaaatatctgtaagttcaatggaatagactagcaacagtcaagttttcctgttccagtggtgccagagcctcctttcctcagcaccaaaggcagagaggaaccatttgagtggtaaacaccaaggcaggtaagtgtgctgctggactttccctttataacatttcacttggaatgcagtgcctgtaaccccctctcacaagattctaggtgtgcagtgctctcctgactggcttctaccttgcccttctagcctgtctctcagcctcctcacttctcttgctaactctggagactaagtccttcttccaccccagccctctgtccacccatctcctggcctctgatatggtgttctgggatgctcttccaatctcagcttcttctaccacatctgctcctttcgtctctcacttgaacagaacatctggctttcccacagaggctcaaagactgacaatgaaggacatgtcttctaccagtaacaagcaagcatttgatcttcctttttttattttattttattttttgagtcagactctcgctctgtcgcccaggctggggtgcagaggtgcaatctcagctcactgcaacctccgcttccagggttcaagtgattctcctgcctcagcctcctgagtagctgggattacaggcccacttggctaatttttgtatttttagtagagacagagtttcaccatgttggccgggctggtctcgaactcctgacctcaagggatccacccatcttggcctcccaaaatgctaggattacaggcgtgagccactgcaccgggcccaagcatttgatcttcttgcaaaccagggatgctcttactttatacctctgtgacctcgtctccttcgaagttcctcttattattacacttttacaacacaccttcaccttcttccaggacttcagtgccaggctcacatttccctctcccattattcttggtgaactcggcacccatggaaagggcctaacagtctgaccttacaagtcctaagcccctgctcttaagacactcctcttcacctatcaaaaacattcagcaccatggagataaagcacagaacagttcttaaaaacataaactttagaatcacatcagtgtctgaaacctggttttgtcatttattagctttttggtttgggtcaaaatttaatctctttgtctgaaaaattggtttactaagatctacctaattggcttgttgagaagttaaaggcaccaggtgaggaaggagtttcaggtagagtggctgacgcacaataggtgctcaaaaaatgttgtcaaaggaatggaatgaatgcatacatggtaggcatgatttttatggcaatattttaggtctcgttatcaccctgagcatttcttcagccaaaagctcaagttcagatgtgtcacctttcttacggtctgtactgcatgccctacctagttaggaaccagactccatcaacagccctcccacaatgcctgctgggctagtatccagccttcagtccccaccttatatcatgactatgctcctacctttggttgtcctgggtgacctcatatttctttaggaaaaatcacaaaattcttactactagttccatcacaaaataacaataatagtaatagctactacttgctgagtggttactaatgcgctaggcagtctcccaagtgttttacatatattacctaatttaattcttaccaccttttgaaaaggaagggatcttggatttaaacccaaatccagttagtctggctccagggaccatgccctaaagcagcactgtgtagaccacacttcgcgtactgggttctcacaggtactcggccaaattcttttctctctctctctctttttcttttcttttctttctttttttttttttttttttttttgagacagggtctccctctgttgctcaggctggagtgcagtggtacgatctcggctcactgcaagctctgcctcccaggttcacaccattctcctgcctcagcctcctgagtagctgggactacaggcacccgccaccatgcccggctaattttttttgtgtgtgtgtttttagtagagatggggtttcaccgtgttagccaggatggtcttgatctccc

SEQ ID NO: 916884 - DNA, 4001 bp, Homo sapiens
gcctgtaatccgagcactttgggaggccgaggcgggcggatcacgaggtcaggagatcgaaaccatcctggctaacacggtgaaaccccgtctctactaaaaatacaaaaaattagccgggcgcggtggcgggcgcctgtagtcccagctacttgggaggctgaggcaggagaatggcatgagcctgggaggcagagcttgcagtgagccgagattgtgccactgcacgccggcctgggtgacagagggagactccgtctcaaaaaaaaaaaaaattttattggttacgtatactattccctgtctttaccctggttcaataaatctaaaattgtttcactatcactaatattctaatgagcattttgatacccacagattttttttcctccattatctggattatttcctcagcataagtacctagaagaattacataattagtggcataagtaatgggaattaaatttttattacttttgatatgtatcgtaaattgcattccaaaagcttttactgtgctaccccaaataaatttttatagcaggatactgggtatcctgctataaaatttttacaatttttattttagattcaggaggtacatacacaggtttgttccctgactatactgtgtgttgctgaggtttactgtgaatgatcctgtcacccagatactgagcatagtgctggtatatttcccagtcaaagatggtcctgtttaaatattgttgatttgggaagagtaaggttaaatttcaaaaagagaagttcttgcctatttggaaatacatactgaaaacatttaagatgaaatgaaatggtctcagagatttgttcacaaataatctggaaagaatagtggggtagggttatagaggaaaaaagattggccttgttttgataatttttaaagctgagttatgggtacatgggagtttattatattattgtctctacttctgtgtatgtttgaacttttcttataacaaataaaaaagaaagaaaaagaaaaacgtgaccctgtctaaacctctgatgtttagtcgttagtgctctctgaggttttacatttcttcttgctgtcacttttcttcactgtccaaacagggttttgccatcatgcacagtttccttatctgggagtgtggaaatagggtataggtaaaatcaggagcttttcagaagaaaataacagcttctaactagttctgagtctcctttaattcaaataaaaatctgtggcctttaattaaaacaaaaattgatcatgatgtgatgatatactttctgatataaattcatttaaaaaatgtttctgaccagaaagaagaatattaaagtcattcatcagcatttatcaagtgctcactggtgaagcctctactgtgtcccttgaggcatttgaaaacgacaatgttccttgccctcaagacgataacagcctgtttggagacacacagcaaatgctcagagatatttagatacaacataatttatgaaggagtataagtactatacattaaccagtattagattccacattcattctttcatagataggtactgagtgcctatattaatattaatgacatagaaggaaatgttactatccatgtaaacttcacacattcacacaggtatcatttcatccttaatccttcttagaattgatgtctttactgcttctcttccactctgacttaatcagtcctagaaattgttaattttcttccttctctgctgtcttcagagaaggcaccaggaaaggttccttccaaatcacaaggaacatgtcatgggatcctcttataacaaagctgtttttttactttattttatttatggttaggattcaagactgacgggctaattcaaattcctcctactactgagaaacagagtattatatcaatactaatagaaatatccacgttgcttaccttgctgtgtttctgagttccgtggtcctagcagttgtttaggagtattgttaaagtgctttttcatctggtttcatctggatatttctgatggaatgtgatgacttacagactttgctagtctctgctgggtccctctgcctgtctggtttataggctatttctacatggcttggccctcagaattccttcatttcctattaataaaaacttagtatacagtattaagttatataaactggaagactaatagtgtgtaaaacttatttttaaatttctgttctttaatggactttttattgttgagaagcgctatataactgagctaattcaatttagtagagaagatggctctttgattgcagctctcagattttggggttttatcttgtcaactattccagatactaagtttcttttagcttctgttgcatttgcacctctaactgttgctgattatttaaattctcaagatatataaatgcagttacttgcatccaatttttttttctcttctttccagctaggagttctcctctttgtcattctttctcttcctgtgtttgtaaattgtcttgacaatataaaaaccttaaagtccaacttcactcttttccctgaaagctcagatcagtcttccctgctgcttcttcccagcttcagtcttcagacccgttaattcctccacagcaaagacacctgagtggcagggaaatcactcagccccagtgtaacttagtgaaagacagcaggctttacactcagacagtcctggttttgtgtactccaagtaccacttactagtcatgtaatcctaagaaagtcacttagcctgagttttcccattggtgtaatatgagtattagttaataatttatggattaaatgggatagtgtttataaagtaattggcatagtggctgatatgtggcaaaatcttatgaaacggtagctattcatatattaacaacagtatctcctggtggaggggagaggagaatgggtgggtacaggatacagaatcaaaatgccagacaggcagacaggaaactttaaaatctaaagatgctgccctgtgattctaaagaagggctaagtggggtcacttttctacttttgtcccagtggatcatcttgcccttgatgtatccagggccccaccacgtacggatgtgtggccagtgtatctgaactaggtatggatgttaagtaggattttaatagatgtttggggaggatggtggtatagaggaaataatacagatagagggaacactgagagcaaaggagctgaaccaaaaattgtagaacattttcagggaacaaaaaccaacctgctggtgatacagggtgtaagtgggagcagttaagggaaggtaagtcatggaaaattgaaaatagtttgtagatagccttagatgtcatgctaggaaattgtatttcattctgtagataataatgaaccattaaaaaatccttttaattatggtgtaatatttggagatttggatttcaggaagggtacattatgtaaacttgattagtaggtatggacaataaagcataagttaccaaccccattgcctacagtatgtggacaaaatatgtctgtcttttaccctgtcttaaaacagttgcattttgtttccgaagaggctattgttgaagagtaccatttaacccacttgttcctaaggtgtttgtttctctcctatttctacccttcttaacatttattgcctactcatccactcctttctctcctaccacatagcagcctaagtggagttgccaaaattaaggataaacagtaacaatgcaaaataattatcagagaaaaactagaagcaatattgacttcatactgagccccctaatcaacttgaacttcttttttctgcaatcagtttctcaggttgaaaacttgaacttcttaaatctttcttgactactaaagccagtattaacgtcaagtcaatagtcagaactgaaccttaggaaggaggcacattttcttagtgtagatcttggagtcagggtggttttagggaatcagga

SEQ ID NO: 916885 - DNA, 4001 bp, Homo sapiens
acataatgagaccccatctgtaaatataaaaataaaataaacagcttttaccaaggaggcactcctgatggatccttctccacttctatatcctgagttcactcaaggcttagctgcccactttgcactctgcttgttttccagactctgggtctgtgcccatcatatgtgtgcctcccatgcgacaaggaccattgtcattccttcctctcaactttctgcctgggtcaggagtgacttctccaagataagaactcaaggttgacacaacagctcgataaacctattttctcaccctagcctaggggaagtgggagagaaaagaaatcagaggcccaacttaggaagtccttccctgactgtctcagtagtctttaactgatctgttgtccaggtggctacccaggacaaactgggctcatacaaaagctgagaagggtgctgtggagaacgccagtgtttcaggggaccttgctttgcatctccccatgcaacaccaacattagcagattggctgctccagctctagaatctcgagaagtcttgagcccacctttgacatttagacacctgtgttggaaacagcaaggctggggaaaagagtggcaagatactactttcattgttccataacttcaaagcctgatctcatagcaagagccacaggctggaagtcaattgatttgaattctactcctgtttcatctctaagaaggttctcttgagcaactcatttaactctcttctctatggaaaatcacatactccatccaacctaccacctgttaactcattttttttttcaatacttatgagtctcttacatgacaggcactgcagcagtctcttgatgaggaagaaatccaaaaagagtaaaatgtaggccaggctttctgtaagctcataatctgctgtgagggcaaataaacaactaactgtaatacagtgtgatgtgagctttaatacccggaacaaaacactaagagaacccaaaggaggaacttgtaagttctacccaaagtcgccccaagagccagaggcttaagaaatgtagatattttataaaatacggtgtcatactacattaagcacaaagacagcggagttggaccaagcgataaggctgaccaccaagggccgacttcagactgatgtcagacttctctgacatcaaatccgggaagtgaggaaggaatcgaaatcacatatgcactcccctgtcctttggaggcactccgggagtccagggacaataataaatatccttaaacgaaataataataataataataataataataaataataataataataataataataataataataataataataatgcataggccgggcgcggtggctcacacccgtaatccgagcactttgggaggccgaggcgggcggatcacgaggtcaggacttcgagaccagcctgaccaacatggtgaaacccagtctctactaaatacaaaaattagctgggcatggtggcgcgcgcctgtaatcccacctactcgggaggctgaggcagaagaatcgcttgaacccgggaggcggaggctgcagtgagctgagatcgcgccattgcactccagcctggaattcagagcaaaattccgtctcagaaaaataaataaataaacaataataataataaagcataaactcaaaaagaccatttcatctggttccaaaggggccgactactaaggcaccatacaaaacctccgggggcgcccgctggctccggccgactggaaagccttgatcctgcagacctcccaggcggtttcataggctgggctctccctgcactgagtcttaccccatacggagggagggaccccaaaatatagaaattctaaccaccctctcggctcagccccgacgaccctgggagccgtcaacttgcccccacagtcccggattcccagccccctacttcctcacctggtccagctccccatcccgtttccggttcctttcccccaccccaaacccaacccccggcgctaaggacagtgggagtcgtagtctacattgtttagggaaggagattggcgtacccgcagccacttccgccggaaatgctccaatcccggaaggcgcactaaattagccctaaagatcgctgggaattgtagtttaatctttccatcagcgttaaatcaggaagtcttgagaagtgaaaagccacagcctgtaagtacctaggaaatcctgggttctatccctaaagggcatcgcccttccaaaagttcattcactattttcccaaagggattgcaaatcaggaagcttcaaccatccccaatccctcacccacctgaaggtattaacaatagctaaagaccattgctaggccccctgccaccgtgggtataagagacttctcctttgcagcctgccattacttatacagaacatccacgaagacatttctggtagctcctaacaactttttagcaaggggcatcccccattactgtccaagcccatctccagagtgtcaccattttgacttctttctctgccttgctatctgcccaaccctataacctcagtattagtcaagagttttccagagaacagaactaacaggatatctatctatatgacgagatttattccaagaattggctcacaggattgtggaggccaagaagtcccacagtctcccgctctgctgtctatacactggagaaccaggaaaacaggtggtataattcaggaaagtccaaagcaggggaggaggctcactgctaagtcccagagcctgaaggacgaagaaccaggaactccaatgatgtccaaaggcaggtaaaatagatgtcccagctcatgaagaaagagaatttgccttcctccactcttttgttctactggcccccaagggattggatggttcccacccatattaatgagggtgatcttcttagtctaccaattcaaatgcaaatctcttccagaaacactccacagacatatccagaaataatgttttaccagctatctgggtgtcccttagaccactcaagtagacacataaagttagctatcactcttccatccaaatcttctccctcaaatactttgtccaggaaggcttccctgatcaatcctcatcccatggctgcacctaacagtccattcccccaccattcccccatcccaatatctatgtccaaatctgtcctattcctagttttgttcttgtgctctatctgggtctggttctgtgtcgtgactctaaaactttcattagactgggaaccccctaaggttagttatcttctatattcctcccaccccacaatctccacacaccttagcacagccaaggctctaatcacagaagcaaggtctccctgtgagtggtagaaaaggagacctataaaccccagaacaggaagaagtgagagaaaaaggatgctattcccttcccaggacttgtctgatctcctatcaacaaaaacttaatgggtgcagtaggagcttcagggagctgtgagcagtgacctgctgacatcaagggtgagaaactaccctgacccttgcaagactttggaaatggaattaatcatccacctcatgaagcccataatttcctgagctttaatttttaccagatcctctccctctctgtgtctctctctgcctatgttatttgcccctctctacttatgtaaatttatctctatttctagtctcttgtgtagctttctctctgtatctgcaggtctctgtctccctctgtgaacatctccctgtttctgcttcttaccctagaatgactggaataagagaatctgagcttctagaacaagttcccccatctctgtgtgtctatgtatttctgtgtttctgaccaaaaataaggtgaagggacctcattgtggtgtcatctcattgcttaaaaattccaggatttccaccatcccttggacaaccctcctgtccaccccgacccctctgtcacttgcttgcccagcact

SEQ ID NO: 916886 - DNA, 4001 bp, Homo sapiens
attgcttgaggccaggagttcaagaccagcctggctgacataatgagaccccatctgtaaatataaaaataaaataaacagcttttaccaaggaggcactcctgatggatccttctccacttctatatcctgagttcactcaaggcttagctgcccactttgcactctgcttgttttccagactctgggtctgtgcccatcatatgtgtgcctcccatgcgacaaggaccattgtcattccttcctctcaactttctgcctgggtcaggagtgacttctccaagataagaactcaaggttgacacaacagctcgataaacctattttctcaccctagcctaggggaagtgggagagaaaagaaatcagaggcccaacttaggaagtccttccctgactgtctcagtagtctttaactgatctgttgtccaggtggctacccaggacaaactgggctcatacaaaagctgagaagggtgctgtggagaacgccagtgtttcaggggaccttgctttgcatctccccatgcaacaccaacattagcagattggctgctccagctctagaatctcgagaagtcttgagcccacctttgacatttagacacctgtgttggaaacagcaaggctggggaaaagagtggcaagatactactttcattgttccataacttcaaagcctgatctcatagcaagagccacaggctggaagtcaattgatttgaattctactcctgtttcatctctaagaaggttctcttgagcaactcatttaactctcttctctatggaaaatcacatactccatccaacctaccacctgttaactcattttttttttcaatacttatgagtctcttacatgacaggcactgcagcagtctcttgatgaggaagaaatccaaaaagagtaaaatgtaggccaggctttctgtaagctcataatctgctgtgagggcaaataaacaactaactgtaatacagtgtgatgtgagctttaatacccggaacaaaacactaagagaacccaaaggaggaacttgtaagttctacccaaagtcgccccaagagccagaggcttaagaaatgtagatattttataaaatacggtgtcatactacattaagcacaaagacagcggagttggaccaagcgataaggctgaccaccaagggccgacttcagactgatgtcagacttctctgacatcaaatccgggaagtgaggaaggaatcgaaatcacatatgcactcccctgtcctttggaggcactccgggagtccagggacaataataaatatccttaaacgaaataataataataataataataataataaataataataataataataataataataataataataataataatgcataggccgggcgcggtggctcacacccgtaatccgagcactttgggaggccgaggcgggcggatcacgaggtcaggacttcgagaccagcctgaccaacatggtgaaacccagtctctactaaatacaaaaattagctgggcatggtggcgcgcgcctgtaatcccacctactcgggaggctgaggcagaagaatcgcttgaacccgggaggcggaggctgcagtgagctgagatcgcgccattgcactccagcctggaattcagagcaaaattccgtctcagaaaaataaataaataaacaataataataataaagcataaactcaaaaagaccatttcatctggttccaaaggggccgactactaaggcaccatacaaaacctccgggggcgcccgctggctccggccgactggaaagccttgatcctgcagacctcccaggcggtttcataggctgggctctccctgcactgagtcttaccccatacggagggagggaccccaaaatatagaaattctaaccaccctctcggctcagccccgacgaccctgggagccgtcaacttgcccccacagtcccggattcccagccccctacttcctcacctggtccagctccccatcccgtttccggttcctttcccccaccccaaacccaacccccggcgctaaggacagtgggagtcgtagtctacattgtttagggaaggagattggcgtacccgcagccacttccgccggaaatgctccaatcccggaaggcgcactaaattagccctaaagatcgctgggaattgtagtttaatctttccatcagcgttaaatcaggaagtcttgagaagtgaaaagccacagcctgtaagtacctaggaaatcctgggttctatccctaaagggcatcgcccttccaaaagttcattcactattttcccaaagggattgcaaatcaggaagcttcaaccatccccaatccctcacccacctgaaggtattaacaatagctaaagaccattgctaggccccctgccaccgtgggtataagagacttctcctttgcagcctgccattacttatacagaacatccacgaagacatttctggtagctcctaacaactttttagcaaggggcatcccccattactgtccaagcccatctccagagtgtcaccattttgacttctttctctgccttgctatctgcccaaccctataacctcagtattagtcaagagttttccagagaacagaactaacaggatatctatctatatgacgagatttattccaagaattggctcacaggattgtggaggccaagaagtcccacagtctcccgctctgctgtctatacactggagaaccaggaaaacaggtggtataattcaggaaagtccaaagcaggggaggaggctcactgctaagtcccagagcctgaaggacgaagaaccaggaactccaatgatgtccaaaggcaggtaaaatagatgtcccagctcatgaagaaagagaatttgccttcctccactcttttgttctactggcccccaagggattggatggttcccacccatattaatgagggtgatcttcttagtctaccaattcaaatgcaaatctcttccagaaacactccacagacatatccagaaataatgttttaccagctatctgggtgtcccttagaccactcaagtagacacataaagttagctatcactcttccatccaaatcttctccctcaaatactttgtccaggaaggcttccctgatcaatcctcatcccatggctgcacctaacagtccattcccccaccattcccccatcccaatatctatgtccaaatctgtcctattcctagttttgttcttgtgctctatctgggtctggttctgtgtcgtgactctaaaactttcattagactgggaaccccctaaggttagttatcttctatattcctcccaccccacaatctccacacaccttagcacagccaaggctctaatcacagaagcaaggtctccctgtgagtggtagaaaaggagacctataaaccccagaacaggaagaagtgagagaaaaaggatgctattcccttcccaggacttgtctgatctcctatcaacaaaaacttaatgggtgcagtaggagcttcagggagctgtgagcagtgacctgctgacatcaagggtgagaaactaccctgacccttgcaagactttggaaatggaattaatcatccacctcatgaagcccataatttcctgagctttaatttttaccagatcctctccctctctgtgtctctctctgcctatgttatttgcccctctctacttatgtaaatttatctctatttctagtctcttgtgtagctttctctctgtatctgcaggtctctgtctccctctgtgaacatctccctgtttctgcttcttaccctagaatgactggaataagagaatctgagcttctagaacaagttcccccatctctgtgtgtctatgtatttctgtgtttctgaccaaaaataaggtgaagggacctcattgtggtgtcatctcattgcttaaaaattccaggatttccaccatcccttggacaaccctcctgt

SEQ ID NO: 916887 - DNA, 4001 bp, Homo sapiens
atcctagcacttgaggaggccaagatgagcggatcatttgaagtcaggagtcacaaggatctaccaaataaaactgatattattgtacacagagctcctgttcaaaactttaagacttcttcaaattaaaatggaggagaattacaaacggataagcatggattttgttctctctctcatctgcatgcttctatagatactaacagctggtttcattgtttctcattaatctttctaggtgcacttcctccccggcagcattaggttgagatttcctacaacaatctctttcgatttttacattctctttttttactcgagacaaagtctcactctgtcacccaggctggagtgcaatggccaatctcggctcactgcaacctctgcctcccaggttcaagtgattctcctgcctcagcctcccgagtagctgggattacagacacacaccaccacgcccagctaatttttgcatttttagtacagacaggatttcaccatgttggccaagctggtctcaaactcctgatgtcagatgacccgcctgcctcagcctcccaaagtgctgggattacaggcgtgaaccaccgcgcctgggcctcattctcattttactcatcaacaggggatgagagccgaaatgaatggtgggggccagggcgcggtggctcatgcctgtaatcccagcactttgggaggccaaggcgggtggattatttgaggtcagtaaattttgagcttcaggattcttattgtgaaatgtagctaaatgtcacttcactaggtttttgtgaagattagatcatatggtgtctataaaaatgcattacaattataaattattatacaaatttagaaaatttttggccaggcacgcgctggctcacgcctgtaataccagcactttgagaggccgaggctggaggatcgcttgagcccagaaattcgagaccagcctgggcaacaaagtgagaccccgtttcaatcaatcaatcaataatcaattctccgggcgtggggtcgcgcctgtggtcccagatacttgagaggctgaggcgggaggactgcttgacccgaaatgtcgacgctgcagtgagccgagatcgcgccaccgctctccagcctgggcgactccctgtctctggggaaaaacaaaaaaataaatgaagcctctccttcctgggtcttcggggtaagactctgcccctcctggccgggcacggtggctgacggctgtaatcccagcactttgggaggccgaggcgggtggatcacgaggacaggagatcgagaccatcctggctaacatggtgaaaccccgtctccagtaaaatacaaaaaattagcagggcgtggtggcgggcgcctgtagtctcagctactcgggaagctgaggcagtggaatcgcttgaacccaggaggcggaggttgcagtgaaccgagatcgcaccactgcactccagcccgggcgacagagcaagactgtctcaaaaaggaaaaaaaaaaaaaaaagactttgcccctcctgtgaaaagcaaaactgaaggcggaacccacagagccctccagggcatgcgcagtgggcctcggaggcaaacacctaagtttctgtggaaaagcctatccttcccatccagcctgcagcctggccgccaaccctcgaggccgctcccccgcccctctccttctctgggggccgcagggagtaaggcgccatccttccaatccagctctcgtccccactccccgcaacgcaacccagaatgtcgtcccctttgccaggtttcaacatggcgccccacacaagcgcgggcacagcgtctgggccgcactccctcttccttctctccggcgtggggcccgctccttccaagccgcttccactcacctctgcaaagcttgggctcccttccgacggagacaggcgagcagctgcaggcgacagcagattctccgcgccggcctcggcctgacctttacattggtagcagcagattcgccgccgacgctcgtttcctgtttgttttacctttaaaattttactcccacgcaacgagggtgttatcatctccgaagacaataagctaaaaaaaaatttttttaagagaaaaattgctaattcaacaactaagttgaaagaaagactatcgaatatgcagttacctgggacattttactttattatttatttattcttatttattattttttcttgagacggagactccctctgtcgcccaggctggagtgcagtggtgcgaactcggctcactgcaacctccgcctcccgggttcaagtgattttcctgcctcagcctcccgcgtagctgggattactggcgcccgccaccacgcccggctattttttgtatttttagtagagacagggttttgccatgttggccaggctggtctcgaacttctgacctcaagtgatccgcccgcctcggcctcccaaagtgctgggattacaggcgtgagccatcgcgcccggccccaatttctttataaaaaaaaaaaaaaaaaaaaaggccaggtggcatgcctcacgcctgtaatcccagcacttcgggaggccgaggcgggcggatcacctgaggttcggagttcgagaccagcctgagcaacatggagaaaccccttctctactaaaaatacaaaattagctggacatggtgtcatgtgcctgtaatcccagccactcaggaggctgaggcaggagaatcacttgaacccgggaggcagaggtttcgatgaactgagatggtgccattgcactccagcctgaacaacaagagtgaaagtccgtctcaaaaaaaagaaaaatctatagcttaaaattttatgtttgaaaatatatggtagccactgtcagtggaggccatctgcagtttcagctactagggaggctgagtcgtgaggcttgaggccaggagttcaagttcagcctgtcagcctgggcaacagagcaagacccctatgttgttgtttgtttgtttgtttttgttttgttttgtttgagacagagtttcactcttgttgcccatattggagtgcaatggcacgatctcggctgaccgcaacctccgcctcccaggttcaagcaattctcctgacagccttccgagtagctgggattacaggcatgtgccaccatgcccggctaattttgtatttttagtagagatggggtttctccatgttggtcaggctggtcttgaactcccgatctcaagtgatctgcctgccttggcctcccaaagtgctgggattacaggcgtgagccaccacacctggctgacccctatgcttttaaacacacacacacacacacacacacacacacacacacacacacacacacacacgtggtatgtacagtacatgcaatggaatactatttctccttaaaaagaaatgaaattctaattgctacaacatcatgaatgaacgtagttcatggatgaaccatgctaagtgaaagaagcataaggacaaatactgtatggttccacttatatgagggacctaggatagtcaaattcatggttggaaagtacagcagtggttatcaggggctgctgtgggtgttaggaagatggcgaggtattgtttaacagatacagaggttcaatttgagatgatgaagaagttctggaaatagatagtacagatggtttcacaacaatgtgaatctacctaatgttatttaatagttaaaacagactggccgggcgaggaggctaaggcctgtaatcccagcacactgggaggccaagttgggaggatcacgaggtgaggagatcaagaccagcctggccaacatagtgaaaccgcatctctactaaaaatacaaaaattagctgggtgtgctggcgggcacctgtaatcccagctacttgggaggctgaggcaggagaatagcttgaacctgggagtcagaggttgcagtgagccgagattgcgccatggtactccagcctaggcgacacagcgagact

SEQ ID NO: 916888 - DNA, 4001 bp, Homo sapiens
tccaaatcaggcaaacctgatcattgagaaacaagaacaggacatgacactgtttaccaccacatggtaaaaggagggcaatatgtctgtcatcatcaacaagcaactttgcagaggctgcctctctgctgtcagtaaaagaatgaaaaacagatggagtgacagaaggagcacaggatgagagggagacaatttcagtcctggtctgggctctggctctaactcaatttgtgtcttctctcgtggctggaatttctccacgtgaaaaaaagaagaggcagccgggcgcggtggctcatgcctgtaatcccagcactttgggaggccgaggcgggcagatcacgaggtcaggagattgagaccatcctggctaacacagtgaaaccccgtctctactaaaaatacaaaaaaaaaaaaaaaaattagccaggcgtagtggtgggcgcctgtagtcccagctactcgggaggctgaggcaggagaatggcgtgaacccgggaggcagagcttgcagtgagctgagatcccgccattgcactccagcctgggcgacagagcgagactccgtctcaaaaaaaaaagaaagaagaggctgggcgtggtggctcacgcctgtaatcccagcactttgagaggccaaaatgggaggatcccttgagcccaggagttcgagactagcctgggcaacatgggaaacatggtgagaccctgtctctgtttttaaaaaaaaaaaaaaaaaaaaaaaaaaggccaggcgcagtagctcacgcctgaatcccagcactttgggaggcaaaagtgggcagattgcctgaagtcgggagttcgagactagcctgaccaacatggagtaaccccgtctctattgaaaatacaaaattacccaggcatggtggtgcatgcctgtaatcccagctacagaaggctgaggcaggagaatcgcttgaattttttttgagacagggtcttgctctgttgcccagactggagtacagtggcacagtcatggctcactgcagcctctcccaccctagcctcctgagtacctggaattactcactatgcgccaccatacccagcttttttttttttttttttttttgtagagatggggtctcactatattgcataggctgatcttgaactcctgggcatgagctatccttctgcctcagcctcccaaagtgctgggattacacatgtgagccagcgaacccagcctgtactaacctcttaactcctctcacttctcaacaataccaggacttaggtactatattattattgccttttcagatgaaaaaggtcagacacaaaaaggcagcctgtgccccaaatcctaaagctaagaagtagcccagtggaggagttagaaccaggggcagtgtggactccagagctaaagctcttaatcgtttcctctgatgcttttcataaaatataaggttttggagataaagataggaaaaagaaaacacacaaaccagtattctgggtgtctgaggctgagacccacccctcctctcctgaaggaaaagaacccctccccattcaacgttaaaaagtcacaaggggcccggtgcagtggctcacgccagcaatcctagcacttgaggaggccaagatgagcggatcatttgaagtcaggagtcacaaggatctaccaaataaaactgatattattgtacacagagctcctgttcaaaactttaagacttcttcaaattaaaatggaggagaattacaaacggataagcatggattttgttctctctctcatctgcatgcttctatagatactaacagctggtttcattgtttctcattaatctttctaggtgcacttcctccccggcagcattaggttgagatttcctacaacaatctctttcgatttttacattctctttttttactcgagacaaagtctcactctgtcacccaggctggagtgcaatggccaatctcggctcactgcaacctctgcctcccaggttcaagtgattctcctgcctcagcctcccgagtagctgggattacagacacacaccaccacgcccagctaatttttgcatttttagtacagacaggatttcaccatgttggccaagctggtctcaaactcctgatgtcagatgacccgcctgcctcagcctcccaaagtgctgggattacaggcgtgaaccaccgcgcctgggcctcattctcattttactcatcaacaggggatgagagccgaaatgaatggtgggggccagggcgcggtggctcatgcctgtaatcccagcactttgggaggccaaggcgggtggattatttgaggtcagtaaattttgagcttcaggattcttattgtgaaatgtagctaaatgtcacttcactaggtttttgtgaagattagatcatatggtgtctataaaaatgcattacaattataaattattatacaaatttagaaaatttttggccaggcacgcgctggctcacgcctgtaataccagcactttgagaggccgaggctggaggatcgcttgagcccagaaattcgagaccagcctgggcaacaaagtgagaccccgtttcaatcaatcaatcaataatcaattctccgggcgtggggtcgcgcctgtggtcccagatacttgagaggctgaggcgggaggactgcttgacccgaaatgtcgacgctgcagtgagccgagatcgcgccaccgctctccagcctgggcgactccctgtctctggggaaaaacaaaaaaataaatgaagcctctccttcctgggtcttcggggtaagactctgcccctcctggccgggcacggtggctgacggctgtaatcccagcactttgggaggccgaggcgggtggatcacgaggacaggagatcgagaccatcctggctaacatggtgaaaccccgtctccagtaaaatacaaaaaattagcagggcgtggtggcgggcgcctgtagtctcagctactcgggaagctgaggcagtggaatcgcttgaacccaggaggcggaggttgcagtgaaccgagatcgcaccactgcactccagcccgggcgacagagcaagactgtctcaaaaaggaaaaaaaaaaaaaaaagactttgcccctcctgtgaaaagcaaaactgaaggcggaacccacagagccctccagggcatgcgcagtgggcctcggaggcaaacacctaagtttctgtggaaaagcctatccttcccatccagcctgcagcctggccgccaaccctcgaggccgctcccccgcccctctccttctctgggggccgcagggagtaaggcgccatccttccaatccagctctcgtccccactccccgcaacgcaacccagaatgtcgtcccctttgccaggtttcaacatggcgccccacacaagcgcgggcacagcgtctgggccgcactccctcttccttctctccggcgtggggcccgctccttccaagccgcttccactcacctctgcaaagcttgggctcccttccgacggagacaggcgagcagctgcaggcgacagcagattctccgcgccggcctcggcctgacctttacattggtagcagcagattcgccgccgacgctcgtttcctgtttgttttacctttaaaattttactcccacgcaacgagggtgttatcatctccgaagacaataagctaaaaaaaaatttttttaagagaaaaattgctaattcaacaactaagttgaaagaaagactatcgaatatgcagttacctgggacattttactttattatttatttattcttatttattattttttcttgagacggagactccctctgtcgcccaggctggagtgcagtggtgcgaactcggctcactgcaacctccgcctcccgggttcaagtgattttcctgcctcagcctcccgcgtagctgggattactggcgcccgccaccacgcccggctattttttgtatttttagtagagacagggttttgccatgtt

SEQ ID NO: 916889 - DNA, 4001 bp, Homo sapiens
cactgactacctacatcactcactgttctgagctctaaagaaacaaagataaaggcactaaaaaaaaaaaaaaaaaaaagcgggccaggtagggtggctcgtatctgtaattccagtaatctggaaggccaaggccgggggatcacttgaggtcacgagttcaagaccagcccaggcaacatagtgagacccccatctctaccaaaaatagtcaggtgtggtggtgcacacctgtagtcccagctactagggaggatgaggtgggaggactgcttgaacccaggagctcgaggctgcagtgagctatgattaggccactgcactccagcctgggcaacagagcaagaccttgtctcttataaataaataaataaatgagtccctgtcaagaagttggagatggggaggggaactcctcacatacaaataattatattgcatgctgcactgtagtaaaaggagatatactaggcacaagggtaccaaagcaatccaggggaaaaaggaaaggttgcctgaaataagtaatacctcagttttaaaggataagagtttatttccagagcgggaaaaaatgctgttccaggcaaggctagctacttatgtaaaaggagggaagagtgatgcaacaaggtggttttggggacatacaattcagcattgtcagtcaaagccccaaatataaaactacagaaggaagcagagggcagatcacgcttgacagtatttaactggggaagctagggctaggtcctatctgactttgtcagtagcaccgcctcttacttacagcaattacttaatgtctatttattcagcaaaccattaacatctccagtgatttcggtttttgccctcttctgctcactcaccagtcaaacaaagaagagaactaagaaacttggctactaaccccctctaacatgagcatattcggagtgatcttgatatggcgattactccaataacctaatgggtctccagttttcattctccaatttgttatccaccacagtaactatgattttttaaagtgcacatcagattgtcatatttctgcttaaaatgatccaatggcttccaaccgaatcattttaaattgatttggagtacaatcaaaacctcccaatacagcctaagaggtcctgcccaacgcctgctcctccgataccatctcttaaccactattcgcgcaagtggctatacctttctgtcaatttctccaaatgaccaagctttctttccggccgcaggtcttatgctcctattccctgtgctcggtacactcctcctcctgctctttaaagggtcgtatttcatgacacttaggcttcgagttaaattccacctcctagggaggccatctctgactaagcctctaatgtctaacgcgcaccctcacagcctcctgtctgcattgttcttagcacttattatttgcaattacatacttgttattttttgactaatgtctgtcttccccacccaagtgagttaatctagagcatggccgtatcattactttcacggaatgaaagtgaattctggagtgtggttaagtgggaagtgcaaattctctttgacttttaccccgaccctatagccccaactaagaataccccaggcccggattcaaacaaagagaagaaggcacgggcactcctaggaaaagaaaggcatcgggaggagcacgcgcctcagaaacctaaaagcagagtgaaaggagctggcgacagggtgcgcggcgcctcacgcggatgaatgggaaacgcgcgaaggaaccagcaggccccgcgaggctggtctccctccttctctttctccccgcttctcccgccgttctctttctccttaccatcgtaaccacggccgaatgttgcaggctactctctgccgaccaggccgccgcccgtccctcgtgactacagcaggtaccgcaggtcccgagccgcagtttcaagagaaatggccgccaaacaggactatgacctttcacctcccaccacggcccttcctgcctctgtgattggacgcaaagaggtgcgtgctgattggaggagatggctggcccagtatctcctagcaaccagcagcggcttgggtttgcgccttgcaggcggcgcgcggaccttgggaaaccggctctgagcatcgctgtgaggcagccaaggactggaggcaggccggtgtttttaaatgtggtgtccttcctagagggcggtctgggagaggctgtgtaacggatgtgacttctccccaacttggctaatggggatttactttgtctttttacacccgtgagaatgttcggggtcccagagttccttcctcactcttccaacaggttccatgatttgggggcgcctctgccgcaggccctttctacctgagtgttctctcttctgcaacacccgttttaaccccttttaaaggaattgggggctagccagactagactaggggcggcgaaacgcactgaagagagttggatacagaatttcttgcaaacgaggtcgagttgcgtctgggatacggtgtcatgccccacccccgccccacgaccctgccggccccacctttcttttgcttcgcctgcagaaacccgcacggccttcatacgtgcatttgaaattacctaagggcgtaagcaatatttcctctgtcacggattaaaactttcgatgtaacggtgttatctgaatctcactagtttttgtcgtaatcctattgagttcgggtcactctgatctgaaatgctaaatgcagttcttggagaacacgccctttgggaagtaacgcttttttgcggccctgaagagatggatttggagttgaggatgaaatgttgggtgttgaggcattgtggagcagtgggcaagactttggagggggcctgcattcggaacctgcgtctatcaggcgcggccggtgttgggcagtgtcttaaccccgagggccattgtttcctcggcaggaacgcggctttaaaaacggaaccatcctcagggtggttgcgagaatttaacgtaaaacggggcttggccttgtaaaagctcagtgtttcacgtaaatgttgaacactgaccagacaatgattgtcagtgtagtttttaccaaacagttattagatttattcaccctaaacttcagtggatttctccgtttgtctattgttttatgaactttaagtctttgtatagactttgagttcctactatgtgtcaggctttttcaacaatcgtggaaatcttaccttactgtctgattcggggtgacagccccgtttaagagatgaggaagtaggcccagcaggtaactgttaccagttgagggtagctgtccgagttcttggcgttttcaacaaagaattggacaaaacgcacaaacaaagcagggcagcgaaagcagagatttattttaaatgaaagtacactctacagggtgggcaccgcctggtgcaagcggctcaagagcattggttatagaattttctgggctttaaataccctctagaggttgcccattggcccacaaccagtctgattggttgcgggaggggaccaataagaggtactttcatttttcaactgccacgcagaaaaaggaggggttgaaatgggagtagcctctgatacccagtcagcatggatgggccctaggttccctgcttccagccgctattcttctgcctcatagcttgctcaggaccacatacctgggtttcaaaactctgctttttctacttcatgaagctacctttcaaagactcaatatgtgttttagaagcctgactctttagctgttttctcagtgaagtgaaacgaaatactacagtaaacacattctgtaaagatagtgtatttaaggttggtttttcttttcatgttaaattttttttttaatttgagacagggtctcattctgtcacccaggctggattgtagaggtgagatcttggcttactgcagccttgacctcttgggctcaagagatcctcccac

SEQ ID NO: 916890 - DNA, 4001 bp, Homo sapiens
atacttgggagccaaggggagtggtagggaaaggtcagggctagggccagagggcaggaccgggtagaaggtcagggccagggcagagcgaggcccagtagatggaggtcagtgttaggaagacaaggggggaagagggaaggctggagtcacggtcctgataaagctggcaagggcacataacgtgatgtttctagctcatgatccttgctacagaggagcccgcgcagccattccccagactcacctgctcaaggaacctgggggaggtgggggcagaggtttgtcttgtgatgggtaggattgtatagcctcccgcatggcccgatccagcagctccctcagttgtccctgcgcttgctccagcaattgtgccttcacagcctacgggacaaagccagggtagagcccactgtccctccagtcagccatcctttcattcaccagacattcactgaatttctgtctatgccaggcacagtgctttttttaaaaaaaaaaacaacctggggggtcagcagggatgggggttcagtggtggcaggcctgcggggggaagggcaggcattggtggggtggtgatgggtctgctggtggggtaggaccccgcagtgctaagtgctgtggtaaaaagatgaacaagccatgatccctgcccagagttgatctccttctggcttcctggggcagcagcgaggatcagggagtgacagcaggagcaaggcttcccctccctgggtctgaattccagcctggtcacctccgattgtcactcctcacccctggcctccagccgcactagcaggaagactctatctactggctgacttttggtgacctttgggacctgtgcttcaaacccctccatctccatccttaattcgaatccgatctttgcactcaggaacaagtcatcaggctgggcaccgtggctcacacctgtaatcccagcactttgggaggccgaggcgggtagatcacttgaggtcaggagttcaagaccagcctggccaatatggtgaaaccccgtctctactaaaaatataaaaaaaaaattagccacacctggtggcactcatctgtagttcagctactcgcttgaacctgggaggcagaggttgcagtgagccgagattgtgccaatgcactccagcctgagcaacagagcgagactttgtttcaaaaaaaaaaaaaaaaaaaagtcatctttatcaccaagcctcactcctgcttcctgctaccaaggatctgtccacttgacctctgacctctgacatccctcacctccatgtgtcgggtccattgtaccaagtccggggctctgtgcgtctcagtgtttcctgtgaggagggatcaaaggcacagtcaacaggaggaattggggttctgcagacccagaggcatcctgtggtcaggaaatgctttgtgtgctcagcagctgccctcaccccaaccagccaatatctagtatcatggttggggctactagaaggggaagttgctgttgccagtggtgaggaggccataggcaagcagggggcctggtgacattactgggaacagggcactcagggaatgggaagctactccattcactatctggggctaaacagtcagaaggataaggccaggccacagctctgacatagctcttttctgttccatcttccagctgggtggctctgggctgaggccagggtctaccttccttggcctctctggacagcaggaaggattggcatcaggcagttggagccttctctccatagcgcatctctccccgcctcccccccacttgcctgtgccttctgcacccccgagggcggctcaccatctccacagggttggcgctcccgctcccctcccagcccttctgtcctctgcagacgcagacgggccccgcctggctccatggtgcggtctccagcgggcagcaggcagcccttgcccgtgttgcctccttccttcgcagtgtggcctgccctgtagagctcttgtcccactcagctcaggtgacagctccaaagactaaagtcctttcaggaggagggggcctctgggagtgcgataggttatctgatctggaggcagagcttctcagattcagacctcactctgctgtctgtcgcagggatcgccacatccccctaacaccccaaccaccatccagatgcccagctccaagggtgctatccaccccgccacacacacacaggaatagtggctgggtacatcttggggaggggaactttgcctctcagaagcttgtcacctagcatggctggccttccagtctctctcccagcaggctgaaggtcagggaggagtcagaaatgtcttcatgtatcagtgcgttcagctcgctttcaccacaaggtgtgtgattgacacatgtggtaatattctgatggggttggcactgtgctactcacggaactggggcccctccaggaaaggctgagtgtcagggcccctgaactgacagggccgcttcctgacacctgcttgggtgagcatgtaggcagaaaggagactaaacaaacacgtattcagcacctagggaataccaggtattgtcacatatggaagaaccggatgcaaacctccctctgtcatttaccagctatataatttcaggcaagtgaccccaaattttaagccagtttcctcctctgaaaaataggggtaaaaatccctatatcacaaggttatcgtaagctcaaaatgaggttgtccaggtaaaatcacatggttcagggccatgggatgagctcatatattagtaataatttccttctttttttagtaggaagtaacagaagggtatgtgctttgagagttcctctttgctgggttcctgctgggattaactattaatccttcccctccctttgtgtccaaagatcagtgttagaaacaaggtcacaacttcagattaaggccatgatctcagtgtctccccttcccactcccaactcctggtgggcagctctgtgaggcttgatggcttgaagcttctgcctggctgtcacaggaaggactaaaggtatccacaggaaaggagaaatgctgtgagtgagctgtagtggggtaaagagagggccagggattccagaattgtgagaggcagacacagagacacaagccagcgaccccaagcacagctttattgacaccccagccaacaccaacactctttccaaccagcggtgaggggcccatggggcggggcctgaaggtggattgagggcctcggttttttgttgagtgatgacagctccatgttccttccagtggccctgcagcccctctatcccccagctttagccgctactcccagtggggcaggaggagcttccattgccatctggagaccctggcagggacttgcccatccgatccacacaccagcagggacctcggcgctgcccctgggaggagcggcactggagagagaggcacacaggtcaggagtgaggccagaggcttccagcaggagaatgagaggggacatctgagtctgaggatgtaaaaacacctgagcgtctcctcgggggttccctctcttttttttttttttttttttttttttgagatggagtctcgctctgtcgccctggctggaatgcattggcatgatctctgctcactgcaacctccacctcccaggttcaagcaattctcttgcctcagcctcctgagtagctgggattacaggtgcatgccaccacatctggctaatttttgtaatttttaaaacagatggggtttcaccaggttgttcaggctgatcttgaactcctgacctcgtgatccaccagccttggcctcccaaagtgctgggattacaggcatgagacaccgcacccggcccagtgttccctctctttagttccccctcttcaaccaataaattgtgtgcattctgctagcctggaacagtagttttcaaagtgacgttcccaaatccggatcacgagggaacatgttagaaatgcata

SEQ ID NO: 916891 - DNA, 4001 bp, Homo sapiens
gacctaggaagagcaaatagtcacctgcagatccagtgggaataggcccttgtcaaggacaagtagaaaaaattaaaaaggaaagaacaggagagattccccaaattggcattccggtctcacacctggcgcagcccgagggcccccaggaagaagcacccacacaaacttggttctccgccctaaagcgctgcggggccccgaggcaccaacccggggtgcggaggtgcgggagctgccgcatctccgcccgggaggctcctcgctcccctccccccgcttcctggtgcccgctctggcggggttgggggtgccgcggcggtcgctcccggaccaggatggctgcggtggttctcgccgccgcgggcgctgtcgaggaatcggcccgagcgcgcagccctcgcggggctccgaggcgaggccggggccgagcgggcggtcgcgagcgctgcggaaaatgcaaaccaccaacgccgcgctcttacctcgacctcggccgcggccgccgccgccgcctccgcaccaggcagcctcctcagcggacatggggcgggggggtggggggaaaaggggaggtgggaggggcccgggagaggaggggcgtctgcccttgtttcccccgttaacgtttaatttgggaacgagatgcccggggatgcaaccagccccgcgctcggaggcggcggtcggagttccgtgcgcagagggcacacaaaagcctcgaggatcattgcctcgaccccatcccccaccgcgcggcgacgccccctacgggctgggacacctccactctcggactgctgccgggtttccctccggctgcgaccctggaggtgggaaggagagagggagggagggaggaaggagcgagggcgggaggcaggccggtggggaggagcgggagatcaggttattaggaggattattaatttgaatggcagtttaggggaaataaaaaaaagaaactccagacacttccagacgccgagaaggggctggagaaagcaggcagcaacgctaggccgcggggcagagccgcggttcggactctctcttccccggcgctccgagctgcggaagcccaggccgtccgccgctccccggcgcacgcggccgcgcctcgccgccctccccggtaactctcctcggggcggagccttcgggcttcccccactaccggtacctgccgcgggcgcccgagctgcgggcacggggtatcctgaggctgtgcacccgggaccccggcgcgcactgtccgcgggccacgcggtgagggtggctgcgggcgagagggctcatgcttcaggggaagcccaaggcccgccagccgcggcggctgcgacgagacttggcaagagttaaacgtcggtcccaggagcagcgagtgcgcgcgacttcccagaccgacgcgcctcccttgctccccgcctccctccccagtcagcgctccgctcgcgccccgcccggctgctgcggaggcggctttccaggaactttccaggaatcggcctcacgtgaccgcgggccccgctactgctttaaagaggctcggtcgcaatacacaggcttcagggaagaccgggtgagagcgctcgggtgcagggcgggcggtgtgcacgccggggtcggcctgcctctggccccacaccccggggtgctcgggcgcaagctagagatctccccggccaccggctacagccaaccccgtttcggcggccggagcctgccccctacccgggccagctgagcgcccgggttcagggaaggatagcgatccttggcccttggcctgccacgggggtgggttcctctaaacatcccggcggcgccccctcgatgcgaccctcctggccgcacttttgcggggggtgggcgtgcaggagcgactgtgggtcctcggaaaccagactctccggctctaagacacatcgatggcgtggggacgccgtgctcgtcccggtgcccacggccggggaccggaggcggtccccttgatcaggtcctggaaggcagcgagcgggagagcagcgcctccttaagcggcgccggccgtccttagtcccctccccctggcgctccggctccttgtcacccgcacccacccggctcctcccttcctcctcccctctgctccaacgtctccggtagacccggcggcccgcccgggtcacctgcgccggctgctaagggggcgcccttacctgcgcgcccggaaggggcttggtgactggcctcggttccctcagtccggagagtgtctctgccattccctgcagggctgacgccccagggctgggattcggaaggatctcggcacctctaccctacctgggattctcacctccaaccccgttggaggccccctggccttagtggaaactcatctccttgtctgcgcacccgcccccgaaatatgacctacttgaaatgtgacctactttttaaaagaaacccttaacaatcacgggaaaaccggatccaaaatttcgataagcatttttctttgaaatactattctattgcatcactgctcgaaagcttgaaaggtcaatggccacttttagttgaggccgcggctatgggaagttgggcgaggaagggggaggggtgggagggaggcgcgtcttgcaaactttgcctggtgccccccctgccggctctgggaggaaacgggaaccagctcccaaccttggggtctgcagccggggaccaatggttttctcaataattttcctgcttttgagtacataattctatgcagatgataagcagatgagtcggggaggggggcatttcccagctaacaaagagctttgttaacgctggagccgtgtgcccttaatcatgtttcgttttttagaaagagccttttatagtgtgggcggagctaactgaaccctagttaaaatcctctacaaagtagttgaataattttgcacaaggcacttaccctctttggacctctggccctttttataacatgaagggctagattcgggttctgggtgagggactgggataaaggaacaaatcagattccatgtgaagcctgtgtacagtctgaggccccaagccttttaagaaccactatgtctactagggttaactgccctctaaattgtcctaatatggcttcttattccttgatggagaatcctagaggaagggtgtacccacactttagcttaaataaaaaggtatttattcctaaaactgacggagggcggggagggagcatgaccaagtctccctctgtcgcccaggctggagtgcagggcgtgatctcagctcactgcaacctccgcctcccaggttcaagcaattctcctgcctcagcctcccgagaagctgggattacaggcgcccaccaccacgcccggctagtttttgtatttttagtagagacggggtttcgccctgttggtcaggctggtctcgaactcctgggttcaaccgatcctcctgcctcggcctctcaaagtgccgggtttacaggcgtgagccacccctcctggccctaacatttttatacagtaagtttaatatttacttgatagtgggttgaaatgaatcttccagcaactccttttttatgtgctttcctgttgccttggtgcatgctgttccctcttcctagaatgctccaaccctgatggctgcatcatacttgattaaaagaatcctggccgggcgcggtggctcacgcctgtaatcccagcactttgggaggttgaggcgggtggatcacttgaggtcaggagttcaagaccagcctggccaacatggtgaaacaccgtctttactaaaaatacaaaaattagccgggtgtggtggtgcatgcctgtaatcccagctactagggagactgaggcaggagaatcgcttgaacccgggaggtggaggttgcagtgagccgagacggtgccactgcactccagcctgtttacctctctgacctcatttcctcctgctctgttctttgatcactctgttcaagttac

SEQ ID NO: 916892 - DNA, 4001 bp, Homo sapiens
ctcctccgccgaccccgcggtcccccactggctccgcgtcccttccccgccattcccggagggctcaaggcaccgcagggtcatgagagaagggtcaccgcggcaaagacaggtggccgcccgagctggggtcagagaagggttcgcgtccttccttgaagtcagtgcgaatcccaaaacgagtccctgcggggtgtccgaaatggtggcagagagagaagggatggggctctttctccccagatcctggaggacggatgacaaagtccctcgcagccgcggtcacccactgatcgcctacaaagagaaagcgggaggttgggtcagtccaaactggacccctgcggctggggtgggggtggggaaatagacgtggaaaatcccagggactcctccgcctctacgttcctgcaccatttaaccccaagcttccagttagcgccctggcccagctctagagaaaagataaagagagcagagatccaagataaagttggctgaagaggtggggggcggaggtcaggaggagggtgaacagggtgtcttcccgcccagggtcactagctgaaatcaaagactggcgacctaggaagagcaaatagtcacctgcagatccagtgggaataggcccttgtcaaggacaagtagaaaaaattaaaaaggaaagaacaggagagattccccaaattggcattccggtctcacacctggcgcagcccgagggcccccaggaagaagcacccacacaaacttggttctccgccctaaagcgctgcggggccccgaggcaccaacccggggtgcggaggtgcgggagctgccgcatctccgcccgggaggctcctcgctcccctccccccgcttcctggtgcccgctctggcggggttgggggtgccgcggcggtcgctcccggaccaggatggctgcggtggttctcgccgccgcgggcgctgtcgaggaatcggcccgagcgcgcagccctcgcggggctccgaggcgaggccggggccgagcgggcggtcgcgagcgctgcggaaaatgcaaaccaccaacgccgcgctcttacctcgacctcggccgcggccgccgccgccgcctccgcaccaggcagcctcctcagcggacatggggcgggggggtggggggaaaaggggaggtgggaggggcccgggagaggaggggcgtctgcccttgtttcccccgttaacgtttaatttgggaacgagatgcccggggatgcaaccagccccgcgctcggaggcggcggtcggagttccgtgcgcagagggcacacaaaagcctcgaggatcattgcctcgaccccatcccccaccgcgcggcgacgccccctacgggctgggacacctccactctcggactgctgccgggtttccctccggctgcgaccctggaggtgggaaggagagagggagggagggaggaaggagcgagggcgggaggcaggccggtggggaggagcgggagatcaggttattaggaggattattaatttgaatggcagtttaggggaaataaaaaaaagaaactccagacacttccagacgccgagaaggggctggagaaagcaggcagcaacgctaggccgcggggcagagccgcggttcggactctctcttccccggcgctccgagctgcggaagcccaggccgtccgccgctccccggcgcacgcggccgcgcctcgccgccctccccggtaactctcctcggggcggagccttcgggcttcccccactaccggtacctgccgcgggcgcccgagctgcgggcacggggtatcctgaggctgtgcacccgggaccccggcgcgcactgtccgcgggccacgcggtgagggtggctgcgggcgagagggctcatgcttcaggggaagcccaaggcccgccagccgcggcggctgcgacgagacttggcaagagttaaacgtcggtcccaggagcagcgagtgcgcgcgacttcccagaccgacgcgcctcccttgctccccgcctccctccccagtcagcgctccgctcgcgccccgcccggctgctgcggaggcggctttccaggaactttccaggaatcggcctcacgtgaccgcgggccccgctactgctttaaagaggctcggtcgcaatacacaggcttcagggaagaccgggtgagagcgctcgggtgcagggcgggcggtgtgcacgccggggtcggcctgcctctggccccacaccccggggtgctcgggcgcaagctagagatctccccggccaccggctacagccaaccccgtttcggcggccggagcctgccccctacccgggccagctgagcgcccgggttcagggaaggatagcgatccttggcccttggcctgccacgggggtgggttcctctaaacatcccggcggcgccccctcgatgcgaccctcctggccgcacttttgcggggggtgggcgtgcaggagcgactgtgggtcctcggaaaccagactctccggctctaagacacatcgatggcgtggggacgccgtgctcgtcccggtgcccacggccggggaccggaggcggtccccttgatcaggtcctggaaggcagcgagcgggagagcagcgcctccttaagcggcgccggccgtccttagtcccctccccctggcgctccggctccttgtcacccgcacccacccggctcctcccttcctcctcccctctgctccaacgtctccggtagacccggcggcccgcccgggtcacctgcgccggctgctaagggggcgcccttacctgcgcgcccggaaggggcttggtgactggcctcggttccctcagtccggagagtgtctctgccattccctgcagggctgacgccccagggctgggattcggaaggatctcggcacctctaccctacctgggattctcacctccaaccccgttggaggccccctggccttagtggaaactcatctccttgtctgcgcacccgcccccgaaatatgacctacttgaaatgtgacctactttttaaaagaaacccttaacaatcacgggaaaaccggatccaaaatttcgataagcatttttctttgaaatactattctattgcatcactgctcgaaagcttgaaaggtcaatggccacttttagttgaggccgcggctatgggaagttgggcgaggaagggggaggggtgggagggaggcgcgtcttgcaaactttgcctggtgccccccctgccggctctgggaggaaacgggaaccagctcccaaccttggggtctgcagccggggaccaatggttttctcaataattttcctgcttttgagtacataattctatgcagatgataagcagatgagtcggggaggggggcatttcccagctaacaaagagctttgttaacgctggagccgtgtgcccttaatcatgtttcgttttttagaaagagccttttatagtgtgggcggagctaactgaaccctagttaaaatcctctacaaagtagttgaataattttgcacaaggcacttaccctctttggacctctggccctttttataacatgaagggctagattcgggttctgggtgagggactgggataaaggaacaaatcagattccatgtgaagcctgtgtacagtctgaggccccaagccttttaagaaccactatgtctactagggttaactgccctctaaattgtcctaatatggcttcttattccttgatggagaatcctagaggaagggtgtacccacactttagcttaaataaaaaggtatttattcctaaaactgacggagggcggggagggagcatgaccaagtctccctctgtcgcccaggctggagtgcagggcgtgatctcagctcactgcaacctccgcctcccaggttcaagcaattctcctgcctcagcctcccgagaagctgggattacaggcgcccaccaccacgcccggctagtttttgtatttttagtagagacggggtttcgccct

SEQ ID NO: 916893 - DNA, 4001 bp, Homo sapiens
agaatgatttgccagatactttactttttttcttttttcttttttcagatgcctagagacagcgtgccgcgcgaattgcctgactgtacttgaaagcggcagtaccctgggcgcgccgaccatggaagccgcgctcggcgggggcttcgcagcctactctcgacgcccgggcagccgccctcgcggcagtgtcagtccctgaacttggccgccaagatcctgggctgcagccgcagctccgcccgggagccagatgctgctgggcctgcggggcccgcggcaccgacttgctgattgcaccccgtgcaaagggaggcgcccgacgctttccccggccggggttcgagcccgggagcctaaccctgagcagctgcggaaaacagtaaatcttccagcgtgctaagaagctatttccaagaagctcttcccgcgctctgcgctccgccaggcctgagtccctggagaaccactttccttacgcattcccaaggacccaggaccctgcgagcgtgctctccgcggtcccttggaagcaagggacgtatttccatcttattctttgcttcccacctcgaccccgcttcctagctgcttccttggggaggcgctccctcccgcacgcgtcgcggccgatcggctccctacctgtctgaccgagctcccgcagggccttcgccagacgcgccgcctgcggggatggctcctccgccgaccccgcggtcccccactggctccgcgtcccttccccgccattcccggagggctcaaggcaccgcagggtcatgagagaagggtcaccgcggcaaagacaggtggccgcccgagctggggtcagagaagggttcgcgtccttccttgaagtcagtgcgaatcccaaaacgagtccctgcggggtgtccgaaatggtggcagagagagaagggatggggctctttctccccagatcctggaggacggatgacaaagtccctcgcagccgcggtcacccactgatcgcctacaaagagaaagcgggaggttgggtcagtccaaactggacccctgcggctggggtgggggtggggaaatagacgtggaaaatcccagggactcctccgcctctacgttcctgcaccatttaaccccaagcttccagttagcgccctggcccagctctagagaaaagataaagagagcagagatccaagataaagttggctgaagaggtggggggcggaggtcaggaggagggtgaacagggtgtcttcccgcccagggtcactagctgaaatcaaagactggcgacctaggaagagcaaatagtcacctgcagatccagtgggaataggcccttgtcaaggacaagtagaaaaaattaaaaaggaaagaacaggagagattccccaaattggcattccggtctcacacctggcgcagcccgagggcccccaggaagaagcacccacacaaacttggttctccgccctaaagcgctgcggggccccgaggcaccaacccggggtgcggaggtgcgggagctgccgcatctccgcccgggaggctcctcgctcccctccccccgcttcctggtgcccgctctggcggggttgggggtgccgcggcggtcgctcccggaccaggatggctgcggtggttctcgccgccgcgggcgctgtcgaggaatcggcccgagcgcgcagccctcgcggggctccgaggcgaggccggggccgagcgggcggtcgcgagcgctgcggaaaatgcaaaccaccaacgccgcgctcttacctcgacctcggccgcggccgccgccgccgcctccgcaccaggcagcctcctcagcggacatggggcgggggggtggggggaaaaggggaggtgggaggggcccgggagaggaggggcgtctgcccttgtttcccccgttaacgtttaatttgggaacgagatgcccggggatgcaaccagccccgcgctcggaggcggcggtcggagttccgtgcgcagagggcacacaaaagcctcgaggatcattgcctcgaccccatcccccaccgcgcggcgacgccccctacgggctgggacacctccactctcggactgctgccgggtttccctccggctgcgaccctggaggtgggaaggagagagggagggagggaggaaggagcgagggcgggaggcaggccggtggggaggagcgggagatcaggttattaggaggattattaatttgaatggcagtttaggggaaataaaaaaaagaaactccagacacttccagacgccgagaaggggctggagaaagcaggcagcaacgctaggccgcggggcagagccgcggttcggactctctcttccccggcgctccgagctgcggaagcccaggccgtccgccgctccccggcgcacgcggccgcgcctcgccgccctccccggtaactctcctcggggcggagccttcgggcttcccccactaccggtacctgccgcgggcgcccgagctgcgggcacggggtatcctgaggctgtgcacccgggaccccggcgcgcactgtccgcgggccacgcggtgagggtggctgcgggcgagagggctcatgcttcaggggaagcccaaggcccgccagccgcggcggctgcgacgagacttggcaagagttaaacgtcggtcccaggagcagcgagtgcgcgcgacttcccagaccgacgcgcctcccttgctccccgcctccctccccagtcagcgctccgctcgcgccccgcccggctgctgcggaggcggctttccaggaactttccaggaatcggcctcacgtgaccgcgggccccgctactgctttaaagaggctcggtcgcaatacacaggcttcagggaagaccgggtgagagcgctcgggtgcagggcgggcggtgtgcacgccggggtcggcctgcctctggccccacaccccggggtgctcgggcgcaagctagagatctccccggccaccggctacagccaaccccgtttcggcggccggagcctgccccctacccgggccagctgagcgcccgggttcagggaaggatagcgatccttggcccttggcctgccacgggggtgggttcctctaaacatcccggcggcgccccctcgatgcgaccctcctggccgcacttttgcggggggtgggcgtgcaggagcgactgtgggtcctcggaaaccagactctccggctctaagacacatcgatggcgtggggacgccgtgctcgtcccggtgcccacggccggggaccggaggcggtccccttgatcaggtcctggaaggcagcgagcgggagagcagcgcctccttaagcggcgccggccgtccttagtcccctccccctggcgctccggctccttgtcacccgcacccacccggctcctcccttcctcctcccctctgctccaacgtctccggtagacccggcggcccgcccgggtcacctgcgccggctgctaagggggcgcccttacctgcgcgcccggaaggggcttggtgactggcctcggttccctcagtccggagagtgtctctgccattccctgcagggctgacgccccagggctgggattcggaaggatctcggcacctctaccctacctgggattctcacctccaaccccgttggaggccccctggccttagtggaaactcatctccttgtctgcgcacccgcccccgaaatatgacctacttgaaatgtgacctactttttaaaagaaacccttaacaatcacgggaaaaccggatccaaaatttcgataagcatttttctttgaaatactattctattgcatcactgctcgaaagcttgaaaggtcaatggccacttttagttgaggccgcggctatgggaagttgggcgaggaagggggaggggtgggagggaggcgcgtcttgcaaactttgcctggtgccccccctgccggctctgggaggaaacgggaaccagctcccaaccttggggtctgcagccggggaccaatggttt

SEQ ID NO: 916894 - DNA, 4001 bp, Homo sapiens
ttatgaacacaaacggcgagccagttttctttcttttttaaaaaatcaactttctgaagctcttcttaagattttcttctaatgaaccaaaagaacatctgcagcatgacacactggctgatgaagcatgacacttttaacattatttaagtaaaataaagatttaggtaaattagaaaaaaatcagaagttagaaataaaagccatgccctttaaaaagtggaaaacccaactcctgtaattgaactacagtaaaaacagaagcaacttttttggatggttggtgtgccccccaccaaaaaaaaaaaaaaaaaaaaaaaaagaatctgcaaagcctgctatgaacagccttctatgtagaaagcactgctatgtacttgttgtaaaagcacagctctagtacaatagcttctgttcgctgctttatgactaccttaccagtcactaagaaatgggaattcccaagtgataattactacttcaagtttacaatcttccctaaactcttttgaactttgccctaatccaaacccaatcacaaccatccatctcccctgcattcttgatttcatctgcctgcaccatctccccggcccactctgctttctaagaaggctcagagaccgtccgtatttaagaagtctgaacatttgtgctccccccacccccacaattaccgggatacttgcaatctgccggtgcctccccgggagggaaagcccgtggcccacacggaaagaccggaatcgcaagcgagagaacttttccctctccctccccctgttgctaccaaaatttcaactgtgccacaactgtaagcttttaggatacggatttggaaagccagaatgatttgccagatactttactttttttcttttttcttttttcagatgcctagagacagcgtgccgcgcgaattgcctgactgtacttgaaagcggcagtaccctgggcgcgccgaccatggaagccgcgctcggcgggggcttcgcagcctactctcgacgcccgggcagccgccctcgcggcagtgtcagtccctgaacttggccgccaagatcctgggctgcagccgcagctccgcccgggagccagatgctgctgggcctgcggggcccgcggcaccgacttgctgattgcaccccgtgcaaagggaggcgcccgacgctttccccggccggggttcgagcccgggagcctaaccctgagcagctgcggaaaacagtaaatcttccagcgtgctaagaagctatttccaagaagctcttcccgcgctctgcgctccgccaggcctgagtccctggagaaccactttccttacgcattcccaaggacccaggaccctgcgagcgtgctctccgcggtcccttggaagcaagggacgtatttccatcttattctttgcttcccacctcgaccccgcttcctagctgcttccttggggaggcgctccctcccgcacgcgtcgcggccgatcggctccctacctgtctgaccgagctcccgcagggccttcgccagacgcgccgcctgcggggatggctcctccgccgaccccgcggtcccccactggctccgcgtcccttccccgccattcccggagggctcaaggcaccgcagggtcatgagagaagggtcaccgcggcaaagacaggtggccgcccgagctggggtcagagaagggttcgcgtccttccttgaagtcagtgcgaatcccaaaacgagtccctgcggggtgtccgaaatggtggcagagagagaagggatggggctctttctccccagatcctggaggacggatgacaaagtccctcgcagccgcggtcacccactgatcgcctacaaagagaaagcgggaggttgggtcagtccaaactggacccctgcggctggggtgggggtggggaaatagacgtggaaaatcccagggactcctccgcctctacgttcctgcaccatttaaccccaagcttccagttagcgccctggcccagctctagagaaaagataaagagagcagagatccaagataaagttggctgaagaggtggggggcggaggtcaggaggagggtgaacagggtgtcttcccgcccagggtcactagctgaaatcaaagactggcgacctaggaagagcaaatagtcacctgcagatccagtgggaataggcccttgtcaaggacaagtagaaaaaattaaaaaggaaagaacaggagagattccccaaattggcattccggtctcacacctggcgcagcccgagggcccccaggaagaagcacccacacaaacttggttctccgccctaaagcgctgcggggccccgaggcaccaacccggggtgcggaggtgcgggagctgccgcatctccgcccgggaggctcctcgctcccctccccccgcttcctggtgcccgctctggcggggttgggggtgccgcggcggtcgctcccggaccaggatggctgcggtggttctcgccgccgcgggcgctgtcgaggaatcggcccgagcgcgcagccctcgcggggctccgaggcgaggccggggccgagcgggcggtcgcgagcgctgcggaaaatgcaaaccaccaacgccgcgctcttacctcgacctcggccgcggccgccgccgccgcctccgcaccaggcagcctcctcagcggacatggggcgggggggtggggggaaaaggggaggtgggaggggcccgggagaggaggggcgtctgcccttgtttcccccgttaacgtttaatttgggaacgagatgcccggggatgcaaccagccccgcgctcggaggcggcggtcggagttccgtgcgcagagggcacacaaaagcctcgaggatcattgcctcgaccccatcccccaccgcgcggcgacgccccctacgggctgggacacctccactctcggactgctgccgggtttccctccggctgcgaccctggaggtgggaaggagagagggagggagggaggaaggagcgagggcgggaggcaggccggtggggaggagcgggagatcaggttattaggaggattattaatttgaatggcagtttaggggaaataaaaaaaagaaactccagacacttccagacgccgagaaggggctggagaaagcaggcagcaacgctaggccgcggggcagagccgcggttcggactctctcttccccggcgctccgagctgcggaagcccaggccgtccgccgctccccggcgcacgcggccgcgcctcgccgccctccccggtaactctcctcggggcggagccttcgggcttcccccactaccggtacctgccgcgggcgcccgagctgcgggcacggggtatcctgaggctgtgcacccgggaccccggcgcgcactgtccgcgggccacgcggtgagggtggctgcgggcgagagggctcatgcttcaggggaagcccaaggcccgccagccgcggcggctgcgacgagacttggcaagagttaaacgtcggtcccaggagcagcgagtgcgcgcgacttcccagaccgacgcgcctcccttgctccccgcctccctccccagtcagcgctccgctcgcgccccgcccggctgctgcggaggcggctttccaggaactttccaggaatcggcctcacgtgaccgcgggccccgctactgctttaaagaggctcggtcgcaatacacaggcttcagggaagaccgggtgagagcgctcgggtgcagggcgggcggtgtgcacgccggggtcggcctgcctctggccccacaccccggggtgctcgggcgcaagctagagatctccccggccaccggctacagccaaccccgtttcggcggccggagcctgccccctacccgggccagctgagcgcccgggttcagggaaggatagcgatccttggcccttggcctgccacgggggtgggttcctctaaacatcccggcggcgccccctcgatgcgaccctcctggccgcacttttgcggggggtgggc

SEQ ID NO: 916895 - DNA, 4001 bp, Homo sapiens
gggaggggcccgggagaggaggggcgtctgcccttgtttcccccgttaacgtttaatttgggaacgagatgcccggggatgcaaccagccccgcgctcggaggcggcggtcggagttccgtgcgcagagggcacacaaaagcctcgaggatcattgcctcgaccccatcccccaccgcgcggcgacgccccctacgggctgggacacctccactctcggactgctgccgggtttccctccggctgcgaccctggaggtgggaaggagagagggagggagggaggaaggagcgagggcgggaggcaggccggtggggaggagcgggagatcaggttattaggaggattattaatttgaatggcagtttaggggaaataaaaaaaagaaactccagacacttccagacgccgagaaggggctggagaaagcaggcagcaacgctaggccgcggggcagagccgcggttcggactctctcttccccggcgctccgagctgcggaagcccaggccgtccgccgctccccggcgcacgcggccgcgcctcgccgccctccccggtaactctcctcggggcggagccttcgggcttcccccactaccggtacctgccgcgggcgcccgagctgcgggcacggggtatcctgaggctgtgcacccgggaccccggcgcgcactgtccgcgggccacgcggtgagggtggctgcgggcgagagggctcatgcttcaggggaagcccaaggcccgccagccgcggcggctgcgacgagacttggcaagagttaaacgtcggtcccaggagcagcgagtgcgcgcgacttcccagaccgacgcgcctcccttgctccccgcctccctccccagtcagcgctccgctcgcgccccgcccggctgctgcggaggcggctttccaggaactttccaggaatcggcctcacgtgaccgcgggccccgctactgctttaaagaggctcggtcgcaatacacaggcttcagggaagaccgggtgagagcgctcgggtgcagggcgggcggtgtgcacgccggggtcggcctgcctctggccccacaccccggggtgctcgggcgcaagctagagatctccccggccaccggctacagccaaccccgtttcggcggccggagcctgccccctacccgggccagctgagcgcccgggttcagggaaggatagcgatccttggcccttggcctgccacgggggtgggttcctctaaacatcccggcggcgccccctcgatgcgaccctcctggccgcacttttgcggggggtgggcgtgcaggagcgactgtgggtcctcggaaaccagactctccggctctaagacacatcgatggcgtggggacgccgtgctcgtcccggtgcccacggccggggaccggaggcggtccccttgatcaggtcctggaaggcagcgagcgggagagcagcgcctccttaagcggcgccggccgtccttagtcccctccccctggcgctccggctccttgtcacccgcacccacccggctcctcccttcctcctcccctctgctccaacgtctccggtagacccggcggcccgcccgggtcacctgcgccggctgctaagggggcgcccttacctgcgcgcccggaaggggcttggtgactggcctcggttccctcagtccggagagtgtctctgccattccctgcagggctgacgccccagggctgggattcggaaggatctcggcacctctaccctacctgggattctcacctccaaccccgttggaggccccctggccttagtggaaactcatctccttgtctgcgcacccgcccccgaaatatgacctacttgaaatgtgacctactttttaaaagaaacccttaacaatcacgggaaaaccggatccaaaatttcgataagcatttttctttgaaatactattctattgcatcactgctcgaaagcttgaaaggtcaatggccacttttagttgaggccgcggctatgggaagttgggcgaggaagggggaggggtgggagggaggcgcgtcttgcaaactttgcctggtgccccccctgccggctctgggaggaaacgggaaccagctcccaaccttggggtctgcagccggggaccaatggttttctcaataattttcctgcttttgagtacataattctatgcagatgataagcagatgagtcggggaggggggcatttcccagctaacaaagagctttgttaacgctggagccgtgtgcccttaatcatgtttcgttttttagaaagagccttttatagtgtgggcggagctaactgaaccctagttaaaatcctctacaaagtagttgaataattttgcacaaggcacttaccctctttggacctctggccctttttataacatgaagggctagattcgggttctgggtgagggactgggataaaggaacaaatcagattccatgtgaagcctgtgtacagtctgaggccccaagccttttaagaaccactatgtctactagggttaactgccctctaaattgtcctaatatggcttcttattccttgatggagaatcctagaggaagggtgtacccacactttagcttaaataaaaaggtatttattcctaaaactgacggagggcggggagggagcatgaccaagtctccctctgtcgcccaggctggagtgcagggcgtgatctcagctcactgcaacctccgcctcccaggttcaagcaattctcctgcctcagcctcccgagaagctgggattacaggcgcccaccaccacgcccggctagtttttgtatttttagtagagacggggtttcgccctgttggtcaggctggtctcgaactcctgggttcaaccgatcctcctgcctcggcctctcaaagtgccgggtttacaggcgtgagccacccctcctggccctaacatttttatacagtaagtttaatatttacttgatagtgggttgaaatgaatcttccagcaactccttttttatgtgctttcctgttgccttggtgcatgctgttccctcttcctagaatgctccaaccctgatggctgcatcatacttgattaaaagaatcctggccgggcgcggtggctcacgcctgtaatcccagcactttgggaggttgaggcgggtggatcacttgaggtcaggagttcaagaccagcctggccaacatggtgaaacaccgtctttactaaaaatacaaaaattagccgggtgtggtggtgcatgcctgtaatcccagctactagggagactgaggcaggagaatcgcttgaacccgggaggtggaggttgcagtgagccgagacggtgccactgcactccagcctgtttacctctctgacctcatttcctcctgctctgttctttgatcactctgttcaagttacactggactccttgctaattctagaactcattagccttgcccctgcttcagggtctttgtatttgctgtctcctctacctctcatgctctccttttagatagctgcaaggtttactccctcacttcctcaaatctttatttaatgccgctttcttagtgagaccttgcctgttggctcactcagaattgaccttccccctgcacatttctctttcctccctgctctagttttttccttaatcatgttcaccatctaacctagtttatgtcttatttctccagcttactttctccccaactctgcttcatgtatttgtacttgcattgttcacagctgtagttcagcaccttgaacatagttcttagcatgtagtaggcatccaatataatcattgaatgaatggatggatgaatgaatggatggatgaatgaatgaatgcattagcaccatggctttaaagttaagctgtccaggtatgaatcctcactctgccaccacttgctacatatgtgatctttggcaatttatttagcctcttctggagatgatcatggtccctaccttacagggctgttgt

SEQ ID NO: 916896 - DNA, 4001 bp, Homo sapiens
tgcacagtgcctaaaagaacttccactgtaagtacttatgattttaaatcattgtggctgaatttatctaggcttctgcctgggagctatatttaaatcaggaagaagcacccctagaaactttgttccatgtatctgcatttgaaaccagattccttccctatctgagctaacagcaattctcatacagctgaattcctttaaaattagacagatcaaaatttagcagttctgtaaaggctctaagaaatcgtcctccttttaaatgctataaaagtcaaacttgaaaaacatttccgtatactttaaagccatctggcccttaacctaatcactcttggccatcgagcctcactcccgtaatcctgatcaaaaattttcctctggtttttctgatggaaatgtccattgcctacaaatctcacatgtgcctacttcattggcctgtttgtgtctgtgtgtgtgttttcagggtactaggggccattatttatgaaaagcaaggaaacaaatcactgtccagtccctttgcagattcccacacttactgccccaaatcccacagatttcccttggtcctgcccttggctaaagaactctgctgagccagaaggcagtccctggggacacctccttatgccttccttgacaaagtcctttggctatctgggtatgtgaggatctcaagtgggttccagcaaatccctaaacttttgtaagaaagtacagttgactgccacccagagtgcctggactgcctggcaccgagtgtagggctctgcatattcacaggattcctcgtcttgacctgctttagctgagaagggaacacattaaaatgaattcacattcatcatcacattctgaatttagtcacagaaaccagcgtcttcagatattcaccagggtcaatctatttattaatatagtcgctttgcaaagtgtagggaaaatgactaataaaatatgtaaacagtgcttcgtgtgcatccgatcaatactcaacaaactgctgctctccaacgcaaacatttccaaatccaatttgatttcaactcgtataacctcttttcattgcttcttattgctgtagccccaaagtgcaagcgagatttcccaaacccgcgcttaaagtgacacaacacgtgagtggtcttcacttggtacactgagtgaggtggggggaaaaagtagttgcaattagaattaaagcttccggtctctgaaatccctagaatcctgaaggatgagacttgtttcagaaattccgggcgggagggagggggagtggtagggagaaggattgcagaaagcgaaacaaaaagacgaaagagtcgggaggtgggggtgactaaggttagggggtgggccaggggtcgctctgatatcctagaagggttaaggggctttgtccaacttttagggtctggccttggacattggccgcgatgcccagcacagcccagggttctccccgcactctcctctcgcatcaaccacctccaccgccaccacttacaaaacaataccagcaacagtacgcaggcttcccaacaaaaatagaaagttatcccgtctccgggtcggggtccaagccggcgctccagggtcccccggccagccgcccccggggatgacagggccactccgcgcctcgggccgcctcccacctctccgccacccccagcccagtccccctccctctgtacttgaggaaactccggcggcggccccctccctcctccgcggctctccagctggagccgggaaggagtgctgagtggcgggcccggcgagcggcagaggggagctctgcgccttggaggtctgcccacaacaacatcgggacgaacaacaaagttaaaacgcagcgattcacgcaccttacccggtctcgttaatgcctcctccggcgtgggatgcaaagtggcacagaggcgggctgggggcccccgggaggagactggagatgggttttggtggctcgcctttttcactctgtgtgtgtgtgtctgtgtgtgtgcgtgtgtgccggtgtgtgtgtgtgtgcgcgcgcgtgtccctctctctccccccgtctctcgctcgcccgctcgctcgcgctccccgtgttgctctcaaggacgaggtgaaatccctttgctggtcatgaggcggcttcagagacaaacaacacaatgcgagtgcaaataacaaaaggcaaaaagacagtaggaacaatgggggaggcgagggcagcgcaccagccggcggtcaccgcggcccggcgcccgccccggggggtgcggcgggggcggggggggggcgcgggggcggtgccgggggctcccgctccctccaggtcgcccccgagctcccgcaagcccaccctgacctccttcttgcagctcgccgcccggccgccctctctatccatccgaagggaaggagccccagagttttcttccccgtctgctgcagagtaactagattgtaaataacgcggcgattacccacaccgtgcaggaattttttttttatctgccctccacttaaaggagcgataaaaatgaaatggcaggagtggaaggagccagggagagcgggatatctctagatctcgatggagctcgcatctataaatacgcattcatgtttagtcaagtccctttgtcaacttcttcccggcgcctgagcctcagccgctgctctgcgcccaggacctggcccctcccggccccctagtccagtggtcaggcggtcgggccggcagggagggcgcgcgcggggggctgcggggtccgtggaacctttccgggaggcgagccgcgggctgctgggcgcggaggctggagccgcgagaggttcggctgctgaagcggccactgcctcccagagccaggctccgcgccgcgcgtccccgccgccgccggcactgtgcacccacctactcctcggagattggggtaggggaaaaaagttttgaggcgctctcatctctgcctccggggtggttgaactggtttggttttgtgttaagcgaagccaaaaaaaaaaaaaaaatcaccacacacacacacacacacacacacacacacacacacagacacacacacacaccccaacccaatgcccaagaaccagggaatgaaatttagtgatatttagggagaaataaggctgggcgctgggctccgactctttctgccgcgacacttgagtgggcgcgtggagccgagagagaccctcagagtcccatccccatcagaagaaactccgtcggtgatgccctgagcagaagctgtggggctgatttaagtgtgtgctctgacagctcccgggctgctccggcgcttatctcttctaatcttactttcattgacttaaaacagctgccggtttgccaggggaaaaaaatcctattaaatctcaaaccagggtggggcgggggcgggggttcctgacagtgatcttcccagagctagtgtccagaaaagagcagggggaagggagagcattcacgggggtggctgcgtgttgggaagggggtgatggaaaggggactaaggaaacaattcgagcaacacgtttcttttcctcgctgtagccttctctccttttgcttttatgccgaggtgcgtgttctctgtccccatctctgtaattctctgcagacgcgcaaccatggactgcgccgcgtccctgggcacccccagcattacccagagtgcaacaacaccatcaggagatcaatgaccagactctatttattcttcacgcgcctagaagagcaggactccggaggagcttgggagcgaggctcggggcttggctgtctctgggcgatctctcccagactttttcgggctgatttctaaacggcagttagtaagcaaatgtaatttctcaatgcatgccacacataccaatcacaatatattcacctaggaaagtgagacatcctttctacccctttccacccttggtagatttgtttctggaggtgggttgctaatacctga

SEQ ID NO: 916897 - DNA, 4001 bp, Homo sapiens
ggaaaaaacgctctcttatatcaacaaaaggtcatgtgctttactgagcagcttccaaagttttacggaaggatcaaataggaacttatagcctccgtttaaagcaccactaaaaccttctgtcaccctagaaattacatgagacagagatgctgaaaatggtaacattctgcacaaaagcgtttttaaaaggtggggagaaaacaatcaatgaaggaagaaagtaagagagtgaatgagaaagacagaagcagcgagttggggagagagagagagatgcttaaggttcatttaatttgctgttataggacgcaacctaaaaacattagcagaaatctcggagactttgcaaatcagttcagtttggtccgggcaatcacaacaaaaaatcagctaacaagattgcagaagccctagctaaaggcttctctaacaaacacgttttgggggagcatcttccaatgattcagagactactgtaaaatgggagagttgtacttcaatatattagggggaaaaaactgtactcacctttcaaactcctgaggtaaatcagggtcagtaagcatgctggaaaagcacaatttccctttgtcacagcagccacctatgatcgtctccaactgaacctgtcaagtgagtccaaaccttctaaaccaattgattttctctctgtctcttccccccctccctccctccctctctctctctctctctctccctctctctctctgtctctctctctctctctctctctctctttctccccccctccttcccctcctctctctcctaggactccttgaccagtctcttaaaggggtagtgcacttccagcagcggagtctggctgctcccccctccgcggagccacacgctccggctgcaaggctctagacaacctcagggtgcctgtcctttccttttaattctctcttctagacatcactgaatgtgagaagtcaactcatttaacacgtctcccatactctgtcttctaaatcataaaactcacacacacacatacacacgcagaacagtatgattttgtaaaacgtatttgctgctgattaaaaacctagtctatataataacagaagctcgattaaactgcatttattaactaattaagcaaaaaatttaatgttagtaatagcatttttacacaaagaattgttattccttctcacccttttctaggctctctccgttcacacacggaaatacacgcacacacacacacacacactcacacacacacaacaatcaggcattgttctgagggaagaaaagcaactttgacagattgaaatatagcagaggccccttcaaggaaacctgtaaacaacttgtcactcactctgtcggtctcactgttagctcgtgctttccgcaaagtggtgcgaacgtcctggcaacccgaccaaagtttcctcagctctaaactccataaaacacgatgtgcgatgtggaggggaataggtatccacatgccaaaataacatacacgagcgaacaaaaacccaaaacgaaatcaaaacataaaaacaaaaagacggtactaacaaactgtcctgtttgggatcgctggggaggtcaggagtaggaagcgcccccctggctgtggatctctttaatttcctctgcccaggcagccacagataacaaggtggacaaactatggctttacagattctaagctggctggcaaggcacagcctccatagcagttccaattatctagataaaaatctggcagccgagaaaggtaatcaggtaatgtacctttgacacgaaatgacagaggcacatacacacagagagagagacacttacacagacatgcatgcagagatggtggctgccccgtgcaccgcagcatctggtcagggagtaagcacacacttaccaacaggagatagtgtgcattcttcacacacgcatgcacacacacacacacacacacacacactcactcacgcacgctctccactcctactgggagggttcattctgcacaaaaggctacattacagagcccgccccaataagggaaagagaggaaaaaaaagccttccattgttgagagggcaggtcagttgattagattttctgtggagaattccacgaggaaattcccttcaaagccgaagtgattaactgggggctattctggaaatggagcagacaatggctcaatagtctgtacagccaatgtccaggctggcactgaactcacttaaaaaaaaaataaaagccagactccctgttcttttccacacattcctcccccccaaccccctccactccttccaacttcccctcccaattccttttattttgcagctggacaacattaagggcctttaaaaccacaagggttgaccccacggcagtttgattaggtcccacttttttttctggagacaggcaaacagtaagtttacttttttagacattcacagtgatacatcatacacatattccaaagagaaaaaaatcaattatgaacttatattagtaaatttatttttcattcaaagcttataaatttttagacaagttgataataacttaatatttaattctatcatcaggagatgttctaaaaatatatatatacacacacacacactacaaaatcaatgtggaataagatttaagcatgtcactatggagttaagacactaacaaaacatagaactatgacccaccctgaaaaagctgttaacaagggatgtggcaaaaatgacttgatgctgacatgattttcactttcagcagttggggaaggggggaagaatattactcactattctttcttgttgttagtctcaaattattttttgttacagcaacaacctactcccacacagaaaaatgaaaaaattgttgcatttattttaaatctctattttttcagcccttaagggacctacaatctaatatactctaatggataatgtatacaaaaattatatttttcttcatttgttaatggttgttatgagaattagggtatagtagctgcatagctatatacacttttaaaaatatttaaaatttttttcctaactaggaaaaatcttgcttatcttatatcaatagagaaaaaaagtgaagaaggaggatgggtgagttacagggagccatgggagtggagtcaggaagaggaggaggcgggaggagaggacgcagagagagcacaaggagacatagtggcagcataaagatagaaacaaagataatggccataaggcaggatgctgagatccgtatggtcccagctgctgtcttgctacagctactacctctggttgtttctttgaaactctaatctagaaggtcaccagagcaggtaagaaagagtatgagtgtttgaggccaactatagtataaagaaaagatactcatattagaatcttccttatatttgattttgattttattggcacttaatatatgtatacatctgtacatatgccaaataaacacaaagaatatagaagagaatgttaaatggtttgaaagttagttttttgacttcaatatattctgcaaacattactgtagccattcaaaagacaaattatttcttgcacaatcatctatgctgaaggagttgaaatagacgaggaactagacagaaaatttgccaaataatgatcatcctaataatgataatttgaactaatggaactctaagatcataaggaattttgttcacataaattagctcatggatcttacagagtagaaaggggtaggtatgtatttccctaattttcccactgtttaacttgggcaaacagaatttaaagtcattcaactggttagtagcccatttgttgcttgaagccacttctatctatttcacttatgacaccataatgcagaataaactgatcctccagaatttatagttagatgaaaatcccaagatggtactcatactttaagtgacctgaaaggctttcaggtaattgttataaaaaataaaa

SEQ ID NO: 916898 - DNA, 4001 bp, Homo sapiens
aaaaaaaaatgaaattcccaccaggaggaaaaaagatgttaacagatttgagcatcagaataggaaagggaaaagtttagtttaaaaagagataattgaaaaaaaaatacaaataaagttcacagcaggaagcttgcctatatagagaaataggctacagcctgttaatatgtaactacctttttataagtacaatctgttaacaggcttacaaatcagcctcagagttgtatttgcaaaaagtataattagaattaaagaatattatcatttaagtgctactctgtgcattctagaaaacttaactgtgttaaattagcaaatcgctacattaggtaatgtacagtatgttccactatgaataacttcaacatctacctatgatataaggctatatttgcaaataaaagctcactaattaaagagttaatatatagaagtgaaaattttaattcaaaactgttaagaaagctcaaacattcgctggaattatctagtaaagatgcaatttaattattaaaaaaaaaaacacagaagaaatcaaagaaagatgacagcaccgaagtatatgtgttggctattttactttcttccctgatttgatactggcttttctaatatgtgaccacattcaagcgttactttatcctcaatactctttttctcttccattgcttcacttctagaatgttttaatctttgtcctttcttttttcgtcttttcatatcaaattcagtcgtttgagcgatgaacagcttgacttagcatatttttaaccagctggtctagcacctagcttgcattgcatagtcagatacaacaaatgtttatacagaaggtagctttcatgaaaatgaaaaaaagcctgggtatcatgcatcctggctttttttagcttttttttttttaattcaccatacagaatacaaagtttgaattctttttaatggcaaacaaaattctatttatagttcaaaaaaatgaacttatgctgggataagaactcaaatttaaaaattgcaatgtgtacttataggaacattaagagggctaaaattctttcaaagccctgctttacttgcaacaacatcaaataaaaggatgctgcagatatttctctaaataggaacaacttaattacaaatacactattcccatcatagcaaaaggggaaaatacagtaaattaaaattcagtcaagacagctaacacaaaaagtggccactaaaacttagaaagggaacagctccatttatccccttttcgcccctatttttgacacttagggagtaatctaatatagcgatgatgttaaattttctttggggggaaaaaacgctctcttatatcaacaaaaggtcatgtgctttactgagcagcttccaaagttttacggaaggatcaaataggaacttatagcctccgtttaaagcaccactaaaaccttctgtcaccctagaaattacatgagacagagatgctgaaaatggtaacattctgcacaaaagcgtttttaaaaggtggggagaaaacaatcaatgaaggaagaaagtaagagagtgaatgagaaagacagaagcagcgagttggggagagagagagagatgcttaaggttcatttaatttgctgttataggacgcaacctaaaaacattagcagaaatctcggagactttgcaaatcagttcagtttggtccgggcaatcacaacaaaaaatcagctaacaagattgcagaagccctagctaaaggcttctctaacaaacacgttttgggggagcatcttccaatgattcagagactactgtaaaatgggagagttgtacttcaatatattagggggaaaaaactgtactcacctttcaaactcctgaggtaaatcagggtcagtaagcatgctggaaaagcacaatttccctttgtcacagcagccacctatgatcgtctccaactgaacctgtcaagtgagtccaaaccttctaaaccaattgattttctctctgtctcttccccccctccctccctccctctctctctctctctctctccctctctctctctgtctctctctctctctctctctctctctttctccccccctccttcccctcctctctctcctaggactccttgaccagtctcttaaaggggtagtgcacttccagcagcggagtctggctgctcccccctccgcggagccacacgctccggctgcaaggctctagacaacctcagggtgcctgtcctttccttttaattctctcttctagacatcactgaatgtgagaagtcaactcatttaacacgtctcccatactctgtcttctaaatcataaaactcacacacacacatacacacgcagaacagtatgattttgtaaaacgtatttgctgctgattaaaaacctagtctatataataacagaagctcgattaaactgcatttattaactaattaagcaaaaaatttaatgttagtaatagcatttttacacaaagaattgttattccttctcacccttttctaggctctctccgttcacacacggaaatacacgcacacacacacacacacactcacacacacacaacaatcaggcattgttctgagggaagaaaagcaactttgacagattgaaatatagcagaggccccttcaaggaaacctgtaaacaacttgtcactcactctgtcggtctcactgttagctcgtgctttccgcaaagtggtgcgaacgtcctggcaacccgaccaaagtttcctcagctctaaactccataaaacacgatgtgcgatgtggaggggaataggtatccacatgccaaaataacatacacgagcgaacaaaaacccaaaacgaaatcaaaacataaaaacaaaaagacggtactaacaaactgtcctgtttgggatcgctggggaggtcaggagtaggaagcgcccccctggctgtggatctctttaatttcctctgcccaggcagccacagataacaaggtggacaaactatggctttacagattctaagctggctggcaaggcacagcctccatagcagttccaattatctagataaaaatctggcagccgagaaaggtaatcaggtaatgtacctttgacacgaaatgacagaggcacatacacacagagagagagacacttacacagacatgcatgcagagatggtggctgccccgtgcaccgcagcatctggtcagggagtaagcacacacttaccaacaggagatagtgtgcattcttcacacacgcatgcacacacacacacacacacacacacactcactcacgcacgctctccactcctactgggagggttcattctgcacaaaaggctacattacagagcccgccccaataagggaaagagaggaaaaaaaagccttccattgttgagagggcaggtcagttgattagattttctgtggagaattccacgaggaaattcccttcaaagccgaagtgattaactgggggctattctggaaatggagcagacaatggctcaatagtctgtacagccaatgtccaggctggcactgaactcacttaaaaaaaaaataaaagccagactccctgttcttttccacacattcctcccccccaaccccctccactccttccaacttcccctcccaattccttttattttgcagctggacaacattaagggcctttaaaaccacaagggttgaccccacggcagtttgattaggtcccacttttttttctggagacaggcaaacagtaagtttacttttttagacattcacagtgatacatcatacacatattccaaagagaaaaaaatcaattatgaacttatattagtaaatttatttttcattcaaagcttataaatttttagacaagttgataataacttaatatttaattctatcatcaggagatgttctaaaaatatatatatacacacacacacactacaaaatcaatgtggaataagatttaagcatgtcac

SEQ ID NO: 916899 - DNA, 4001 bp, Homo sapiens
ggcagaaagagctccaggaattctttgataggtatgcttttgctgtgttaatgctaccattagacttgatggccatttaaatgtaagtcttatttagctgagggtaatatgttctagcatctcatttggcttccttatttgccattttacacttttgcttaatgtatacctgcttcttttaaaagtagatgctagtagtgtggttggggacatgttcttcaatgtggtaattacatgtttctttacatttaatttgctggcccttaattaatttaaaggtattcaaagagtacccatcattttatttgctgtttaaaatgccccctgctcattttcccttagtatcttaatattttccttgttttccgactttgttgaattaatgcctcgatgctgtaaattatacacgcaagcacacacatatatttgaaaacaaataaagaatagtttggcttctgaaatatcaactatacttcacattcactttttaatttcaaaaattgccttgaattaatccaaatagtgccacaccattcctttttacattttccttccttctcttttaatctttattctcctttccctttaagatctctaatttagcttttgaatttttcattttagattaactctctatctaatcttactttttatttccaaaatgtcctataaatatactgtataaatacagtttccatatatttaccaagaagaatgtcatattggaagacctttaacccacaatatcacatgaaaacccactcatagaaattccacagagtaagcttttctaactattcttgaaaagaggaagaatgcgaggaatactcgtgtcaacaataatgtgtgatgagaacagttataacatgagccagtaggaaatgtatggtgtttccaattcaactttgtttaacctctggtccccagacaacttcaaattcctaataataatggttattttgtcctatagtgttcattacggctggatgattgctgttatcttttaaaatgattaacagttcttctaccaagaggctaaaaggaagcatagagcagtaagaattgatgttaataatcacaccagttcctctttttaacctctaaatgtaaatctccaaaagcttttaaaaatgctttagagaaattaaagagttgatcactccttgaacaagaaaatgtaatgtgtttttgacaccacctgataagtccttaaatttataattacaaagcatttgtcattgttgctttcctgttagttccactggaagatttgtatacaaacataagccaagaactacacaactgtttaatgatggaatagattaacaaaaaaagtaaaacaggagctcacagagcaatacgactttataaaacaaagaaatagaagtcatgctgatcaaattctactatcatctctatgttggaaatggtacttccacctgaacctaaatgtacaaaatgagcacatcagcatctctactggaatctacaaaaggaattactatcaaaaggaaagcacaacaacacatcatcatcaaagcaaatcagtggtagaaggtttgatccactggagtcatataaaagagaagtaaaaataccacatgaaggcacggatagcccattgacggggggaaaaaaccactgatgaaaatattaatgaaacactgatgaacctgaaacaaaacaaaatgaaatactttgaaggactcccagagggctccaaaattcctttttaaaaatatatctatggctctctgagagatttatgttttctcagatctttgaaaagtttggtctggttatacgcagataggccatctttagataacaacctggcagagtgggagaaatcatagaaagcatcattatgcataagtcatttattacgagctccaattaattacatcaaagagtcattcccagtgctcacatacatgcatgcacagctcctatggcacaaatctccaacagtctggtgaacccactataactgactgtttaatgagtaatgacagttacgacagttaactgatataaaccatgcattggtttatatttgggagatgagtgaaggccaaattgtctaaggcacagaaccttggagaaggacaggtgtgagtgtgtgtgtgtgtgtgtatgtgtgtgtgtttaatggattaaacattagaatgagacactaagcaagaaaaggctagggaagcctaaggcagcaccctagtgttactgagtgtagcattcatatcactgtatttcattttattgtgttgttttcttgaacatctcgtggctaaataatcaaatttcaaacagtttaagacaattttcatttttaaagtgatctgagtactctctttacacccacatataccttgaatagaaaaaaatttactagatactattaactactaaatgttaatggatagtggagattaatcaataactaactcgataaattctaagtttttcctattgtttttaatatagcatttcaaaggttatttacgtttacgtacaatgcacatacacatcgagcaaatgtgattttgacttgtgaataacagaataggaacatatgcactaccaaaatgtatccctccatatttaaatctcttgtaatgaattctcctcaccacttgaatttcagttcttctcagtcttcagaactttgctcccttgctttcctcttaagagttgaaagtttgatgtccctgggactcactgctttctactcagagatgtctgctaacaaagccattgtcaggaactatttagccacaggcttcctcctattaacgtaacttgagacttgactaggtcagtacatccaaactacaacttttttcattccattcattacagatagaggaaagggggcagtcattgaagacaaaggtaaaaagtccaaaaataagtaaaaataaaatttaaatgcaaaactcacttctcgtactccacttgctttaacctagactgagttccactgttcaggttaagagcagtacagtaatagtgatataggagttagtaagaaattatttaggcagttagtgaggttaaaggagttctcagtggaatttttctttaataaaaagcagcccctaaaacatttctaacaaaaagcaccctgagaaatcaagctgcaaacatagataagcaagctagaagtttgcataggtaaatgccggcagctatgtcagaagccaggtacattcaacatggaggatatctcctctcttctctttgtcgcccccgtgtgtgggtgtcatggcaacggccaggtaaaccccatttgcataataaaagattcacgggctatgtaaatggcacacctgacacctggtcaatccaatctcctgggccctatgtgaatcaaatacggcctccttaagcccctctataaaatggaccacatctctccccaaacccagaaatccgcttgaacatccccttcctctgcatgaggaagcgcgctctctctctccctcctttcttttgcctattaaactttacgctcttaaacccactccgtgtgtatgtgtctgcatttttgttccccttagcacaagatcacgaacctcgagtaagacaacaaggccacttaattagcaattttcctttatgaacacaaaattagaacagttgtgccatctacccctgtctcttgtttttcccccaagtggtaggttaattctttaatttgttccacaaacactattcccaagagagtggtaggtcatgagacagaagaaatctatacactagaagagaaaacattttaaggcaatgtaagtgactaggaaacttcgatagtgaaataaatatcattatgattaatctaaaacaatgtcatgaaggaagagttttacggggaaaaaaaaattcttgcatttcatttcgttcggattatttagattgaattatttgtcactaaagtgattgattcttggatttgaattctggatattaggtgtttaaattttataacttttcataaagttatc

SEQ ID NO: 916900 - DNA, 4001 bp, Homo sapiens
ccctgggagttgttgctgttctcattgggtgactcaattctgctgcaagttgctgccagcagagccaaaggggatggctgggactcctggccgaaaataagggagaggaaaggagttagtgacacccagctgccagcctagggggcagtatacaacaaataaacagcaacgtagtgcagacaaggagcaaaaaacagaaacaaaaagctgacctatctgtattgctgaaactcctttgtctttggggatctccattctcttacttccttatctataaaatggtttagtctctccctaaaacgctttctgtgaagagtaaggcaattatctaagaatatttacatcttctcaacaccttccccactctatgattatcacttacctgccctcctcctccagtgctgctgctactgcctgtgctgctacttcgagcctgtgaaaaggcaccaccaccattaccattgcccccattattgccaccaactcctttttcaattttcaccacagctgtcatttcatccatggagtgatcttggtctaaaataattaaaaaacaaacaacgtaaacttgagggaagaaaagaaatgaagtaggaaggataaaaggaggctatgatgaaatagcaatgactaacaggaaggcgaaagccaccagtataaagaaaatggattggagggcagaggggagctgcagggcatgcaggacatgaactaggttcaatgtgccaaaagtgggccttaattctcccttgtacaaaattaaactaagaaaacattcaaaaagtgctttggggataggaaatgtgaaggacggtaggcatggtgagagtttctaaataagaaaaagtatcctaagggaaaaaaaggaaaaggacaggtaaggcataaaacaacatgtgggtgcatggaaagcttgctaaaattaagtttaaaagagatggagaggccaggcgcggtggtcacgcctgtaatcccattactttgggaggcggaggcaggcagatcacctggggtcgggagttttgagaccagcctgaccaacatggagaaaccctgtctctactaaaaatacaaaattagccgggtgtggtggcgcatgcctgtaattccagctactcccggaggctgaggcaggagaatcgcctgaatccgggaggcagaggttgcagtgagccgagatcgcaccattgcattccagtctgggtaacaagagcgaaaactccgtctcaaaaaaaaaaaaaaaaaaaaagacaaacaaaaatccaagtgtgaaaagtaacgagaggggaaaaagaagtaaaaagtgtgagtagaaaaacatttgtgaatactgctaaggaactaaagggatctacaggttagtagtcagaaggtttcggggcggagggcgggccctgagggaaagggcggtttcggggtgaggggcgtggaaagggcgggacggtggggggcgggggggaagggaaatctacggaaagtggggggaggagggccttggagcaggcggcgaccagagggcggaccaggcaggcggttggcccgggcggggccttcgctgctcgggccgcccccgcggctccagcccccggcgggaggagcctcaggcgggcggccgagtagtggggggtaaggcccgtcccccgtggccggggcgggcagggggcgggcgaggccacgctgccccctcccccggggcgggcggcccatccccctcctcctcggaggccccgccactgccccgtctccctcccttccctccgccccgggcgggacctaggccgccgccgccgccgcctcccgcccgcccccgcttcacggcggggatcgcccggtcggccctcgcgcgcgccccctcactcgcctcccacccctaagcttggagtggactcatccttaccgctcatggtggcagctgagggacaagctcaagggggtcctgtccgggggggttggggggggccgggaaaaacgcggacgctgacgaggcaagcgaacccggaccggacagggaggggggggtaaggaggagggagcagcgcgccacaagcccaacctaggccccgccccttctctgctgccccgcccaatgagggagggggaaaggagggacttgcagaagaaagacggtggaattatccaatggcaagactcgcttgctctccaaggcgtgtgagactaagttgcgtgcctggtgtccgcctaaaaagaccgccctctcagtgttaaaagccaatgaaggatgcaggaagtgaagatgggcgggagctggagatgattggcttggaaggaaaccagtcaaccggcaggcgggctccctgagacgtagggataggcaaagctttgataggaatgacagaacaacggccaaccagaatccgggatatgcttgggcaaaatcctagtgggcggagaggtaagaagtaggcaggaataggagaggatgaagctgattaaaaccaatcagaaatcaggcgggcagccaggaacgttatgattggagttagactgaaaagagacaggaaaggacgcatattgacgtgaactaaaagccaattaaacgccgaattaactgagggcggaaacttggagtggcagaggagaattggcggctccctcagttattcaatccaatgaggggacgaagtaggcctggcaccgcctcctagttagccaatgggcgttactggagctgcccatcatgagggagggaagagggctatgccaagaggagaccgtcgccatattggccctcctcaggggacgttgttacagtcattaggtgggacgctttagcggagtcctgcagctcaacaggtgtcagagccaaggcattcggcgcgcagttccgcatcaacactaggacttgtttgcgtcttcatttaactgcccctataaagtacctctcaaatcttacccccctcccgggtggtcggacaggcgggcagatgcctcaatgtcgctgcaagccctgggaatgcaggcgggacgagatctggtgacagcactcaccgaataagttaatactgagctgaccaatatgcagagtctccgtgagactccagaaaacgcgattttattaagttcccccagacaaaggcgctaaccacttaaacgactggttaacttttcaagccttgaggctaaagtgcggataagtcacttccattttttcccccttaatagtaaataccgcctatgcataaagcaagatagctgagctccagctttttgcaatcacgaaggttaagaaactttactgcaggcacctggatttctggcctcctctttatccgtgttttggtggagccggccttaatagcttgtcaatgacacgatgaggtcatgtccttcagtatttgtatcttatatgttgtcacctgcttatatgttcttatgttttaaaatgtgaattctcctaaactattttaagccctttgaaggtaagaactgaggcctctgctgctttaaacaggtaaaaaggtgaagtgattgctgactgcctaccgtgttaggtgcctaagtcagggaggcagttagtattccatgtcatccttaaaaggaagattttattaagtatcagctatattatgtattttataagtgaagacatttaggctgagaagtgacttacccaaggtcacaaagcaaatgagttgtagtgttagattccaacccagaatagttccaccaaaagttttctataaattcttgagggaattaaactgccgccgggcgcaatggctcagacctgtaatcccagcactatgggaggccgaggcgggcggatcgcttgagcccaggagttaaagaccagcctgggcaacatggtgaaaccccgtctccacaaaaaataacaaaaattagccagacgtggtgatgtgcgccagtagtcccagctactcgggaggctggggtggaagaatcgcttgaacccaggaggttgaggctgcagtgagctcaaatcctgccactgcactccagccaggacaacaaagcaagac

SEQ ID NO: 916901 - DNA, 4001 bp, Homo sapiens
ggagtaggtttggcatagcagcaatgatgttgcctccacttcctcgatttgtgataatctgttggtttgcacctggtatgatctgtatttgaccagaaccatcctgctgcacttgggccccagtggcagcaaactgcagctgttgcccatcaacggtctggaactgtgggattacttgatactgaatattaggcatcactccaggtagtcctgtcagaacttgctggttctgtaagttgggagcggcagccacaacatactgcccaccagagactgtgcgattcttggaagactcactgccattgctgccattggtactgctgccactctgttcctttgaggtaggggtagccccagaggaggaagagatgatctgccagccattggcaccctgtgaaagttgtgtggctgtgaggtcaagctcacctgttccccctgactgactcgggccctgggagttgttgctgttctcattgggtgactcaattctgctgcaagttgctgccagcagagccaaaggggatggctgggactcctggccgaaaataagggagaggaaaggagttagtgacacccagctgccagcctagggggcagtatacaacaaataaacagcaacgtagtgcagacaaggagcaaaaaacagaaacaaaaagctgacctatctgtattgctgaaactcctttgtctttggggatctccattctcttacttccttatctataaaatggtttagtctctccctaaaacgctttctgtgaagagtaaggcaattatctaagaatatttacatcttctcaacaccttccccactctatgattatcacttacctgccctcctcctccagtgctgctgctactgcctgtgctgctacttcgagcctgtgaaaaggcaccaccaccattaccattgcccccattattgccaccaactcctttttcaattttcaccacagctgtcatttcatccatggagtgatcttggtctaaaataattaaaaaacaaacaacgtaaacttgagggaagaaaagaaatgaagtaggaaggataaaaggaggctatgatgaaatagcaatgactaacaggaaggcgaaagccaccagtataaagaaaatggattggagggcagaggggagctgcagggcatgcaggacatgaactaggttcaatgtgccaaaagtgggccttaattctcccttgtacaaaattaaactaagaaaacattcaaaaagtgctttggggataggaaatgtgaaggacggtaggcatggtgagagtttctaaataagaaaaagtatcctaagggaaaaaaaggaaaaggacaggtaaggcataaaacaacatgtgggtgcatggaaagcttgctaaaattaagtttaaaagagatggagaggccaggcgcggtggtcacgcctgtaatcccattactttgggaggcggaggcaggcagatcacctggggtcgggagttttgagaccagcctgaccaacatggagaaaccctgtctctactaaaaatacaaaattagccgggtgtggtggcgcatgcctgtaattccagctactcccggaggctgaggcaggagaatcgcctgaatccgggaggcagaggttgcagtgagccgagatcgcaccattgcattccagtctgggtaacaagagcgaaaactccgtctcaaaaaaaaaaaaaaaaaaaaagacaaacaaaaatccaagtgtgaaaagtaacgagaggggaaaaagaagtaaaaagtgtgagtagaaaaacatttgtgaatactgctaaggaactaaagggatctacaggttagtagtcagaaggtttcggggcggagggcgggccctgagggaaagggcggtttcggggtgaggggcgtggaaagggcgggacggtggggggcgggggggaagggaaatctacggaaagtggggggaggagggccttggagcaggcggcgaccagagggcggaccaggcaggcggttggcccgggcggggccttcgctgctcgggccgcccccgcggctccagcccccggcgggaggagcctcaggcgggcggccgagtagtggggggtaaggcccgtcccccgtggccggggcgggcagggggcgggcgaggccacgctgccccctcccccggggcgggcggcccatccccctcctcctcggaggccccgccactgccccgtctccctcccttccctccgccccgggcgggacctaggccgccgccgccgccgcctcccgcccgcccccgcttcacggcggggatcgcccggtcggccctcgcgcgcgccccctcactcgcctcccacccctaagcttggagtggactcatccttaccgctcatggtggcagctgagggacaagctcaagggggtcctgtccgggggggttggggggggccgggaaaaacgcggacgctgacgaggcaagcgaacccggaccggacagggaggggggggtaaggaggagggagcagcgcgccacaagcccaacctaggccccgccccttctctgctgccccgcccaatgagggagggggaaaggagggacttgcagaagaaagacggtggaattatccaatggcaagactcgcttgctctccaaggcgtgtgagactaagttgcgtgcctggtgtccgcctaaaaagaccgccctctcagtgttaaaagccaatgaaggatgcaggaagtgaagatgggcgggagctggagatgattggcttggaaggaaaccagtcaaccggcaggcgggctccctgagacgtagggataggcaaagctttgataggaatgacagaacaacggccaaccagaatccgggatatgcttgggcaaaatcctagtgggcggagaggtaagaagtaggcaggaataggagaggatgaagctgattaaaaccaatcagaaatcaggcgggcagccaggaacgttatgattggagttagactgaaaagagacaggaaaggacgcatattgacgtgaactaaaagccaattaaacgccgaattaactgagggcggaaacttggagtggcagaggagaattggcggctccctcagttattcaatccaatgaggggacgaagtaggcctggcaccgcctcctagttagccaatgggcgttactggagctgcccatcatgagggagggaagagggctatgccaagaggagaccgtcgccatattggccctcctcaggggacgttgttacagtcattaggtgggacgctttagcggagtcctgcagctcaacaggtgtcagagccaaggcattcggcgcgcagttccgcatcaacactaggacttgtttgcgtcttcatttaactgcccctataaagtacctctcaaatcttacccccctcccgggtggtcggacaggcgggcagatgcctcaatgtcgctgcaagccctgggaatgcaggcgggacgagatctggtgacagcactcaccgaataagttaatactgagctgaccaatatgcagagtctccgtgagactccagaaaacgcgattttattaagttcccccagacaaaggcgctaaccacttaaacgactggttaacttttcaagccttgaggctaaagtgcggataagtcacttccattttttcccccttaatagtaaataccgcctatgcataaagcaagatagctgagctccagctttttgcaatcacgaaggttaagaaactttactgcaggcacctggatttctggcctcctctttatccgtgttttggtggagccggccttaatagcttgtcaatgacacgatgaggtcatgtccttcagtatttgtatcttatatgttgtcacctgcttatatgttcttatgttttaaaatgtgaattctcctaaactattttaagccctttgaaggtaagaactgaggcctctgctgctttaaacaggtaaaaaggtgaagtgattgctgactgcctaccgtgttaggtgcctaagtcagggaggcagttagtattccatgtcatcc

SEQ ID NO: 916902 - DNA, 4001 bp, Homo sapiens
cctgtggcaccctcgactgcaccctaacgattacactcaggccaatgaacacaggtgttaaaagactcctgccccatctcacaaacacacacctctcccacaggttgagtgagttggcttcctgtttggcccagcacccctgggcctgagctagggcactgggaagagagatgtgggacccaagaatagggaagagtcaaggctactgaaggggactgactttcagggagggccctctggccctaaattcctgcagagagacccagaaagcaggacagagatggtgacagaggaacagtgtcagagacccagaagcagggaggaatctggccctgagtggctgtgagccctgccttcccaactctgtgccttgggtcccccagaagccagagtagagtcagaaatttctcaagaccccaaaccctgaccccagtggtaccccaattccctttgtccccagcaccagaggcaagggatgctggggtcccagcccggaggggaagtggcccagtccgccctggagcctcccactcccaaaatagagctgagtttgtctttggctgaaagctaaatatttgtaagccgggcaagcggcctcagaccccgtccctcctccttggttccctcacaggcctgggctcagttcccctggtcagctcccccacaggcacaggctggcctcctcctttctctcatagcctacctcctctcctccacacaccagctcacgggcccagccccctccccacaaaaccaggcaagatcctgtctgggctacgagtcccaggagacgggacccctaaagagctatacccagttgctgctctgtgcccactcagccagtcctctctgccttctatctcttctgccagcttatgtatttcccacccctctctcctcactccccctcgcccccctccccctcctttctccatcgcttttccactcctcacagtcagtgtgcttagctgaccttaggtaggggtccatgccttcttctgacctaatcccctctcaccctctttccactgccctctgacccctggccctattcttccctcccttttctcctgccctctgcttcccctttcttggaccccactcctctctcctcatcagaaggacccctggaattgacaagcaccacagctactatctatgtgagttggaggaggtgggtgggcaaggactaggaccattaaggttgtggctggtttcctggggggaagaggggacagttacctcaagcagggaggacgccatcctgaggctggggaacgggtcccaaggagccaggcagatggagagagctgagccggggggtggggggggtagagagagaaaagggagagggagggagaatgggagaatgggagagaagagatctaaagttagaagggaccggggtggggggctgctctctgtctgtagggatccaccctctaattacagctttcccagcggagaaggctccagatccaatgaggagggcgagagagggaggcagagggtccaaatttcctgctccatttgctgagctccccaaagaagggatcagggagggagaggagaaaaaggggcgcccatggaaggggtgggaagcaggaagaggggagagcagcatgggcaagttgtcagggcttcctcggggggctgctgaggggagaggttaaagggatggtggaccccggtgtcctacacgcggcagcagtcccataggcatctgtgggcacccctcccagagctccccagtgtcatgtacctgggggaacctggggctggctgtcccgagtctctcctctctggaggtctggcagggagagtgcaggcaacgggtggcctgagggtgctgggagggatccgctctctcccaggccagctccactcctgttccactcaggctccggtcctacagtcctactctgactccagagtccttgctgctgctcggcggctgctgcttctgctactgctgctgcctaggctgctgccgcccgccgctgctgagggaaggaacaggagggaaaaggaacaaaccccaaaccactaattagagatccaggggggggatggggggttggggacgacactcacacagagagactggaacgcactgacatacacactcatggccaaacacaggggtgatgcatgcacacgtacacacagtaccactcacatgggtacagccactatcatgaatgaacacagacggacacacacaaatgcacacagtgacgcactggaggcacacgcaccacacccgccccagctgaccatggagaggcttgcttccccagtcacccacctgcctctagatcaggagagcagtgtgtatgtgcccctgtgtgtgtgtacgtgcccgtgtgtgtgtgtgtgtgtgtatgttgtgggaagaggcatggaaggttctgaggtggaggtttctgctgcctaaacttttagtgtcactgaggttggttccagagcaaggcctggaggaagggttgaagagttggggaaggcttggtattggcttgggggtccctcagtcttcctcccagtgcctcagtttcactgtttggaggtgatacctaggcctacctcactttgtggggcagaacctggatcttctgatgaagagaaaatttaagacaagcaggagtgagggtggcggtagaaggtcattgggtcaactcattcatgccgacacctaacctctttggattatttcccccaaaaagaaatgccctaacctccatattccttgtcagttaccatccctgggtaaccaagttaccatctcttagagaccatgggtttaatctccatcctttggtggacagttctccagagtgatctgactttcctgggaactcctggttccctttctcattgccatgcatcaattccctcttccacagaaagaactgaagttagaacttaataaggacttcccaacaaaataggaagtaagagaaggaagggcagccaggttaggagggaaacccaaaaagtctattacctgaaacctgggccatgggccctgaggtatttatgggagagaggactgggcagctaagtggtgacaccggcagctctcccacaggggggcttagcccgctggggttgttttacaggttattccttaacacacacttctccccctcccagctctccctgtcaggggaataaagccccatcctttccactctcctcactctgcaacaccatcccctcactttctcggagtgcccaattccttgctccttttgctctcccagatctccaaagaaaaagctgggaggtggcaggagcagatggaggtccacggagggttgcacagcagtttcgccagcaggtaggcaccaatttcagggtagggcccaggagttctggattctagccccatgatttgatttacctcaaggaactctgggaacccaaggtttaggggaagggtttgggaaccaggtggctgatagacaaagagaaagcagcaaaagaagaaacagagcaaatgaaagagtccaagacaatcagaagagatatcaccaggtataagagagaggaaacaggaaaacagaagaccagatgtgtggctttaaacaacaacaacaacaacaacaaaaaacagagcaggaaagaaactaaaaagataaagaaacaggcccagaggaacaaagatggggagacaatggcttgggaaggacagagaaaatagcctgaggcatagccaggtccggaggaggaggaggaggaggaggaggaggagggttgtgttgccaggcaggtgggggggcggggaaggagtataaatagcacataattgtgtccgctgattacacgggccaccccacccgtctgcctgagaggaagtgcccgtggtggggtgtccctgtgacctcgcggtctcccccttgttgggggggagtctgagactgaggtgccagatggctttccggggccccgaactcagaagttgagaaagagaagctttagagaaattcctgtatcaccag

SEQ ID NO: 916903 - DNA, 4001 bp, Homo sapiens
gacacagagagactccgtctcaaaaaataaataaataaataaataataaataataaaaataaaataaaataaaaaataagtactggatgttataggagacaaaagagtaaatctaagccagtgttgggggggaattaaggaaggcttcctggaagacagcatgactaagtaaagaaactgaaggacaaataagagttatcaagtaaaaaaaggaagagtggtgccagtgcagtggctcatgcctgtaatcccagcactttgggaggctgaggtgggtggatcacttgagtctaggagtttgagaccagcctgggcaacatgacgaaaccccatctctacaaaaaatacaaaaaaaaaaaaacatagtctgggtgacagaatgagaccttgtctaaaagaaaaaaaaaaggaagagtgttgtaggaagggggaagagtatatgcaaaggctcagaggtatgagggattaacaacttttgagatgctgaaaattgagtgtgagtgcaacacagagtggaggctgatggagaagttctaatcagctatgcaaggggcctagacttgatccaaaggcaatatatgagaatactcgtatattagagaaatgactgacttcagagaggagaatgaaataagggcttagagccaggcggttctgggtaaatcaggcatttacaatggtgcaagcttgggtgagctatttaacctttgaggcctaagattcctctcctgttgaaaggggcaacttaatatggtaacctcccagggttgttacaaggattagcaataaaaagtgttgagttcttagcacagtgtctggcacttagtagttgctccataaatggtgcctagcagtattgtcacagttgggagaagggcaaaatcggaggcaaggaaacaatctgttgcagcagtccaagcaagatgtgggaaggtgtggcctgcagtagcagagaggatgagcagaagtcagtggagggggccagcacggtggcacataccagcactttgaaaggccaaggcgggcagatcacttgagcccaggagtttgagaccagcctggccaacatggtgaaaccccttctctactaaaaatacaaaaattggctgtgccaatttttggcacatgcctgtaatcccagctacttgggaggctgagacatgagaatctcttgagcctgggaggcggaggttgcagtgagctgagattgtgccactgctctgcagcctgggcgacagagccagactctgtctcaagaaaaaaaaaaataaaaaaataagtcaatgaaggggtgatattgaggatgtgaggtggagaggatttggtgtccaatcagatgtgaggggtgagtagtcacacatgacttcccttgatctgtgtgttgatgtgtgcacttgcacacaggatatgcaggcattttagaggtatctattcagttctgagaatggctcttgacagttgctggatccggccaacagtgaagggccagggcagtatctgaggacctggccctcagtctcccagaagaacccccgcctctgccctctgccccaatccctcctgaactatttcctttcccccttttcacccatttctccctctccccaccttccatcacctcccctacataggaacccgctgtaagttataagcctacctaggcccactttccaccgcctcagttaatgaaggtccttgggactcagctaccaacattaacacctcctccccacatagcctcaatgggacgcccccctctggatttcaaagcgctgttcaatgcccccatccacccccacctcgcgtggacgtgtgaggcaagaaggacggttgaagctgaggcaggatttggggggtcttagcccccagccacagctgtgggggagataggcaccctcagaaggacaggacaggtcgtgagctccggggctgctgggaggtctcttgcggcctaggccaggctcagggccgccggggatctcgcctccatcccgtgcctcagtgtcccggcgcggccgaggggcgggcggcagggggcggggcgcgggcggggccggccgggccaggcgcccgggcaggaggcagctgcatatctgcggtcccgaccacaattgctgggagtcgcgtcccggagactggcggcgctgactctgcccgctgcggccgccgcgccgattagagcccgagagggagcgccagcccgggggagggggcggcggcgggggaactccggatgccccttcgcctccgcccagccagcgccccccgctgcccggcccagtcctttctcagccgcccgaacccaggaccggagtcctgcctcttccgccgtagctttctcgaggctgcatccaagcttcttcctccggatcttgcagtgcccgaggtcccgacggtgccaacatcccgttggcccccagcctgccagtctctcatgccctttctcttccccatcaccccacacagagaggagtagggatctcagagctcccccattctcttatcctccgctccccaatgcactctctaagcaaaagccgttccaagcgaagaagagaatcagagactcagaggacgggctttccagggccggagcaccccctgctggctggcccgaagcccctccccctccccctccagctgtgacctccagctgtggtggctgggaagagctggcccctttgatctaggagcgtggcaaccccctccaggcgccccattaacctccattatcccaattaggcagccctcccagtcctggatccaagcttcaaagccccctcagttgggagaaaagggagctgaatcgtatgccccctacctccccaccaagccacaccactttcagacaagacccaggtgctctggtctccagcttgtgtacatgatagcagggccagaagagggaccctcaggggccaccctcgtcccaatactgaaacttcattaaaaagagaagcagataggcaaggggaccctcttttgctggcccattttcctgcattcagtgatttcagtggcagcatccaggttcctggctgacctgagcttcccatcaacttatccagctttatcctgtggaaaggggagccaagaaccaacccactcctcccttaatcctatctcaacactcccttcctccctccctcctggaacaatttccgctgggggagccagagcagggcccagcacagtggccgcttcctggaacattttcctgtatccgaaaccgcggctccctccctagggaccggctgatcaaggccagatgggagaagggatgggggaggaggagagggagccaggctctcaccatcaccccctcccaacacataggcacaccacaggagcccctgccctgacacacagaggctgacacaggcacacaccacatgtcatagtcacaccatgggcattcatggggacacatgaaccacagaggccaggtcttagaagaagttaacacacccgtagatgatcaccctctctctctacctggccctctaaaggaccctaaggcctttcttgccagataaggagaccttaggaatccaagaacattggcacaggatagcagaaggacctcaattaacagaggagacagacagagacatctaatgtgccctgccagacaacacccaccaaccatcccattccaattctagatggcactcaggcctgcctaacccatcatctctccaggatcctgggaactggggtagaggaaggctgtgggagcttcttctcaagtgctaccttcagagcactttctagttgcttccagattcttggagaagatgcatatgatgtctagtgggctcgctcatggcagccaagggacaaagaaaggggaagaatgtgtgcagctgcagggagctctgggagcctagaggaggaaggagaacaccagagtaactcctggagacagagagtaaccctggggattttgtggccttactggtgacatactgccccagcactgctcctcctgatctcttcta

SEQ ID NO: 916904 - DNA, 4001 bp, Homo sapiens
tacaaggtggagggcttcctggggaggtggggaggaagttgagggcccaggtactcaaaaactaggtgcaagtggtcgagggacaggagggactggtgtgccttcgtgttgcaggcatctccagctcacaggagtgaggggacatgaaagtctagcttccacaacactctcctttcgccatgcactatcccaatcccatgtctttccagcaggcctctgggccagtccctcccaagccaccagcgccacgttggcaacactggcatgatgcccacgcccactgacactgtccctgccctgggtggacccaggatttccatgcatcttattcctcaagaccacagtgtttcaatgatggctcaaaatagagtctgttggggaggtggcaggatgacagtctgctcccattgcagctacgggtagacccctggctggatacagagtgtgacaagggacgtggtgtccatctggttggcttgcatgctattcccccaaactcagccacaaattcactatctcacagccttgtgcacacaccatttatcacttggactcacagcactcagatggcccaacttacacacacacacacacacacacacacacacacacacacacacactctcagggcctgtggcaccctcgactgcaccctaacgattacactcaggccaatgaacacaggtgttaaaagactcctgccccatctcacaaacacacacctctcccacaggttgagtgagttggcttcctgtttggcccagcacccctgggcctgagctagggcactgggaagagagatgtgggacccaagaatagggaagagtcaaggctactgaaggggactgactttcagggagggccctctggccctaaattcctgcagagagacccagaaagcaggacagagatggtgacagaggaacagtgtcagagacccagaagcagggaggaatctggccctgagtggctgtgagccctgccttcccaactctgtgccttgggtcccccagaagccagagtagagtcagaaatttctcaagaccccaaaccctgaccccagtggtaccccaattccctttgtccccagcaccagaggcaagggatgctggggtcccagcccggaggggaagtggcccagtccgccctggagcctcccactcccaaaatagagctgagtttgtctttggctgaaagctaaatatttgtaagccgggcaagcggcctcagaccccgtccctcctccttggttccctcacaggcctgggctcagttcccctggtcagctcccccacaggcacaggctggcctcctcctttctctcatagcctacctcctctcctccacacaccagctcacgggcccagccccctccccacaaaaccaggcaagatcctgtctgggctacgagtcccaggagacgggacccctaaagagctatacccagttgctgctctgtgcccactcagccagtcctctctgccttctatctcttctgccagcttatgtatttcccacccctctctcctcactccccctcgcccccctccccctcctttctccatcgcttttccactcctcacagtcagtgtgcttagctgaccttaggtaggggtccatgccttcttctgacctaatcccctctcaccctctttccactgccctctgacccctggccctattcttccctcccttttctcctgccctctgcttcccctttcttggaccccactcctctctcctcatcagaaggacccctggaattgacaagcaccacagctactatctatgtgagttggaggaggtgggtgggcaaggactaggaccattaaggttgtggctggtttcctggggggaagaggggacagttacctcaagcagggaggacgccatcctgaggctggggaacgggtcccaaggagccaggcagatggagagagctgagccggggggtggggggggtagagagagaaaagggagagggagggagaatgggagaatgggagagaagagatctaaagttagaagggaccggggtggggggctgctctctgtctgtagggatccaccctctaattacagctttcccagcggagaaggctccagatccaatgaggagggcgagagagggaggcagagggtccaaatttcctgctccatttgctgagctccccaaagaagggatcagggagggagaggagaaaaaggggcgcccatggaaggggtgggaagcaggaagaggggagagcagcatgggcaagttgtcagggcttcctcggggggctgctgaggggagaggttaaagggatggtggaccccggtgtcctacacgcggcagcagtcccataggcatctgtgggcacccctcccagagctccccagtgtcatgtacctgggggaacctggggctggctgtcccgagtctctcctctctggaggtctggcagggagagtgcaggcaacgggtggcctgagggtgctgggagggatccgctctctcccaggccagctccactcctgttccactcaggctccggtcctacagtcctactctgactccagagtccttgctgctgctcggcggctgctgcttctgctactgctgctgcctaggctgctgccgcccgccgctgctgagggaaggaacaggagggaaaaggaacaaaccccaaaccactaattagagatccaggggggggatggggggttggggacgacactcacacagagagactggaacgcactgacatacacactcatggccaaacacaggggtgatgcatgcacacgtacacacagtaccactcacatgggtacagccactatcatgaatgaacacagacggacacacacaaatgcacacagtgacgcactggaggcacacgcaccacacccgccccagctgaccatggagaggcttgcttccccagtcacccacctgcctctagatcaggagagcagtgtgtatgtgcccctgtgtgtgtgtacgtgcccgtgtgtgtgtgtgtgtgtgtatgttgtgggaagaggcatggaaggttctgaggtggaggtttctgctgcctaaacttttagtgtcactgaggttggttccagagcaaggcctggaggaagggttgaagagttggggaaggcttggtattggcttgggggtccctcagtcttcctcccagtgcctcagtttcactgtttggaggtgatacctaggcctacctcactttgtggggcagaacctggatcttctgatgaagagaaaatttaagacaagcaggagtgagggtggcggtagaaggtcattgggtcaactcattcatgccgacacctaacctctttggattatttcccccaaaaagaaatgccctaacctccatattccttgtcagttaccatccctgggtaaccaagttaccatctcttagagaccatgggtttaatctccatcctttggtggacagttctccagagtgatctgactttcctgggaactcctggttccctttctcattgccatgcatcaattccctcttccacagaaagaactgaagttagaacttaataaggacttcccaacaaaataggaagtaagagaaggaagggcagccaggttaggagggaaacccaaaaagtctattacctgaaacctgggccatgggccctgaggtatttatgggagagaggactgggcagctaagtggtgacaccggcagctctcccacaggggggcttagcccgctggggttgttttacaggttattccttaacacacacttctccccctcccagctctccctgtcaggggaataaagccccatcctttccactctcctcactctgcaacaccatcccctcactttctcggagtgcccaattccttgctccttttgctctcccagatctccaaagaaaaagctgggaggtggcaggagcagatggaggtccacggagggttgcacagcagtttcgccagcaggtaggcaccaatttcagggtagggcccagga

SEQ ID NO: 916905 - DNA, 4001 bp, Homo sapiens
ccatccaagacctagctgagaaatacaaactgattaatgtccataaatcttagatgagtcagcaaaacttaatgcccaacaaataaaaggcttaacatggactacttaggagcacacaatggtcattacaatttcaaaatcggcaattttctatctagtacaatcacaaatttggtctggaaatccaaatattaaggaaatgcaaacatcataatcaatattcccaaatcaccttaattgaaactggaaggtatgaggcagcctatttgaagttaacatcaagaaataatttaaggcagaaccccaactctctcccacaaacacaaaaccagtagcagatggcacaagaacatttctcagtgagaaattgcaattctaacaaagtacaggtaacttaattttatccatcaccttttggtcaaactgaaaacaaacaaccaagcttttggttctctccaaaacactgaaatctgcattatcactgacctaacttaaagcaagatatttttggtgatctgtcctctcctgcttcattaaccgtaggtaaattaggaacagtagcctgctaaacagaggggaagtaaatatcacaggcatgttttatcaataaaatggacaagcgataatcaaattatttaaagaacggcttgtactccttaacagagggacaagcttgagaaagatccactttctaaaagaacctaatcattctggatgaattatgagaaaaatatcactgtagtccaaaactgactgaatctacctttctgctttaatccaagtcctaaccacatctattttatgtctctgcgtctgttcgcctgattttccatttcgtctcccccttcaattccaagaacgcccttctctcccttattttcaaatctcattattgcccccgaatgctaaggacctcgcacagccacggaggtgaccttacgcatccctactgcattcctaattcattgtacttctcatcccaaatgatcctattctttcgttctatctcgctcgttgtttcttaaaatccaataccccacacacgctcacgccagagtcccccccacactccattgtttccccggcctatccgtctggaaactccccaactccgacgcgggtgtttcacccgccccacagaccccaggaaccttccaccctctgggcacttcgggcctctaagggctcacatccccctccttcccgtccccccgcccccaactaccccctccctctttttcctccctcaacccgctccccgcacctcggcgccctctgagcccccgccaaccccgccacccagcacccttagcctcacctagcccaggcccccgcaatcgcctcgtcgccccagctccgggctccgcgtcccggacgctcccgggtctgagaagaggaaaggagatcctccacctccccttctagagccaccgccgccgtcgccgccgcgctcctcccccagctctctcagagccggacgccgccccgcccccaccgccgcctccccacttctctcctgggccggactgcaggatgctgccggagatccagcagatcaccccgaccctcgcccaggcagcggctcgccccgccccggagccctctcgggcgcgtgcgcgccagccagccagccagagctcagggcgcgtactcgcgccggcgcgaatccggcgcgccaagctcgaggctgtggcagccaacgggtgcgcgagcgcggctcgagcggcgagacggcccgcgcaccggagaccgagaagatcggggagaggcgcggggcggcgagaggcgggctccgaccagtcgggttaccgctcttctcggggcccggtccctcgcgtctcgcaccgtccgcaggctcgcgcgccaccggagactgggaattaccggggaaaggaagagactcggggagagggttggggacaaagtagatggaaggggaaaacgggtgggacgcgagctcgcgtccgcgtgcagcacagctcgtacccggcggcatcggttagggacccggcgcgcgccgggaacggagggcccgagctgaactgacggaaagagccgaaactcccccggaggtggccgaacgcgggcgccgctaggggagtcgagcgcggggcttttgctcaatgtccgggttgggaagctttttctctggccgccgggtacagcgccgctcactcttccgtaccgaggacttcacaccgctttccccttcgcctccttcccgacccaagttttgttccaaaaggcaatttcagagtcgccaacgacgggaaacgctggggcctccggaccgcgcggtcgctctgcctcctgagagagcgcagaggccggtgggggcgcgggaagaatgacctcgggatcgtcagtcgggtttctgatctacccagctgtcagcatagcccctctacgcggcggtggtcggtcccgccgcccttcgaatcttttctgttaaatactctcttcgacgccagactcccaacctccctggtgctggaactaactagtatttgtgcaccctttctgcatgcataaagcacttacctcagtgtcgactggtcaggggtctattaagaggggccagagggatttagacagtcagcattgaaaatatttattagaatctggggccgggcgcggtggctcacgtctgtaatcccagcacttctgagaggccgaggcgggcggatgacttgaggtcaggagttcgagaccagcctggctaacatagtgaaaccccgtctctacaaaaaatacaaaaattagccggatgtggtggcacacgcctgtaatctcagctactcgggaggctgaggcaggagaataacctgaacccaggagtcggaggttgcagtgagccgggattgcaccactgcactccaccctccatctcaaaaaatatatatatatattagaatttgtcctcatcttaccttttgaggccaagcaaaggggctctgaaaaggcaccaacaagctggagagtgtgtgtcagtgtatagctagacaccacaggcacatgtcattttggtttccacgtatgttattgcaatcacagtacatgtaactgagtagtatagtagagctttgccaagccatctgatccttgtggtttttaacgttgcttgaggtaagggctcaaaaatcgcctggagtccaatgacctgtggttagtaatgtctcatctactccaaccatatgatttactgatctagataagcagaagacgaagtcatccagctaggtacggcactggactatatgttccttactattcaatcttcattcaaaaattcaaatagaagcaaattatccaaatgtctgctttcttttcattcactaaattggcacctactcaatgatggtgggtattgttctaggtattcgaacatttacaaagaagaataaaaaaaatcattaccccaaggagagtatccagttccaaaggaggataaagttattaaataggccagttgcagcagcttatgcctgtaatcccaacactttgagaggccaaggtgggaggattgcttgagcccaggagtttgagaccagcctgagcaacataacaaggtcccccatctctacaaaaaacaaatataagttattaaatgactataataacatagtgttgaagcagaaaagtacaaagtggtttaggaacagaaaggaatgagtgactaattcttgcacaattccccttccttcccatacagagtaggaacaggaggatatgaccctggtaaatggagaacttcatcatgaggtgtgggatgcgagccttgagtcctattccacaaagactggtttcactcaccaaaagtcactcagttcaggaaatgccttcattatagggcctgttggtgctgcaaagccaatacaagttttttggctggaaaataaagtccccattcttggccaggttcggtggctcatgcctgtaatcccaaaactttgagaggctgaggtggatcacttgagcccaggggtttgagattagcctgg

SEQ ID NO: 916906 - DNA, 4001 bp, Homo sapiens
caggtgtgagccaccatgccctgcccacatgatttctcttatcttggaacaccctgtaataccctatataaacttaatacataacatatttgcattctatttagactatatagtccataggataatgggtgaggaaggataaaaatacttattcttccaagtagaatatatcttgttgtgtgggtggaaggtctataagattcattggaacaatttaaaagcctttcgtgaatagttaaaatgaactgtctattagataaataaatgtcaaccagatatttctaatagcagataattatatatctttgtatttctgtgtggaatgtcatcctctatattctctgcatttttatatgtgagactttagttttatttaggctagatactcctggacatattttgcctttgctagaattaatcctggatgcttcaggtaaaaatgatctcgtttttgagtccaggagttccagaccagcctgggcaacatagtgagaccctgtctctacaaaaaaataaacaaataaaaattaaattaaagataaaaaaggtcaccgggcacagtggctcatgcctgtaatcccagcgctttgggaggccgagatgggcggatcacgaggtcaggagatcgagaacatcctggctaacacggtgaaaccccgtctctactaaaaatacaaaaaattagatgggcatggtggcgggcgcctgtagtcccagctactcgggaggctgaggcaggagaatggcgtgaacccgggaggaggagcttgcagtgagccgagatcgcgccactgcacgccagcctgggcgacagagtgagacttcgtctcaaaaaaaaaaaaaaaagaaaaaagaaaaaagaaaaaaaaggtcttctctgttctgatcattatcctggaatacagtggcgccatctcggcttactaaagcttctgcctctcaggttcagcaattcttaagcctcagcccccagagtagctgggattacagtcgcgccaccatgcctagctaatttttgtatttttagtagagacagggtttcgccatattggccaggcaggtcttgaattcctggtcttaagtgatctgcccaccttggcctcccaaagtgctgggattacagatgtgagccacagcacctggtcagctgatcattattcttatatgtgtatgtgaccaacaagccatttgatgtaccagcagaagagggtaaatgactcatctttacctggcgagtactgaagatctccagttgaatgttgcctcagaacctcaaaagcatcttcaaatgcttgacccagcttgtcttgttcaacacacgtctgttggaacaatgatagaattctggagttttcgaattaccaattaaacttaatctccctgatttaaaatagtatttagtctaaaggagggtttctcaatcttgacactatgggcatttggtgttggctgtctctgttgtcaggggggctgcctgtgcattgtacgatgtttagcagcttccctgacccctacccactggttgccagtagtaccttcacagttgtgaccgtcaaaaatgtttccgacatcaccaaatgtaccctgaggcacaaaatcaatcacagttgaaacacactccattatagtatactatttagagaatggtattcattctatagtacagtatttaacattattgcaaaattttagcaaggagttgtagagcagaggagagtgatttagaaaaaaagggccaaggaaatatcttcaatgaaacagaacctatgaattgttgtttaaaaatgaaatgctcttatgtctccaagacctaaaattgaattgctttgcaaactatttcatatccttattaacatgatcgatatattttatttttaaaatggagggagagtaaagaaaaaagttttttaattattatgctgtagagctcctctgtggacagagtaaagaaaatattaaaatgtcagcttaccatatttcattaataaattgacaattctgttccttagcaattgttgcttgaagaaaataaaataaaataagttgacaatcctgaaaaagtttaatatttaaaaagcaaaattaaatgcagtctctaatttgattctgaataagatcttgctcaaaaatattttctgaaaataccttacataaaccaagagtacctcctgaattctctttgatgagtacaaatttttttctacgaaattttctacaaacatttctttttgcttttccatgattacaaaatgctttaaatattaaaatagctatatatttaattatctgagctgcttgattgataagagaaagtggaaataactcaaaagtatatataagtatttcaaaattattttaaatattctaaaattctgaaaatcaaaatcctttttaccttagcatagctttataaaaatagggcttttttaaaaaacctttctttggtgttatattgccttctgagaatctggcaaaagccatccttttcctcccatgaaaattggacttatattgcaaataaaatttagcctgtgaagactatccttggacttgcttgaatcctaggctaagaaaactcgtctataattttgttatttactttcttatctctaagtaattctgattttgctttagagaaacaattatcacaccgacccacaattaaatgcttttaactctacgttctatagaccaacacagggaacaaacaaacaaaaaccaacccacataataaaaagaactgtggtgggtccaaaattgcttatcattccattaagtaaacccagcagttctttttatgcaagtatttatcttcttagtatttacccgcaaacacaatgtgtttactctttagtgtttaactttgaataataaaatgagatgatgtaatctaatgccaatattatatatatccatcatatatcaacataacatattaaatatcaaaattctgcttggctctttgaaatcattacatcatgtcagttaaaagaaaatagaagaaaatccagaaatcactcttcggctcatggtctttagtgaatattatcagtagcacatattttttaaaagccatgtcagtgattttcaattaactgctttgactcaaaagtgcagaagcactgaatgttgtattttgaattaaatatttaaaaatgaacatgttctctttgactaaaatgctccacaagactatcgcagctattacaagtagcaaatctaaaaggaagaaaaagcttgaaaacattattgattactatgattgcttaatatttcttgcatctgaacacgcagacagtgagaaacactcattaggccaaaggaaaaaatgaacagtgattagaagatatttagaaaaacataagctgagaacttaccgggaagacacttcaaccctttatagagatgtttcattaatatcagaacggtaaattcaacggtaggctatcatgaaaataaaaaattattttccagtgcaatggctctgatgaaaaaaaatagtaatattttttttaaaaattagaattgttaagacataaccatcaagaacatactggcagagttgcattaaatagctgtttttaaggaagttcttcaaaaggggattttttttaaaagatacagtgccttcacaatttctatttcatgatatgattagtagacaccaggggctattattttgaagaggcacatagtagtttgcatcccatcagccaaaaagcaaaaaagcattagaacaagccccatgaatcccccgcccaacttaggttgcagctcttcagattgcatagccccaccggaaacttctaacccaggcaactcaggcccacccttctttttttaattcatattacttctctcccaattctggactctatactctctttcttgcctggactgtcaacagccttcactctggactctccaaatcggtctttcctcctaaactactttacttacactgccattcactgatcgccttagagagcttaaaggcttag

SEQ ID NO: 916907 - DNA, 4001 bp, Homo sapiens
aacctctaacactataaataatccactcaaagtcttctacctaaaaccattccttattttctgatattacccatttcttagatgtttctctaggataattataattaatgtagtaagatctgtggcacttcacagtttgccaagtgctttctaaatgtactcacttaatccttacaggctgtggaaaaggtaattccctctattttataggtaaggaaaaaggaccgaagaactcactaccatgtcgtatcaacaaagcaagttggtggcaaaccggacctccgaaataggtcttccaactccacacggcatgctcgtcccattctattatgctcttttctaagaagggaatgtctacagttctgtcccaaaccacatttgcttcaagagtaaaccatcttcaaaccatttctctaaattgcaatcaggtcccccactcctacgatcatgccatttcttgcttcctcactctccagctatgacttccttctcactacccgatttccactcttcatggatactgccatcattccttcaacccgtcctgcaaatatcccacctctacatgctaaagggagacccctcatgttccttcccccaaaccctggcactcccttctccggatatgtaggttgtcaccccataaactacacagtagcttctcgcttctcggcccttaacgagctacttactaactttaaaagccccacagaaatgaacttaacttgcaggtcctccacctccacacttggccctgggcgccattcctctgaaaataatagtaccaacccttacaaagactctgcccatgccccactgtcaccaacgaattccttttccagaaggaaaaggaaacaggttcttcaggctcctcttccaacctcttcaccagtgactcccctccaaggttcgtggactctacccccgcagttttcctcccctcactcccgggcctctgcccacctcaccaactctccctgcgctccctgtcccagagccaagcggcggccgctccactctcccaacttagaagttctgcctctatcacctgttctcactagagcttcctctcagcccagcggcccacctttgccctggcctgcctctctccaccccttcgagtcctcctgcccaggaaacacccccacgagtcagttccggggtgcctgtcggattcaacttcccatccgtgggattcccacccccggggtcatgctccccttctccatcacctgctccgcccatagccagatgacatccgccgctgcctcctcctccattccccttctcggacgccaggtccccggccactcaccgccctccgtgcgcgccagccgccccctccggtggggaagaggggggcgtgcaccccaacccgcgccccccccccacgacacgcacctgttcttcctcctcttcccctcggcgggccgcgccggcgccccgacccccacccttgccgcctcccggcctcccggagccccgcactcaccacgagtaggtctgctccgccatggcgctgcctctcgtgggctccgctgcaggctgtggccgggcccggcggcggcgggctcgctcgggccgtagctgaaggcgcggccggggtccggtgcttgcttgcttgctcgctcgctggctcgctggctgcacggcgggccgggaaggcggctggcggggagaggccgggctccgaagcggccccgctccctgggccccggggcggggcgggctccgctctcggcctccctcacccgcggcggcggcggcggctccgctgcagctccaaacccaacatggcggcggcggcggcgcggagaacaagggggccctggggcgggcgaacggcaagacgggcccgcgctcactgcgcgcggggccgcgggagcgccgcgctcgggcggcggcggcggcggccgggggacatggccggcgggcggaggcggcggcgactgaggggggcgctaggcgatgaggcgaggccactcgatcacacccgccgaggggaggaggggcgggggcgggggcgagccttggccccgcgcgggtcacgtgcccaaaacacgctcacgtgatgcgcgccccgcccctcgagccgggcccatgcgcagagacgtcggctcctgggttctaggcggctgctgctcgcacagccagagcagttgggccgcctcccgctgcctggtgccgcccccctccccacgcggagatgtcgcctcgggtaccctcttccgcccctctccgaggggctgctgcaccagccaatcgggaaccccgatgcgcgtctgttggctgccactcagctgtcaaccgtcagtcaacagtctgctggccacgggccccccaactgtcagtcaacctgtcagtcaacaggcagagggctgcattccttcgttcgtatgttccttggttcattcattcaggtagcaaatattccaggcagccaacctttattgcgcccaggcccggcaccaagtcgaataccccacgcttgccttcacagaatcaatcaacagatatttgttgggtgccaaccatgtgtcaactcactctgccttcctagagcttacattctaaaggaagagacatagtccaagcccacaaataagataatttcagatgctgctaagttttacaaaaacacattttgtaacacaaggtgaggggacagagagtgagcagaggtgtgggttactttagatagggtggtcaaggaaggcctcgcttaggaggtgacatttgagctgatattgaatgatgacagagagctggccttgcaaagatccacaggaaaagagttcctggcagagggaacagcaagggcagaaggctcaggaaaccgtccatttggaggtctggaaaccggcacagaaataaacacggtagagctagaccagagaccaacaaagtgaatctggagcttagatggagagagaagagagagattaattgaggccccaggtactgcggaatgcttccccaggagtggatgaggccgtctgaaagggtgagaggcttatcaaagaaaagtcattcttttggccgggcgcggtggctcacgcctgtagtcccagcactttgggaggccgaggtgggtggatcatgaggtcaggagatcgggaccatcctggttaacacggtgaaaccctgtctctactaaaaatacaaaaaattagccgggcgtggtggtggacgcctgtaatcccagctactcaggaggttgaggcaggagaatggcgtgaaccccggaggcagagcttgcagtgagccgagattgcgccactgcactccagcctgggcaacagcgagactctgtctcaaaaaaaaaaaaagaaaaagaaaaagaaaaagaaaaaaaaaaaagaaaaggcattctagaaagaaagaatggcatgaagtaaggcccaattcctggtgagcttgaatccgagagtgggatgggtgatttgtgctggagtgttgagaaaatatactgagaaggtgcactgaggccagactttgagggcccagctaagcctccttgccagttactgtgttcatgaataaaaatgattaaccagtgcagcttcagaatttagaaacatgcctgggcaacagatacactaaccctcctggacacccctccacccccacccttcacccccctgtttctctgcagaaggcaaaactcacacacctgaaaccaacgtactcaagcttctctgcagcttgcccaactttaggccagaatttagctctgctccagtttcccagggcctgcccaggcttacagggaacaccacaccctgaatctatctccaaatggatcagttggccattgcccatacatctgccgcttgcctgttccccaagggaaaccctttaaagagaaagccaagtacactttcccttcagaagcaaagctctccttccttattcccccactgccaggtgccaggaccagttaggttccaagtgtttcctccaaagctctatcagagagccctgggaaaaggctcactgat

SEQ ID NO: 916908 - DNA, 4001 bp, Homo sapiens
ccaagcacctactctgtgtgcttttctccgtgctagggatggagctgtgaacaagatggacaggattcccattctcacaggctgggaggtggacacgacaggcaataaacagacataatttcaggcagtggagaaaagaacagggtgatatgataaagaatctggaggcagtggatagagtggacagaggcggtctctctgaggaggtgacatttgagttgaaaaggagctaggcatgacaagccaggcatattccaggcaggaagggcagccacaggtccttggatggaagagagctggcatggtagagaaacagaaaaaggcatggacagctggtatatagggaatgtgagggagaatgtacaagatgagaataaggcaggagtcagatcatggccctacagacaatgaaatggtaaggactctggattttattccaagatggaaatttctggagggttgtaagcaaggaaatgccatgattggctgggtatgatggctcatgcctgcaatcccagcaccttgggaggctgaggcaggaggatcgcttgaggccaggacccagaccagcctgggcaacgtagtgagacctcatctctactaaaaattaaaacaatgagccaggtgtggcagcatgcacctgtagtcccagctactaaggagactgaagatggcttgagtctggcaggtcaaggctgcagtcagttctgattgtgccactacattccagcctggctgacagagcaagaccctgtctcaaaaaaaaaagaaaaaaaaatgccatgatcctgggcctggtggctcacgtctgtgatcccagcactttgggaggccgaagtgggaggatcacaaggtcagaagttgaagaccagcctgaccaacatggtgaaaccccatctctactaaaaatacaaacaaattagccaggcgtggtggtgcgcacctgtaatcccagctactcaggaggctgaggcaagagaattgcttgaacctgggaggtggagtttgcagtgagccgagatcgtcccactgcactccagcctgggtgacagaaactccatctcaaaaaaaaaaaaaaaagccacgatcttaatcagttcctaaagatcattccagctgctggttggagaactgatcacaagaggatcaagaacagatgtgggcaaacaattcagacgttgttgcagcagttcacatgagaaatgacatccactaagtcggtagcagcgccgatggatgggggtgggatgatccaggtatttaaacaaccatcagtccctacatataaatgaatgaatgatttttcctgggagccaaaagtgagaaagaggtgaagtactcttctcttcccattccctaaacactgggacaggggttttcttgaggcctgacattgccttgcacacggtaggtgcttagtaagccttggctgggctgaatttgatcccaatacgcaaattacgactcttatgcagtagctacaacccaccacgtggcccagaagagtaggcacctgtgggacagacagccctaagattccactcccgggcactcagccaggactcaaccccaggtagatgctggttgcgcagaccccacagtcttggcaccggcgagtggcggccctactgggccctgtctcctccccgggcacggcctgatcactgagatgagacccgggagcagccgggccccagcccatccgtgtgcctacgcccagtctccccaggccctgcactgggccgagggtgcagcaacagaagaagcccagtgaccagagcgcagggccccgcccctggccccagagcccccgcccaggacccccgccttccgcttcaggctccggggagatacgaggcctccgggaccccgcccccgatccccgcctaccggggccgccgcgtcctcctcatccataggcctctcagctccgcacacaagctcttcggccgccgccaccacacacatccgggtccccgcctttccttcactcctagaggcccgccccgtcccccatctaagccaatcagcaacggcctctgacgacgggcacctgcaggagccaatcggaaggcgcaggcagggtgtggggcgcggcccggtgccctgggtacccagctcagggccccggtctggtcaacccggctgttgctggggtgagcgaaggcgacgtggcagcgcggacgctgctgggtgcctgggcgccgctgaggcggacagggggcggctcttgagcggcgccggggagacgggacgggcggagaaggtggccacgctcgcacaaacgttgcgagtattacttgagccctccttccgcgctggactgaaataaaagctttaccggaatgtccatttaatccacggtgcagccttatgaaataaatcttatctcctttttacggatgggccgaaggctggcctcgatagcctgcgcgcttaactgttatgctgtgtaccctcccgagctctgtttcatggcaccgctcgctcattattggcaagaacattccattccaggaggagagaactggggatgcagaaggcacagtggcacgaagcggcattctgtggaggaacacagggctttggtaggctgaaggaaagttagactggggttagaatgtgaagggacgaagacacgaatatttattgaacacctactagggagtgcctacctgccattctggggggttggactcctagatgaggacttccttgctcccttcccatcaccatatctctctcttctggacggaaaagattcctctcctctgtagcacctcatttataatacttttttttttgagacggagtctcactctgtcgcccaggctggagtgcagtggcgcgatctcggctcactgcaagctctgcctcctgggttcacgccattctcctgcctcagcctcccaagtagctgggactacaggcgcccgccaccacgccaagctaattttttttgtatttttggtagagacggggtttcaccgtgttagccaggatggtctcgatctcctgacctcttgatccgcccacctcggcctcccaaagtgttgggattacaggcgtgagccaccgccccccgccatttataacacttattaccgtcttgctttcgttattggagttacttgtgtgtgtagacccgtctctgctagactgtgagctccttcagaccccagactattctattcttatcacactaggtactctaacgtgttgagtgccaggaaagccatcagctcgcataccgtgaatagtgcccactcggcataacggcaatgggtgataggaatagatgagatgggaaacagagaaacccggattagagccccaattctgtgtgactaaaaggtcaaggtcttggtgttctcatccctaaacaagaattattgaagtatgtgttcttttagctcccttccagcccctggatgactcagttctgaatagctacccttccaactcatctccacctccttttgattccctcattgcttctcctccgctcctcttcttgtgttatgaaaatacctcaacactgagctcagctcttcccaaaggcagccagagagggacaatcttaggaggctgccagagtcatgttcatcccagaccagggctcattccagaaactaactagctaggtggctagggtcagacatggagagaaatggcagaagaaggcatttccaaactgttactgatggttggtgattccactcgggatttcctcacctttaagttccagatgtggggctcacctttttggcgaattctccatccattggcatgctcaggacccagttggtaatttgtgtttggtgtctacatgtatttgaataaacaactttattgccatataaccgacatacaataaaccatatatatttaaggtgtacaatttattcctttctttttttaattagagacgaagtctcactgtgttgcccaggctagtctcaaactcctgagctcaagcaaccctcccacctcagcctccc

SEQ ID NO: 916909 - DNA, 4001 bp, Homo sapiens
ccccatctctactaaaaatataaaaatgagacgggcatggtggcacacacctgtaatcctagctactcaggaggctgaggcacgagagtcgcttgaacccaaaaggcagagtttgcagtgagccaagatcatgccactgcactccagcctgggtgacagagtgagactctgtctcaaaaataaataaatagtttctagcactcatcccctagatatcccccaagtgtctctcttcccctttggtcaaggttataactgggataatgattatgacagactggctgggtgtcagaggtacagatttaaggtagatggactcagggtaaggatagctacagctgtgtggggctgaaggtctgtggcactgagctactggggaaggagggctctgttttcattttgacacactgagttaataaagcacttactgagggagccagagcccaaactctaaatgtgctgtagaaaaagggccaagtcattgactgcaccactccttcagccagaggtagaaaggatttactcttcagccatctggtagagccccaagaacaagttacatgtggacaaagggagggagaggtatcatggtgattaataaattcaaacaaagctgaatgataagaccccaggatggaatacagtctgagaaaggcctgggcaaagggaggcagagggactgaaggaagcaggtcaaggaagatacacccatggtagcctaggaaattggcagtagttggtgggtggggaaaaggagggtttggctgtatgcctagctttcacaaggtaggggatgaggaagatgatcatgatattgcacagaggacccaacactgaattgtgggagctagaggttgcttgaggcaaagtaaaaaggcttcggacactttcaaaaggaggctggccaaaggcgtgattagggactccagtaatggacatactagaggccctcgggcacctcaagccctgaatgggtcagcagctccccatcccagagagcaaaggcaggcaccactggaccccggaaatctgtctgtagcgtgtgaaccacagagacctggctcacatccaccaggctcagcttctgggcctcatactccagcaacagccccaccttctctggctgcccaataccctcaactggggctttctcgttggccaacatggtgtaccacttgcgctgggcataggtgaacacccaggaacgatcatcaacaccaatgcagctatcccgggacatgtccacatctgccactcctatccggaactgctgggagcgcttcactgtcacttcccagtagtgtctgccactggtgaccgctgtgtctgccagcaccactgcccactcccggaagcgctccacattcaaggccaccttggtgggctccaatcccaccaagccatatttgacacccgtatcatctctgaagagtgccaggctgctgtgggcggttttttcttccagtttgaaactgacgcctgcgggcagagcaaaaagacgggataataacaggggctagaaccctagggctggtgatatattcagatatgaggcaggcagccatgatacacgagcaactagggaagagtcagaatgccaagcgggcaagagagtcgcgaggtcgctttactacggatagctcacggagctgaaaaactcggattgagtaagtcccggaatttaaagaaaccaaatggtatcacaggtttggaatcttaagaccaaggcaggtggggaaggaaaagacccgagagggttggagttgcttctcggagtggggtctgggaataatagacggcagccattctggaggtaaaagagtaaaaagagataatcctacctctctgggcctctgtggaggcaactcccaatcgtttggctccccagcggcacaagcgcaaagaacgtgcaaaaagcagcgccatcttgcgccttggatgaaccgggcacgcctcccgcttacagacacagccatctgcccgcccgctcccctagcacgtggtgcgcgaggggcggccgcgcagtgttatgacgtaggcgacgcccgggggcgggcggccgccaaggtagtggtttctgttctgtttctgcccgcggttaatgctgcttattcagtttttctgcgtagacgaacgctgctcacatttgaactacgtaaaacttttagagatatagtgtagccagatgcttagaagtatagattttaaaattagacagtactgtaattagctttgatcccggcttcactgtgtgagtttgggcaactcactccacttttctgagccttagtgttctaatttataaaatagaaattatatacagaccttagtaataattaagtgagaataatctaggccgggcgcggtggctcacgcctgcaatctcagcactttgggaggccgaggcaggcggatcacgaggtcaggagatcaagaccatcctggccaatatggtgaaaccccgcctctaccaaaagtacaaaaattagccgggcgtggtggcgcgcgcctgtaatcccagctacccgggaggctgaggcaggagaatcgcttgaaccagggagtgggaggttgcagtgagccgagattctgccactgcactccagcctggtgacagagcaagactccatctcaaaaaataataataattaatctagatatatattggcaaatagcaaccattgggtaattcacagttgtttataattaatagtaaatacataaatactgttaatgttggttttgtatgttcaaggctaggaacggatggtttaactcagcattcagttttctgaacttaaccaagagtagcaatattttggttcagggtatgaggtaggagattatggacagcctatattgaacatttcgatctgcattccattttattttattttttgagacagggtctcattctgtcacccaggctgcatgcagcacagtggcgcaaacacagctcactgcaaccttcatctccgaggcacaagcgatcttcctgcttcagcctcccatgtagctgggaccacatgtgcacgcaccatgccccgttaacttttttgtagaaacgggggtttcgctttgttgaccaagttgttctcgaattctcgggctcaagccatcctcccacctttgcctcccaaagtgctgtgattacaggtgttagccactatgccaggcctacatttttttaatcagtccacttctcaaggttctgctggccagtgcaatagcaacatacatcccacctccatcctcctacccctcaaaaaaggattttagatatatatttttaaaatgtatattctgagacggagtgtcactctatcacccaggctggagtgcagtggtttgatcttggctaactgcagcctctgcctctggagttcaagcaattttcctgtctcagcctcctgagtagctggaattacagatgcccaccaaccacacctggctaatttttttttgagactgagtctcactctgttgcccaggctggagtgcagtggcgcaaccttggctcactgtaacctccgcctcccgggttcaagcaattctcttgtctcagcctcctgagtagctgggactacaggcgcatgccactacgtccggctaatttttgtatttttagtagagacgggtttcaccatattggtcaggctggtctcaaactcctgacctcaggtgatccacccatctcagcctcccaaagtgctgggattacagacgtgagccactgcacctggcctaatttttgtatttttagtagagacagggtttcaccatgttggccaggctggtctcgaactcctgacctcaagtgatccacccaccttagcttcccaaagtgctgggattacaggtgtgagccaccacacctggcttctggcctagatatttaaaagcctaaataactaaccaaaaattcttcctcctctcccagagtggtaactgccttgaatgatgcacatggccctagttcaggccactgtcatccttggcct

SEQ ID NO: 916910 - DNA, 4001 bp, Homo sapiens
aggcggctcaggtgcagaagggagtgtggctccgctgggagagagaaggaggggaatgtaagtatgggtgcagccaccagccagatgtcctcaaactacggggtcctactcagatgcctttctgctttcctgcttcgagtgtgcccacctggctgaaaggggaatttgagatacccggaagttctgcctcccagataagatttcacacatccctagtcagagctgggggtgaagagctggctaaggccctctaaacaacaggccaaggtggctctgacagtggtggagctggcccaggctttgactccagaggcttgggagctggggctgaggtgaggagggatggccctccactctacagcccacacaactgcagagagcagctccaagccctggacccagtcagttcctggggaggctcctcccctgctgccccaccctaaggccctgcctcctccactgctctcctccctggtgcccagggccccagtgtctccatccagaggtgtggctgaggaaggaagtaggtatgtggcacagagacaggttagagcccagggaatccggtatacagcctgggtacctggctctgcccatccttcttttggacctgtacatcaaacccagtacctaacgctttgcacctcttgctcaggggttgatatctcctgaattctctcatccctgcagttcctccctccattctgaaggttcaccatttactggccaagagaacttgagaaagttgctttctcaagcctgtttcacctctattgctgttgggttaaattaaataacagctgtgaagacccctagcctttcccagcactgaacagaggttgaggcaggctggatgaaggtccatcccctctgctcttgtcagaagagtttccatcccaaaccactgccaccagggacagaaagttctccccacgtctgccccaggcctcacctctcctttcgcccaggtagcggatgcggacctggcactggccccagacagcgcttactgccggatagagggtcctgcccttcagtccgcggaatgctggccccaggtaggtgcccccaatagcgtagcccagagttccctcctccatgtccagaaccaccagcagtctctctggcacctccagctgctcaccctgagttcccgctggatactggggggctccgggccccttgctctgatggtacagcttcccccgcccgatgtcccagccccacgactcgctgttgctgcccagcagcgccgcgtagtggtcagtctgcagcggggcgagggccgtggccacgcccaccacggcatgcgtgcccctctgctctaggggccagctgatctcccaggcgtgcaggccccttgaatagcccctcttaccccgggccccatcagtgctctgggccacgggccgccgctcaaagtacaaccctccttccttgacctcgatgttctctgaacagtctttggggttccaaccgtggcgccgctgggcccccaggtcaggagggggtgcagacagcagctcttccaagccctcgggacaggagaggtcagggtacagggcctgtggcgtgggggtgctgctgctgccccctgccagagctgtctggcccatggaggtgaggagctagaggactccccgaaagaggcttgctggggcgtctttctcttctgaaagttgagctccagtttggattgacctggaagggagctgggagaaaaggggcgtgaagagcagaatcctggcgggggctcgtcacccaggtaccccatcctttcacccaagtttgccaacgggcccgctcctccctcctcgctgccccaaagctcctgggcccttcatctgccctcgccccatctgatccaggtcgccagagactctcgcgagttcgccccatttgggcctcagcatggaccatcccccttactcgcccggagccctcgccgctgcccccgaacctcggttgacttcccagccctggaggtcgccgggcctctgaaggagccgggcggaaagaagccgaggcgcgcagggcgcagaccgccggccgcttccgcccccagctcctcccttgggccgagcccgtcccgcggccccgcccctccagggccctctggggcttaaccctctcatcgccgcccacggccgtgcagctccgaggccacgcccctgtggggccccgccccctcctgggcagttaccgctctataccggcagcagccgcggagagcatgccccgcccccgtggagcccaccccgggcggttaacctcgggtctcagtcccgggctgtgaccctccccgaggccccgcccccacggcgaaggcccggggcagttaacccttctcttgctgcggcagagtccgcacccgggcaggcccatctcagaattaacgctttgatggcatcaccgcgtcgggaatccctggggatggtgttctccaccgtcaagacctttgagccgcctgagcgactaactcctgcgcccctgagggtaaggagcatggggtcaaggaggggcttcattgtgccgaatcccatttctacttccctgtgattctgggtcactgtttctgggctggtccctttctgccccgggttgtgagtcagcctgtgccacctctgaggctgtgaaatctgcttcaggctctaggctgtacgcatcatagttctccctgctggtccagtcttcatactggatgccaatccattactgagccgttgatctcatttggtagagtgtcctgattaagacttcgagtttgagtgaagctatgccactagttaactgcgcgatcttggggaagttgcccgatttctcttttttttttttttgagacagggtcttgctgtcaccaaggctagagtgcagtggcgccatcacagcccactgcagccttgacctcctgggctcaagtgatcctcctacctcagcctcccaagtagctgggactacaggcatgtgctaccacacccagctaatttttaaaaaaatatttttatttttatttttatttttttcgagacagagtcttgctcttgttgcccaggctggagtgcagcggcacgatctcggctctctgtaacctccatctcccaggttcaggggattctcctgcctcagcctcctgagtagctgggattacaggcacctgccaccacgcctagctattttttgtatttttagtagacacagggttttgccatgttggccaggctggtctagaactcctgaccttgtgatctgcctgccttagcctcccaaagtgctgagattacaggtgtgagccaccacgtccggccaaaaaaaaattttttttagagacagggtctcccaaagtgctgggatttcaggcatgagccactacgcccagccccagatttctgtagttttctgttatgtaaaataggagcaatgatggtagttacctcacagggttgttgtgcagttgaaataatccaggtaaagcatgtagcacagagctgggtacatagtagtcactcaccaagcatagctgtcaatgtgcttaatgagtgccgacactataaggaggcaatataatataatggcaaacatgccagctgtgggaccagactccccgggcatgaatacctgaaggccagtgtgtgtatgaccttgggcaaattactgaacctccctgtgcctgtttcttcctctgtaagacagagatcacattagtatctattgcatggggttggtagtgagaatccaatgaggttatagatgtaacacatttggaagagtttctggttcgcatttaatgatttgtgctaagcactggagattaagcagtgaatccttaaggaggttacaaagacttttataaaataatgtatcatgtagtaatagtaaataaaattatggagatataaagaaagtactataggagtaaaaagaataggactcctatccggggttcaagcagttaggaaaggagcatctccaaaagaggttcacacctgggctgaatcttttca

SEQ ID NO: 916911 - DNA, 4001 bp, Homo sapiens
gccaccagccagatgtcctcaaactacggggtcctactcagatgcctttctgctttcctgcttcgagtgtgcccacctggctgaaaggggaatttgagatacccggaagttctgcctcccagataagatttcacacatccctagtcagagctgggggtgaagagctggctaaggccctctaaacaacaggccaaggtggctctgacagtggtggagctggcccaggctttgactccagaggcttgggagctggggctgaggtgaggagggatggccctccactctacagcccacacaactgcagagagcagctccaagccctggacccagtcagttcctggggaggctcctcccctgctgccccaccctaaggccctgcctcctccactgctctcctccctggtgcccagggccccagtgtctccatccagaggtgtggctgaggaaggaagtaggtatgtggcacagagacaggttagagcccagggaatccggtatacagcctgggtacctggctctgcccatccttcttttggacctgtacatcaaacccagtacctaacgctttgcacctcttgctcaggggttgatatctcctgaattctctcatccctgcagttcctccctccattctgaaggttcaccatttactggccaagagaacttgagaaagttgctttctcaagcctgtttcacctctattgctgttgggttaaattaaataacagctgtgaagacccctagcctttcccagcactgaacagaggttgaggcaggctggatgaaggtccatcccctctgctcttgtcagaagagtttccatcccaaaccactgccaccagggacagaaagttctccccacgtctgccccaggcctcacctctcctttcgcccaggtagcggatgcggacctggcactggccccagacagcgcttactgccggatagagggtcctgcccttcagtccgcggaatgctggccccaggtaggtgcccccaatagcgtagcccagagttccctcctccatgtccagaaccaccagcagtctctctggcacctccagctgctcaccctgagttcccgctggatactggggggctccgggccccttgctctgatggtacagcttcccccgcccgatgtcccagccccacgactcgctgttgctgcccagcagcgccgcgtagtggtcagtctgcagcggggcgagggccgtggccacgcccaccacggcatgcgtgcccctctgctctaggggccagctgatctcccaggcgtgcaggccccttgaatagcccctcttaccccgggccccatcagtgctctgggccacgggccgccgctcaaagtacaaccctccttccttgacctcgatgttctctgaacagtctttggggttccaaccgtggcgccgctgggcccccaggtcaggagggggtgcagacagcagctcttccaagccctcgggacaggagaggtcagggtacagggcctgtggcgtgggggtgctgctgctgccccctgccagagctgtctggcccatggaggtgaggagctagaggactccccgaaagaggcttgctggggcgtctttctcttctgaaagttgagctccagtttggattgacctggaagggagctgggagaaaaggggcgtgaagagcagaatcctggcgggggctcgtcacccaggtaccccatcctttcacccaagtttgccaacgggcccgctcctccctcctcgctgccccaaagctcctgggcccttcatctgccctcgccccatctgatccaggtcgccagagactctcgcgagttcgccccatttgggcctcagcatggaccatcccccttactcgcccggagccctcgccgctgcccccgaacctcggttgacttcccagccctggaggtcgccgggcctctgaaggagccgggcggaaagaagccgaggcgcgcagggcgcagaccgccggccgcttccgcccccagctcctcccttgggccgagcccgtcccgcggccccgcccctccagggccctctggggcttaaccctctcatcgccgcccacggccgtgcagctccgaggccacgcccctgtggggccccgccccctcctgggcagttaccgctctataccggcagcagccgcggagagcatgccccgcccccgtggagcccaccccgggcggttaacctcgggtctcagtcccgggctgtgaccctccccgaggccccgcccccacggcgaaggcccggggcagttaacccttctcttgctgcggcagagtccgcacccgggcaggcccatctcagaattaacgctttgatggcatcaccgcgtcgggaatccctggggatggtgttctccaccgtcaagacctttgagccgcctgagcgactaactcctgcgcccctgagggtaaggagcatggggtcaaggaggggcttcattgtgccgaatcccatttctacttccctgtgattctgggtcactgtttctgggctggtccctttctgccccgggttgtgagtcagcctgtgccacctctgaggctgtgaaatctgcttcaggctctaggctgtacgcatcatagttctccctgctggtccagtcttcatactggatgccaatccattactgagccgttgatctcatttggtagagtgtcctgattaagacttcgagtttgagtgaagctatgccactagttaactgcgcgatcttggggaagttgcccgatttctcttttttttttttttgagacagggtcttgctgtcaccaaggctagagtgcagtggcgccatcacagcccactgcagccttgacctcctgggctcaagtgatcctcctacctcagcctcccaagtagctgggactacaggcatgtgctaccacacccagctaatttttaaaaaaatatttttatttttatttttatttttttcgagacagagtcttgctcttgttgcccaggctggagtgcagcggcacgatctcggctctctgtaacctccatctcccaggttcaggggattctcctgcctcagcctcctgagtagctgggattacaggcacctgccaccacgcctagctattttttgtatttttagtagacacagggttttgccatgttggccaggctggtctagaactcctgaccttgtgatctgcctgccttagcctcccaaagtgctgagattacaggtgtgagccaccacgtccggccaaaaaaaaattttttttagagacagggtctcccaaagtgctgggatttcaggcatgagccactacgcccagccccagatttctgtagttttctgttatgtaaaataggagcaatgatggtagttacctcacagggttgttgtgcagttgaaataatccaggtaaagcatgtagcacagagctgggtacatagtagtcactcaccaagcatagctgtcaatgtgcttaatgagtgccgacactataaggaggcaatataatataatggcaaacatgccagctgtgggaccagactccccgggcatgaatacctgaaggccagtgtgtgtatgaccttgggcaaattactgaacctccctgtgcctgtttcttcctctgtaagacagagatcacattagtatctattgcatggggttggtagtgagaatccaatgaggttatagatgtaacacatttggaagagtttctggttcgcatttaatgatttgtgctaagcactggagattaagcagtgaatccttaaggaggttacaaagacttttataaaataatgtatcatgtagtaatagtaaataaaattatggagatataaagaaagtactataggagtaaaaagaataggactcctatccggggttcaagcagttaggaaaggagcatctccaaaagaggttcacacctgggctgaatcttttcatgtcctagaagaggttcacaccttcacactgggctgaatctttctctttttttttttgagacggagtctaag

SEQ ID NO: 916912 - DNA, 4001 bp, Homo sapiens
ttgaacctttgatagttctttctagtcaaacaaaagcatacatttgaagttcctaggtaagttcttattttaataataacagcgtttaagaggaggctgagtaaagttcctgcacaaacgcgcagatacatttctagaagcatttgcatagttcttcctatctcgccttacccctctgagctgcacctcaggtcctaactccctggggacctctgcacaccctggcagccagagggctggctgaacagccgcaagccaataaggcttggggagccgcagcgccagcctgggccgcccttgccaccattggcgcggggctggacgcgcgagctcccagctccggcgctcggcatccagctgctgctgctgccaacccgggctgccctcgggcggactgtatctgagggcgcctcagagccgcgtctttccggtgaggagacgctttctttcggcaccagcgcggagcaagccctgcccgccccatcctattccaaaagcgcaggactagcgcccttgcacccttggtcactcacccggcagtggccggtcggagaggtcctttctccggctctggtcggagatgaagcggcgaccctctgcaaaaacgagacctggggctcagcgacagcctggcccgggacaacccgggcttaaacctcagctcctcccggcacagcgcagtccccgggcgtggggagggggcaggttgctccaggatagggtcgcgcggggctgccgagtttccagcgctcccagcgcaaccccgggctgagccaggggccctggagctctggaggaaagccccgcgcctgaccggacgccgcaagggcgctttggagcggaggtcgggttactgagatatttcccaggcaacccgagtccccatttggaccaagagaagcaaccctccagttttggatggagaatttctaataaggatggaggatttccaataatcagggactcttcccctctcccacccctccctcacctaccggtctctttgatggcctcgatgatttaagggaataaactcgacattattctctctccataactctccatctatctgttcctgactcctaggggtcttccattattgtaggaagagcgaaatatttggaacttacgtgcccctttcaggtagagcatagcttgaggagtccagttccttctctccaacagtctctatagcccgggggaagggaagagcagttaataaaacattgcagctcagtcctctattacagcaaaataaaggaaaaagaagagaataaaacaagaaggaagaaagaaagagcagagtggacacacagtgcgcattgttttaaaattttttattttgcatttgattacctgcggagcgcagctggagtttcccaggaaaacaaacaccaggaaaagagccaaggttgttgctgccagacttctgagtccctatatgaagcgatcaaccagaaagggtcatttctgtgccaataggatcttctgcttccttccttgacgcctggacaattataaacccccttacttctcgcaatattctgttttaatactcagttttctggaggtgtttcccttctaccttctagttaattcacaaagagtccacttgaaaaaacgtatttagaaacatattatttgtattacttcacccaaatgaagaataagtaaatacgtgaatttttttcttagtaaaatcaaatgattctgttattctaaaggcgtatcgttcaaatatcctttaaactctaaaatccttattaaacatgaaataggtaaaatgctataaaacgttttaaaaaatagctaagaagtctcaagttaataaagcctttacttaccttcatgttctgcgtcttttcagaaccctgaaataactataactttatctgtgagttttcgactcttgctctgaaattggagcttttaaaatcttggtgttaagggcacctccccatctggagtagagtttgggagtccacagggacatcttgtcagtcttcaagcaagattgagaatctgatgactcctccagggagcttcattgcaggaagtagaggaatgattgatgggcagaaattatttgtttaaatactgattgcatcacccaggaggccttcagaatgtgtcagcatcattggccttgcttttcctactagctgcccaaagtaacatgttattattattattaatgaaaacaatcaatagtccaaggcagaatcaaaagtaaaagaataaatcagaaaacttttcttgggtaactagccatcagtctatcactgatggctaaagatgtatgaaaaggtttgggaatctcaatggaatttgacatcagtcattcacttaattatcaattcattctgttgtttagcaaatatttattgagtgcctatgagacacacaatccttgtatttcaagggacacagccatgcactgaaaagacatggtctctgctttgatctaagttacctactagttaaggtacacagtaaactgatgaatagataaataagacacagtagttaccccttaatcgtaggtgtgtgtggggtggaggagcatgtttcaagacccacagtggatgcctgaaaccactgatacgtatatgccttattatactatttttttttatctgttcaccaagatggttactaactgattaatgggagagtggtgtttacatatggacatgctggacaaaaagatggttcatgtcttgggtgggctggagctggacagtgagagatttcaacaccctactcagatttaaagctcacaatttaaacttattaattctggaatttcccatttaatattttcagactgtagttgaccatgggtaactgaaaccatggaaagtgaaaccgtggataagcagggactactgtaactacagaatgttttaaattgttaagtaaaagtaagcaaggtgatgtgataggataagtggtgggctactttagggaaggttaaaaacagagggtagtcttgaaggataaggtgaagtaatgggagaagctgggcaggaattagtattccaggcattctcaatagaagaaagaaaagcaaaatctgtggacagcaaagagcatgacttgcttggggactaggaaagaggccaatggaggcagcgttgtgtgggtgaacgggggaggtgctttgaaatgagattggagaagaagaaatgggccagttgatgtggaaatacgattataagcaatagatgatgatggcttacactgggatggtacacacagggaaagaagagctgtaaatgaatttggaatacatgttgtggaggtagaaaatatagaacttgtatataaaagggatatgaaagtgtgagaaaaataaatcaaggatgattcttaggtttatggataaaactgtgggtaaattatgaagtaatttactgaaattagagaaacttcttaagaagcaagttatgagagggaaattaacacttgccatataggcatattaaaattaaaatgtatattaaaaatatccaagtacaagtacaaaatagaaggttagaaatgcaaaacttgatagaggtcagccaagaggtcaccagcctacagattttctttttggtggggggcagaaatgattagctttaagaattttaagaattctaagaattttacaaccagtaaagggatgagattaaacacaacacttagggagtgaatagggctaaagaagagtggcagggacagagctatgaaaacaaacgcatagagaatgagcagaggaagagccagaaaaggaggttgaggtagagtcagaaagaaaggagaaattccaggggaccctgatatcatggaagccaagtgaagatccagtagtattgggaggtcaagcaacattagctccaagaaacatccactggatttggaatatgatggttttgaggatagaagcaagattggagttggttgaatagtgaatatgatatgataaattaaagccaagaataaacaatctcttttac

SEQ ID NO: 916913 - DNA, 4001 bp, Homo sapiens
ggtactgcaggaggaggtaaagcctggactcagggcagggcaggtgcagtgaagactcctaaagcagcctagggactcgtgggtgtgtggaaggaagaagtgttgaaggaaatagggagaaggtcattctctgtgggacagacttagctccaaatgtgattttcaccatgttcatgatttttcttccgtttgaatttgatagacacattgcaacacatcccatttcgctgattttcaaataaggacttgatcactggcaagtgaccttacagcaaacataaagaaatcaacatttggaagtgcatttgccaattagtgctctaggcggcagaaaaaccagaccgccaccccttgaagacctgccacaaagagccatgtggaaaaactgcacagagaaatggtggttgtgaacaagagtactgccctggaatgaaaggttttaggctatgttggactcactgaaaaaagaaaggttagtctcattagaaagtttacctggctctaagaaaataattacttatctgctaacacaacttccatagcaatgaaacaagttcctgtaagtataaattatcacaattccaagcagacaaaaatctgtgtctcctgaacacattataggggtcagcctatagataactccattataggggtcctcctaaagataacctaagttatcttgcatattgtgtctgcagtgtccacaatgagttggtctgtattcacactggatgatacaggatttctccaccaggtcctctcacaggactccaggcatttttacaacttgaccacacaaaagaacactcaggctgctcctcccttgctcaagggaagtacagtaatgcctctctccgtagccctttcataagactgtgcatagataaacacaggtgtatacatagcaatctttatgaactttgcattgaatgtgtcaaagaacagtggcggtcccaacattccatccattgtctcaatcaggaaagctactcctgagacctcaggaaagaggaggaaaaaattcaagtaacacatatgtttacgaaacacttcagtaacaaaacaaaatacttgtattggagagaaaatatatatatttttaatcacaaggcatagaaagtaaaaataatcagccttaattaggtttccttcattagttgacaatgtaaatggactgaaactactactcaaatattcaaaccttcattttacatgcaagtggcttccagaaaatgataaagcaatattcccatgtgagtgtgaaagatggcaatgaattctggcccattataaaggaagagtcagattccactagtcactgcttcgtttaactgccaggcttttagggagctatttaataaaaggggtctcgccctaataaattgtgagcggtgtaaataggtgagtggtgtaaatatctgaaatagcctgcactcaatgaggctgtagaccgcttggggttcacagactttacaaaaatcattccgtaaaaaaattacgtagtgacaatcctaccatttaaaaagaataatgatggtgataataatagctggacaggatcctccactgctgcctgcttcccacataagttgcccagctgaaggtggttaagttaaagccagttctctccccattagagatgcgggctggcagctggcgggggaagtcacccagtttccagctccccgtgggtttgacgggactgggattgcaactgggaactaactggcttgtaggaagcccaggtggctcagacagggctcgagctgtcccctcaccaccttcctcccacgcagacaccaagttagatacgcaactccacgagcacaatgacaagaaggcacacaaaaggagcaaggcagccgctcccatccttacctttgacttgactttcatactcggctatgatctctttgtccttcttgaatcggctcggggtggacattatccagctgttccgggtttgctttcaatgggcaagttttgttcagtggtcacaacccgttctccttggagaggcagagttgtactcccacacgcaggcaatccagaggcagcgccgacccgagggaagggaggagggagaggagaagtaggaggaggaggggaaaaagagcgagtagagaggactagattagcccgggcgctggcaccatactctcgaaattgagctccgtcggtaatcccaggggatccccgggggagaggccggacgcgcaggcaaactccagccagcgagtggcgggggacgtctccctgcccacctcgccgggagcccggccacttcctctacggccgctgggcgggcgcggggctcgcgccggcgctccgcaccattgttcgagacccgcaccgggcgcccgggacagggccagcggcggagggcaggcgctgggaacgcgcccagctcgggcgccacaaccctcccttcctgcctccagctgtcggctccggcgctcaagggtcccgcccgggctggggatgctgctgccacggccgccgctcctctgcccgcagacactgccgctacagctcggcaggcgaaaggaatcgcagtcctgacgcgagtccccgctgctgctgagagggtgaaggcggcgacgctcagacgcgccctgggcacagccccggcggagtttaggtctccagagccggcgccgcgaggggcctctgcctccctggccgcggtgcgccgaggctgcctttctctgcgtccccctttccgctgctgcccccaggaggccgctagtgacaggcacactcgcacacgcacgcgggagccgcgcccccggcggcagcaaagttgagggtgcgcacacggctcgcgcctcgcgggcgcccggctagcgatctgcgggcggtggctcctcggggctccgccaggcggggccaggctcgcgggagcggaccgcgctccggcctgtgcccttctccgtccaagctcccgcccctgctccgctaggaaacgcctggctggtccgggaagatggatgcctcttgtggccaaccgcagcccggccccgcgcgccgagcccaggaggccgtgggcggcgcccccggcacctccctccgccgaggccccgcacctccctccgccgaagccccgctccaccgctagccgaggtcgcggctccggcggcaggaaaaccccttcctgacctgagggaccgccttctggctctggcgggggctctggtggggcttttgccagaatctaatggggaagtccagagttggatgtatccatgacacaaagggatgttactccgagacgctggaccccaatagaaaaactgaacactgaattgtgaatgacctggctgttaatccaaagagcgcgaagctcttcaatcgaggcggagaaaaacacccaccttgaacaccatatcctctattcctacagtagatagggaagctaggatggtaggaaagcgatggtatggaaacacgtcacacttaacggcgttgttagcttatttatttactaaactccagattttattccaattttaccaattttttcgactagtgtcattttttctgttccaagatccaacacaggacactacattgcacttagtacttttacggttgtttttgtttttgttttttgattttgttttttgggggttttttttgagacggggtctcactctcgcccaggctggagtgcaggggcacgagctccgctcactgcaacctccgcctcccgggttcaagtgattctcctggctcagcctccagagtaggtgtgactacaggcgcccgccaccgtgcctgggtaatttttgtatctttagtagaaacagggttttgccatgttggtcaggctggtcttgaactcctgacctcaagtgatccgctcacctcggcctcccaaagtggtaggattacaggtgtgagccacggcgcccggccacgtttttaatagataccttttacaagatctatcgtgtctagtctctttttattttatttgtttgtttgttttcattttagta

SEQ ID NO: 916914 - DNA, 4001 bp, Homo sapiens
actgacgtcaaaactctatacacagaacctccttcggagcagagaagcatcagcctttaatggcatttggtattattgttccccttctccagcctgtgtcagtgggtgggtgggtgtcccctccttcccgtctgcaaacactggctggtgctgctttagcttgaagcctgctacaccctactggcctgttgtgatgcttggccacccattcctaaatgggacacctatttctctaaagacctgtatgatcctcaataagacagtgaagaggaaaacttctccaatctggctttgattcttcagacataatttcccatacgtcttccacctcacactcactggaaagttcagaatcagttgtgccagaacagacgttcagtctgtcctaagcacttttgcagacatgttttcaatctgctccctaatgcagactgccaggattaataaatcctccaagtggtccccctggtccacttctttcttttctcctactaaaccactcatccaacaccagcaaaagatgagttttcatactaccttgattttccctgacagagagcacagccttcttcccttcattcttaaactcctctaaattgaatgatttatgaaaagaattggatttttctctgtcttggaatgcttccattttcccccaacctcctctccctctcaccccacctcctgttcccctgtttctttcatttcttcccttattcttccttccatcagcaccatgtctaccaccatccaaggatcggttctcatccctgagttcaaagcaatcagattctttttggaaaaaaaaaaaaaaaacaaaaaaaaacaaaataaaactcttccaagatcatcttcacgatcttggaaggctcctccctgactcctgagctcagagtcttggttttggatgctggagaggagagaattcagcagcagcggcagcagccgccagaaaggcgtggaggagggtgctgttttgggtgtatttgagggaacagcatatgggcttttgtcaaaaatgttcaaagctcgctagtttccgagccgaggatggaaatgtgtgctatctctgaacgctgcttgagctggctcagttctccttttctggtacaacaccccccaaacatctcaaatccaccattccttggcccacctgccctctggactctgtgacaccaagaaaagtttttcagtcaagtcgtaccccatctgcaccgcccaccctcaggtagcaaaacctcttgaataggagctacgggggtccaataagcgttgctttcccccaaagaattcctgtcccttctcaccatcttccacctcacacaagcaatgagttcccatgtttcagcgggagccgccgagtagtgacgggaaaagacaggcgccctggcccggctgcctgcatccacccctccgggctctggggcacaggccagaaaggaggaccttcaggatccccccttctaagaaggagatcattaccttggcagcggcttgcgggccgtgatactggcgacaatgatgctctcgggacggggggtggccaccgctttgaaggttcctcgccagaacttctcaaaaagctgcttctcgccttgctgaacgctcgccatcgccaacccaaaggggccggggcgtccggggcgctgtccaaagtgctgaaacgtggattccaaacgggggcgacacccagctcccggctctgtccgggtgaaacccagagaggggtggggtgggagagatcggagttcagggcgggggatgggacgccccagcccgggcaggcagcagagaaaggaggctcgtccgctgggctttcttcgcccttctgggtcggctccaggctgcgctctgagctggctgagcctctgcgccccaagaagggaagggagggctggctttctgggcagcaccaggagagaagaggcgacggggtcggatgtgtgtgcgtgcgcgtgtgagctccggcgcgcccgggttttgtctctcgcacaatgtgacgttggaagaggaggctggtcgcgcgagctgcactttcctcccccctctccgtctctcctcctccccaccaaccccctcctcctcaggctcagcctcctgccgccatctgcataacaaaagcccgcaggtcttgggaggagaaagggcggggcgtgcgcctgtcaccagggccccgcggcgaccgagttgcagcgctgatccctctgagaagccatcctggcaccccaatctgcgccaggcaggagatcctgcttcccaggcccctctcctctcccatcatcgctggccttcctcagccctttcctgggtgccccctttgggccaggccacctttctttccagccccttcgcaagtcttgtagctgatcttctgcgtggggggggggggggggttgggggggctcgtaaaaaacttaatctatccaccccagccggcctcccccagaccctcacttttgggagacacggcctaggccggtacagagggtgccctgcgttcctctttgcgccgggggttagcgaggtctccaccacccagaaagtgccatttgatagacaatccctcaccaattcggcttctcgccatctgccgagcagggcccccgcccgccaaggggcgcagcgttacatctgtgcatgcggagctgtcaagggtatctcttttgtgtctcacagccggcctgcccagcgtccccgccgccaaccccgtccagaggaaagagttcccatctcaccccaccccacccccatccactcctggggaatccgcctgcagccacttttcctaatgccgctagtctcgggaaaggagtacgttttggaaaagaaagcgcttagtgggagggttggagaggaaaatctcgaggattagcagggggatagttacttttcggtctctcctccccatctccttaccgcctcgcagttcaatcgtaatcccaagcaagtggaggtttagaatcccaaatcaaccccagacacagaagatctggttagaatgactcttgttttcccccagggttttcattataaaaaaaagagatcgtggcgggacccctcagcccttgccttcctggaagccttttaatcttagcagagttgttactcccccatctcccacctaacgccctccccctccccccaaccccgcttccactttccaggctgtaaattcctggaaggaggcctcgctcagtcttaaatgcctccaagcacctggtgctgagtcccagtcacagcgagaataaactcctgctctttgctaaagcagatagcaatggggacccaatgagggcggggtagggcgggggggtcgggagaacaatgggaactccagaaattctctgaaggggaacaggaggtaactaggaggtgaagatgaagaggccaacagagaggataagatggggcaggagaagaaagaaccttggagtaaatgagtacccgccccaaagggtatctacgtttgaagtgtgtgtgttcgacacgcctgcgtccgcttatttgagtgcctgagagcgctacttgctctgcagtgaccccttctggtcaacaacgagaggtgcatttgctggcttcttatgtgggttgccgggggagagggcccagaggtgggggtcaggcctgggaaggttggagatggagcaaagtggagactaggctaaccccttcccttcctctccctcttaccttgcgccccaaatcccccattccctgattgggctagacccccgtttcccacccagaagttggtatcattgtaaatgcaatctagagctggcttcttataggtagcagactggcatctttaaaactaaccttagtcatgacatttagggtatgaactgagtcacttgcaggagagaggtaggtgggatcctacccccacaagatcagtcaacatcttccagttgtgtgcctgctcctaatccctaaaatgttgatagagctcccatatgcaaaacattgcctttttaaaatcccatcgtagccagatgagg

SEQ ID NO: 916915 - DNA, 4001 bp, Homo sapiens
tcatatagtaagtttgcattcgaaaaacagaagagggagttcaaatccattgatcccggcctggcgtggtggctcaggcctgtaacctcagcattttgggaggctgaggtgggtggatcacttgaggttaggagttcaagacaaacctggccaacatggagaaaccccgtatctgctgaacatagaaaaatcagccaggcatgatggcgggcgcctgtaatcccagctactgggaagctgaagcgggagaatcgcttgaactcaggtggcggaggttgcggtgggccgggatcgcaccacagcactccagcctgggcaacaagagtgaagacctgtctcaaaaaaaaaaaaaaaatagtacctacacctcataaattgttaaaaatactaaatacaggctgggcgggttgctcacgcctgtaatcctaacaatttgatccgctgagacgggagaatcacctgagctcaggagttccagaccagcctgagcaacatggtgaaacccctaatttatcaatctaaaaaaataagaaggaaagaaaaaaagctaaatacacaccatggcacttgacccatagcaactgttgaaaaaccacaatggcacggttactaaataagcgaggcatagccttctccggcttaggggtaaaaatgcccagttccggttttgaggcaaatgaggagatactagggatgagctgtcagagtcgactcttcagccatcaacgcctcgcggtgcttcctgcctgcccttcctcagatgctccccttgccctatcaatacgtccaccccaggtaggtcggacaccctacgaacattccgcgttccccgggagcaaatgatgctaggaaaacagggtgcgggctcttatttggccggagtggagtgaccaggtcagcgccgcagctgctaaccaccaccaaccacagttttgaaagttcctgggctttttccggcctgagggccgacgctgtttgcaaaatcacaagcactccttagagcggggttaggaatctagagtttccaaatccctggaacctttagcatctcgccaagcctccctcatcaaaggagggaagtgaaatcagagccccactccggctgttttagaagttttcccgaatccgtgatccctttacaaagcccgggccctggcctgcggggcggggcgcgcgaacggcgagctattccaccagagatccctccacgacctccagcggcatccgcgaccctgcagcttgctctccagccacggcgagcacgggccgggggagaggcgagcgggaagggcgaacggcgacccccgcgctgccccgcggccgcttccccctacggtgctgccccaggcaggaggcggacaaggctcatttggaccccccgaggccggtgcaggcgggcttgggccctccaaaggctcagcttttgggtttctaagtaaaatattggaataataaaaataaaggaagtgacgacggcgcgaaggacggcccgggcctgcgaggagaggctgcctcatcctccacccgtgagggggcgccgtgaggggtctgcgcggaggcggggggaggggaggccggggggaggggagccctgggggaggggacagcagggaaggcgggggcctcaggcaccgaggaggagagggcaggggcgcgggggcctcaccgggggtcctcgaagcgcacgaaggcgaagggcacgaggccgtgccggttcttgagctcgatctcgcggatgcggccgtacttgtagaacaggtcctccaagtccttctcgcgcacgtcggtcggaaggttccccacgtagatgcgcccgtcgccctcgccgccgcgctcgtccgcccagcccgacatccgcaccgcccgacgccgcgggcccgccgcagcccacgtcgccgccgccgcctcagcacgggtccccccgcagcgtccccgcgggctccgaggcgctcagccgcactgcattgtgggaacgcggagcggaagcgaaggggtcggcggaggcaaaaggagtcctcttaaagagaacgcggctgcgaccattgcgcgtgcgcgcaggccggcgccccctggaggtgcgaagggccttcgggcgctgacagggagagcctggggccgggccgtgtggatgccatccccgagcgcggttcgcgctcggctgaggcgctggacaagtggcttgggctcccgcgcctcagtttctctctgtggcgccgcctacctcacagacttgtgagcactcactgacgtgggtagcgcccagggcctgcggggcgcaggagagctggagtcaggcggagaccgcaggctgaccccgcagcggccgggctgtcgcggcccccacctcaggtcagtaggcccccgggccaccctgtccccattttacagttgctcagaactgacggtgtcagcatgagatggactccatagcttggccttgagtttgtcggagtcgagggagtaagactcttaatgagtatcacagcgatcactatagagtgcatccgacttgtgcttttcatcctctcccgggcagagtctgaggccacagaggggtcaggaatggaacccagagccatgctcccatcctaagtactgagtccttatggagctcaggtagacacccaccttggcacttacttttccacattcacatcccagaacgcggagcattgaacccagggaccttacagtgaggccttgcaccagaagactttttgtttgtttttgatacagggtcttattctgttgctcaggctggagtgcaatggcgcgaacacggctcactgcagtctcgatctcgctggactcaggtgatcctcccacctcggggcgccgtgaggggtctgcgctgcgtccagctagtttattttctattttttttgtagagaggctggtctcgaactcctgggctcaaccgatcctccagccttggcctcccaaagtgttggattaccggcttgagcccggcgcccggctggaatactcctaacctaaagattgttcaggctgggtgcggtggctcacgcctgtaatcccaacactttgagaggccaaggcgggaggatcacttgaggtcagtagttcgagactagcctgggcaacatggggaaaccccgtttctactaaaaatacaaaaattagctgggcgtggtggcgtgttcctataatcccagttacgcgggaggctgaggcaggagaattgcttgagcccgggaggcgaaggttgcagtgagccgagatcatgccactgcacttcagcctgggtgacagagtgagactgtctcaaaaataaataaagatttttcatattaaaaatgaaacctggctgggcgtggtggctcatgcctgtaatcccagcactttaggaggctgaggtgggtggatcacttgaggccaggagttcaagaccagcctggccaacatggcaagacccgcccccctactaaaaatacaaaaaaaaaaaaaaattagccaagcttggtggcacgcctgtagtcccagctgcttgggaggatgaggcacgagaatcgcttgaatctgggaggcagaggttgcagtgagccgagattgtgccactgcactcctccagcctgggtgacagagggagactctgtctcaaaaacaagacaaaacaaaaacaaacaaaaaaagggactaaaaccacacatttaatcagaaggtagttgatttctcattataccatctgagcattttaaaatcaaaacaaaccaaagactagacacccacatatactactgagtgtatatcttttttggaatacaagttgatagtatacatcaggctttcataatatacatatacccttcgatcttgtaattctgcttgtaggattttttgtttgtttgttttgagacggagtcttacactgtcacccaggctgcagtgcagtggcgtgatctcggctcactgcaagctccgcctcccaggttcatgccattctcccgcctcagcctcctgagtagctgggactacaggtg

SEQ ID NO: 916916 - DNA, 4001 bp, Homo sapiens
agaaatctgggctgacaggttcagcctgaagccaacctctccccttacctcacataaacttttgtgatgagaacctgagattaagtgcataaattgccagacagcagtgaccggaacagaaaacagcccctcctcgctgtgggaaggaaaggcgctcctgcaacctaacttctcagtagcaggctattgatcgccagtgttcttttgcctctaatcagcgtgtagagggggattactagaaccttctgtgtatagataactcatgaatggcctctcctctccaaggagggggctgtgaaggttcaacttcccagccactctgaaaatgtccctgccaatcccagcaaaacaaggctgaagaactaccctaccaggagacagggctgtcaagccaaatgcaaacattattctcttgtctctctcagacacacaaacctcccccgtgttatcagtcaacttcccccactccctcccacaaagaaaggggctgaagagcccagatgctggctgcggaacttcctgggcctgggaccgcagggccgctcctccagtcttctctaaacacagctaagggtctgcaggcggacactcagccttgttataggtaagagtttagaccagaggccttgacgggttcttcaagagatggtgggcaagattgcgcgaccagagggtcatccctgcagctacagagggctgacctgctcagaggcccaaggccccagcctaggacaagccaggccaaccctgcaggctaagagggcaacagtgccctcaatcaaccccagaggaaaaagtggccaggcaaacggacctgggccacacacagacccacaaaaacgcgcacagtgccaggacacgcaacccaggaatgcacctatgcaatcacccagaatgggtcacagccacacagaaagatagatgcacataaacacacaggcctgagtgatgttacagaaaggaaaagccagactaaggctgcacgcacagacgtgaaacacagccacacagagcccacagcacgctcggtcaccgtcacacagtgacacgggcacgcctacagacagaactccagaggcggcaggcggggaaacaatctcacacgtttgtaggggcactcccagatgcctgtctcacgctggcacagtccccggacggcaggtcagcaacagtcacatctcacatcgcacagccaggcatacaggcaaagggcctagaactaccccggccacaggtctcagaaccagcggctcacgcagtcacccaatcaagggtcccagttgcacatccagtcacccctggaccctggtcacactgcagagtcactcacaaatgggagtcccgacagacgcacagtcctccccagacagaggtcaacccaagatgggggtcacacctgaaatcacagtccccacacaatcacgaggtcacatctgcacacacagtctctgcacagtcacccttaggggtcacaacgcacacagtctccgcctaacaggggtcaccccaagatgggggtaaccccctgatgtgggtcacagcgcacacacagtatcctgcagacactcccagaggggtcgcactgcatacacagtccctgcaaagtcgccccccgataggggtcacaccgcacacaaagtccccgcacagctccccaagacagggtcacatcgcacacagtcctcgcacggtcaccccggtccggctgcccggctctgttcctacggcggggccccgaggagcccgcgcagccgcccccctgccccgcacgcgcggccccagctccggcggcctcggcgcggcgtccggcggcccaggccgggcgcggcgagcccggggctcacctcgctgttgctggccgaggaggaggcggcgctgggcgtgggcgagcgctgcagggtcaccagggccatggctgcggcgcggtgcgagggcgccacagacgtctcgagctagagccgccaccgccaccgccgcccgggccgggcccggggcctcctggagccgcgcgcgggcggccgggccgagccgggccgggcccgcccctccccctcggcgtcgccaccgcccccgcccccagctcccgcctcccgcgccggcgcgcgcaggcctcagtgcgcggagtgggcggggaagcgggcagggcgggacgaggaggcgcgcgtgcgcgggggccctgagggctgcccgaggcctcggctggtcgatcacgtccctcgcgcgcccgacacacgcgcccccgcccgcgcgccccgctatcaggcctgggactcgggggcgcgcgcgccgcccggagcccgtacgccccaggggccctgcccgctgctctgcctggggaaactgaggcccggcgaccgtgcagacaggactgtacagcgaccaggaaataaaagacgtcctggggccgggcgcggtggctcacgcctgtaatcccagcactttgggaggctgaggcgggcggattacgaggtcaagagatcgagaccatcctggccaacatggtgaaaccccgtctctactaaaaagacaaaaattagctgggcgcagtggtgcgcgcctgtagtcccagctactcgggaggctgaggcaagagaatcgcttgaatctgggaggcggaggttgcaatgagctgagatcgcgccactgcactccagcctgggcgacagagcgagactcggtctcaaaaaaacaaaaaacaaaaaacaaaaacagtaagcaaaatagattcgcctgattttgcagaggttaatcaagttattaggcacgtttttaaaaaagtattttgctaatctttttcaatgaattctttctgggtgttctgaaacccagccaactccttggaggtcagggaaggcttcccagaagagctttattctgaggcttgggcttgagcataagcaggattaacaggtgaaagaacagagagacagctctccaagcaggggggatcagcgtgccctgaagcaggaagaagtttgtcaaccggaggccagcactcagggaagggaagaggggaggaatggctggagtctccatcctctctggaaagatcgctccggctgctgcgtggatgagggaccacggggcagagggctgagggagaccagggaggaggctgctgctgttgtcccggggagaggtgaccagttatggggatggagaggggaacatggaataagataccaagaaggcaattctggcttgacttagtagtaggaaacttttcttttagccaaaatctcatctcccggctcccacccccaacctctgcatgttgcacaagcactcgcaaacgcagtggtcccagcctgccccgcagcttagcaaatttgtcttactgcccaacaggaaacccacgcagcctcctggattcttccccgtccctccctctgtcctggggctgtgacctcctccatgttattcacagggtctcagcacgattcatctcaaaggtgattctagtggggggcactgtagcttctacggagcgtttctaagaggggatttgtgggaatgtttgtggttgtcttgctgatggagggggagagctcctggcatttagagtgcaagagccttggatgctaaatgtcttccaatgcactggacagtctccccaacaagaattgctccattcccacaaaatgtttcctgggtgaaaaacccatttatagtaatttgaagccagaacctaactccatttcatgcatcaacactagtcttccttccttccttccttccttccttccttccttcctgccttccttccttccttcctctctttctctcactttttttctgaaacagggtctcactcccgtcacccaggctgaagtgcaatgtcacaatcatagctcactgcagcctccatctcccaggctcaaatcatcctcctgcttcagtctcctgagtacaacgggtacacaccaccacacccagctcctttaaaaaaaaagtttaactatgttgcccaggcaatcctcctgcttccgccttccaaagtg

SEQ ID NO: 916917 - DNA, 4001 bp, Homo sapiens
ccttcttgttcagtcctctgaattccaggcaattggttttcgatatcttgtgacaccaatacttgacatctaacagcattttgtccactactgcagatgcactgccgagtcatcctttccaccctctcacaggcatatatttgtgctgcaaggttcaagtgttgaggagctcaggattataaataacgaaagaaacgagaagcagcctttctttgctgtctcaccctcactcataggaagtaaaaagctctttagcatccatctggccgatctcatttcacaggctgcagaatcacctaaccctttccacctgcaaagcttgtcactctctccttccttagaatctcacagctgagtatgttttcagaactgttcttagacacagatcatttactatttattctcatcaaaatctgaaacagctatgcgagaggttccaaactcatgaaacctaaaacaaccatcagttcatcgaagcagctgggaaaatcttttcgagacaacatcaactgcttttgttcatgagattaaaaaaaaaaaattcatactgaccagaaacccaagcacgctggaaacagccaaccattaacgatgacctttgccttggaaaccatgagcaaaaattccccttggtttcccttatatttcctttggaaaaaaaaaggaacaatgcaacagactaggctggtttcactctgtgatcacttacaaggccagctgttcctcctccatgttcctacactgataagaatcagggactcctgctctacgcatgaagtcaggatggcattgattggggccctggaacactctgcctctgttcccccacgacaatcaagtaacaggcatttactgtaaaaagcaagactggaagctgcagggaagcccaagtagcagcgcattatcccgaagctgtgagatcaccctgcgtcctgcaaatacagtcaggagatacagccagaggaaaccgcacgacatgactctccgggtggggggtggggtgggaggccgcagagcatggtcagtcacaggatttatgaaaacaagatgcagaaagtctctgtgacccggcttcctggcttctcttctgagctcactctgggcccagagcctcatgcgccctctgcgtggctgacctgaatactgtatctgacgactgcagcttctgatgcccagaggcacaggctcccgattcatcagaccctcaaagtgtcccactggggaagtccatgaagaaatccacattggtgatggcacgctcactttaccaggtgtctggggccaggaagcccaaacccacaagccatccatcccagccacccagaagtcactcttctcacaaaagatctgagtgtcctaaaaggagtgactaaagttacaaaaggtcagacgcagacagacaaaacggaaatgtcttcctccaccgctgtaagaaaaatcttgatgagggataaaaaaaaaaaaagccgctgccctctctacccgccaactggaatgtttttatctccaccacacagatctgttctcggacactgattactgccattcgggaagcttcataagattaaagtttctccaaagcattgaagacagacaaaaaacctcaatcaatgctcctcaaaaaaccccaggcccccaaaatataaacagccagtgtcatccagaaaccaagccatggcaggaaaccagtaatcagggtggtcatacgtactaatttgagctggaaacctctggacagcagaagcagtgggttggctgaaggaagatgcagaagtcggtaaaataaaagaggttcgtggctgcagtgctcacatctctaacgctccctacaactgccctccgagctctggccatctgctccctatggagatcaggaaaagccaggaggctgccgagtgcttccacgagggctggggagccaactcctcctcagagtcctacccgaaaagcaaatggctcttgtggaactcttgtcttcctctgatattttggctgaaaaaggcccttgtcccagcacatcctgatgaaagagggccattcagcaaaacagctgaggttcctctaatcactgcactcctacgggcttttctgtaggccggagaaacaagcaccggggtgtgcattcgacattgtgagggcaaacaactggccccaaggaaccaaccccaagcaacaagacccccttccgattcaaatcaacattctgaaggatgactctttctttcaaatcagcatccatttacccaacggtgacggtgacgtgggcagctgccgcagttagttattctgcgtactcaaagcacggttacatcctgaaaattcttcagtcatgctaacagctatctgaggggacacgccaggtagaggggaccacatgcacacctatgaggagctctgggatacgcacggtgcccaaggcaggtcaggctgcaaaggtcctaaaggttggaggtgtgatcccaaaccctccaggcacaagccagccaagagctgtgtttttagcgtttctttcagtgagagaaataagttcaggatgtgaataaccatgacgcaggagagaatggaataagtaccctaagaaaggggctcggctagggtttacaagagggaggagggagcatttaactggtgacttctggaacaattcctgaaggaagcagcactgagtaggggcttctcttccctcggctcacaagtgaccaagcgatcctccctacggattaagtgaaacacacattaccatgattctggttttgcaggtgaggaaaccccagcttgcctaggagcacatatctctacaagatggggctggactcacatctatctgccccacgcccacctgcttaacccctgttaagcagctgttctactcatccagaatgaaaatcagagccattatgctgcggtcacatccgctcatgcctgcccaggtgcctaatggcaaagccactaaggcactgagaagtcagaatgtggatcacatcttccgtccttcttcccagtgtgtgaatgcatcatgcgtgggaaagagagagaaggaaccattcaagcaaacagaactccaggaagacgagactgtgccggggttcttccatctgcccaagtagaaatcagaagggcaggggacccacagccttatcctacccaccactgccgtcatagttgggggacaggacacatcctttggcccttctgcactgcatagaggctaaggagttctgtaaaccacacagccacgctgaccaagaagtcgctttcaaggtaagtttctcatcaacaggactattatttactgaggatctcccatgtggccaaggctgtaggaggtacttagctacgccacgtcattgaactctggcagttctgcagggtaaggtattttctccatatgacaaacgaaggaagcccgtcaacaattccaaaatagaatcaccagggatagcatggacaacgcccatggtgactgccgcgctttaaggtttaagaaaagtaaaaactgggggtgatgactcattcctgtaatcccagcactttgggaggctgagatgggtggatcatttgaggtcaggagttcgagactagcatggtcaacatggcaaaaccctgtctctactaaaaatacaaaaattagccaggtgtggtggtgcatgcctgtaatcccagctactcaggaggctgaggcagagaatcacttgaacccaggaggcggaggttgcagtgagccaagatcgcaccactgtactccagcctgggcgacaaagtgagacactgtcttgggcaggggcggtggggaacaaaagtaaaaacaatggtctgggaattcatatttctgggttccaatttacattctaccatatatactctgattaacccctagaattaacccctagaattccttacagggttctgttcattcatccaaacaggcaaacatttgcagagcatggagcacagggtaagccaagccagcccaagctctgataagggcaaagacagccatc

SEQ ID NO: 916918 - DNA, 4001 bp, Homo sapiens
ggaattcttagtacaaaaattaaagttttaaattactatgcaaaaattgtgtattcaaataatcttaattaggaaatacctccatcgatgcatatatatcaggtctctctaatgtctgtccctgatacaaaattattttgagggacgttttgtgagttacagttcctgtggtcagtaatagcagtaaggatgcaatatgagacaaggagtcaaaaatgtcatttctagtctctcttgattcgaccacattcaatctctgggcttgagaatgtcatctaacttctcttagcctatttcctcacatccaaaaggaataacagttcccacttcaaagtgttgtttcgtggctcaaatgaaataatgcatgtgaaagagtttaatatgctacaagacactgtaatataacataatattaaagttacaaaccaaatgtggtggcagtgtggttcaatgaggaaaacgcagatatagtctagcataaagaggaatcagcatggctgaatgctttacccactcatgaccctgggtgagtctggcctgggttccctcatttgagaagtgagaatgattaaaacgatcccatcaggacgatgtggggattagaaataatatgtgtcaggcctctagcagggcgagcacacagtaggtattcagtaagtggcacccgttttacattaaagaattcatttaatcaagccaagtatgctacatgtttcaacactcacaacagctgagtactgttcaacttagaacagtacatccatcggtggagtcccaaatatacttctgccatggccagcgccctgggtttatcccactttagactccagtggattaaggctgtgcttgctgtattcgcatttcctgccttagcccatcatttcaggaaacttactaatggagcctcagtttaaaacataaaatgaatgctactcaatgtggcaactccaagtacaggctttctcctctcctgctttcactagatgaacttaattcactttttgccacttgtttaaggacaggggtggggtctgggtaacaggataaggaaaaagcccgaatgaatccgctgttgttattgaggctgttcagtctgaccaaaataagcagcttttgaaatgaactccccagctccagagcgtcagagtcaggccccgtggaggcgctgggagccgcgagcaggagaggggcaggagccctatcgcgtccagccctgccccgcccgggaaaacccagtgccccacgcatcagtcaccgagcagagcgcgagttagaagagtgaacccggggaagggcacatgcagctgggttagtctcaactcgaccatgcgacttcgcattcctgtttggcaaacgcgcttaggcaaaacagacttgatgcttacaatgatcccagcccaaaatggagtgtccctgactagcagggaggagctgatgctcgccatgaggaagcccaccacggtcacggcgatgcccagggccagctgcagcagggcgagcagcagcgggaaccggcagccgcagcaggtccggggctcctcctccccgcactccttgggggcccccgtgcccttcttcggctccatgtcgtcgggcccagcggcgtccgcggccggcgggcccccctgcctctgctggccgcgtggctgcttgttcttgcccatggcgctgcgaggctgggtgggtgggtgggtgcgtgtgcggcgccctgggccctggagcgcggcgcacggctggctcggcctgccctggtattcgaattatggaggctgaacaaatatggaaaacatttggagccgactcaccgagcctccaaaggccacggggagcccgcagcagaggggggattcgaggggggtcgccaactgccaacgcgccgggacgcagcgcctgccgggccccgggcaggatttgcaggtcgcccgcggaaaccggcgcgggtcccttggccgcctgaacctctgcacttcagacaggctgcgagtgcgcgcgtgtgcgagtgcggggcgtctgttttcctcactcaaaactccaggattgttttggttttgctttctgtgaagtgcaatgcaaggtgatgaatgttgaaatcgtttgagcttaattaatacacagtttaatccaaaataggcactgctgggctctaagctgcgaagtcatttccagaagttaagtcgttgttactttcctacagaggcacaggctcttttcttcctactttctgtaatccagctgacaaatgaataaaggcatttttcgcatttaggtgtttttgaatctttctaaagatattggactaattgtgaactctctttcacatatgttattaattattattattattttccaaacaggggctcactgtgttgcccaggctggagtgcattgtcaccatcctagctcactgcagcctcagactcctggactcaacagcttctctctcctcagtctccaagtggctgggactacaggcaatcaccaccacatctggctaattttttaaaatttttttcatagagatgggatctcattatgttgtccaaactggtcttgaactcctggcttcaagggatcctgctgcttcagcttcccaaagtgctggaattacaggcgtgagccaccatgcacccggcctctcacgtgtatttgtttttaaaagctctgttggctcacgcctgtaatcccaacactttgggaggccgaggtgggcggatcacaaggtcaggagttcaagactagcctggccaacatggtgaaaccccgtctccactaaaactacaaaaattagacaggcgtggtggcacgcacctgtagtctcagctactcgggaggctgaggcaggagaatcgcttgaacctgggaggcagaggttgtagtgagccgtgatcatggcactgcactccagcctgggcgacagagcaagactcctagttagtcttcactcatctccacaacagtgcttagggggattggattgaccatcttagagatagacgcttttactcagtcaatatttaagagttatttttaaagcacctacaatgtgctaggatataaagatgttcaaaatagacttggtcctggcccagagtcacagaagaaatcaataaaactgattattcttattcccgcatacctctactcagtagcacttagagcaaatttcagcgaaaccactaaaaaatgatcccatcactttgggggtatttatatctcctttggtatggtcattgtaacattcagaaagctatattcaaaaataagtgatgttgccaagatgttaggataaaggctactcctagcttgtttgctattggaaaatttaaagaaaatccaattccctgctgtttgctttagaattagaaactaatcatcatcagctctttttgtaaactgccaagtccccacaaaagtaactttgaagacaaaaagtatgtacttcacccttacttattttatgaacttaggtgttctccttatgccttccatctggaccagtgagaaaaataatggttcagggaacaaatacatttgcttagaaaacagaatctaaaccacacatcccagttccatgcagaggcagtagaaatagcactcactcttaccagaaaaacagagtggctgaggcaagtttatggtcagctttggggccatcacaccacaagggctttctattgtgaacagacaaataaaaactggcgttataccaggacacccacctgacttgggcctgactgagaagaacccaaatgacaaaacaacaaaatgcttggttttcctatggaaatatggtaaatatttatagaaagtcaattgactacctggaatcaagtatgtattgttattaacaatatagctacctattactgagtattctgtaacaaacacatgacaggtgctttacatattttattgtcaccccttataaccaccttataattatagtttccacttttaaagatgaaaaaatttgagtatcagaattattaagtaattggatt

SEQ ID NO: 916919 - DNA, 4001 bp, Homo sapiens
tttgaagctgcaataaaggaaggatggggaacacatttgcaaatgatatttaaaaacactgaatgaaagagcttcattctttgtttgttttaattcccctggcattaaaggacagacatattttccccctgggtatgtggatcgtcattgaggtgcctgaaatacccagtatatcttactgaaaagctatttttaaaatcacttgatttagaaaactccaatcatggtaatttcatgggaattcttagtacaaaaattaaagttttaaattactatgcaaaaattgtgtattcaaataatcttaattaggaaatacctccatcgatgcatatatatcaggtctctctaatgtctgtccctgatacaaaattattttgagggacgttttgtgagttacagttcctgtggtcagtaatagcagtaaggatgcaatatgagacaaggagtcaaaaatgtcatttctagtctctcttgattcgaccacattcaatctctgggcttgagaatgtcatctaacttctcttagcctatttcctcacatccaaaaggaataacagttcccacttcaaagtgttgtttcgtggctcaaatgaaataatgcatgtgaaagagtttaatatgctacaagacactgtaatataacataatattaaagttacaaaccaaatgtggtggcagtgtggttcaatgaggaaaacgcagatatagtctagcataaagaggaatcagcatggctgaatgctttacccactcatgaccctgggtgagtctggcctgggttccctcatttgagaagtgagaatgattaaaacgatcccatcaggacgatgtggggattagaaataatatgtgtcaggcctctagcagggcgagcacacagtaggtattcagtaagtggcacccgttttacattaaagaattcatttaatcaagccaagtatgctacatgtttcaacactcacaacagctgagtactgttcaacttagaacagtacatccatcggtggagtcccaaatatacttctgccatggccagcgccctgggtttatcccactttagactccagtggattaaggctgtgcttgctgtattcgcatttcctgccttagcccatcatttcaggaaacttactaatggagcctcagtttaaaacataaaatgaatgctactcaatgtggcaactccaagtacaggctttctcctctcctgctttcactagatgaacttaattcactttttgccacttgtttaaggacaggggtggggtctgggtaacaggataaggaaaaagcccgaatgaatccgctgttgttattgaggctgttcagtctgaccaaaataagcagcttttgaaatgaactccccagctccagagcgtcagagtcaggccccgtggaggcgctgggagccgcgagcaggagaggggcaggagccctatcgcgtccagccctgccccgcccgggaaaacccagtgccccacgcatcagtcaccgagcagagcgcgagttagaagagtgaacccggggaagggcacatgcagctgggttagtctcaactcgaccatgcgacttcgcattcctgtttggcaaacgcgcttaggcaaaacagacttgatgcttacaatgatcccagcccaaaatggagtgtccctgactagcagggaggagctgatgctcgccatgaggaagcccaccacggtcacggcgatgcccagggccagctgcagcagggcgagcagcagcgggaaccggcagccgcagcaggtccggggctcctcctccccgcactccttgggggcccccgtgcccttcttcggctccatgtcgtcgggcccagcggcgtccgcggccggcgggcccccctgcctctgctggccgcgtggctgcttgttcttgcccatggcgctgcgaggctgggtgggtgggtgggtgcgtgtgcggcgccctgggccctggagcgcggcgcacggctggctcggcctgccctggtattcgaattatggaggctgaacaaatatggaaaacatttggagccgactcaccgagcctccaaaggccacggggagcccgcagcagaggggggattcgaggggggtcgccaactgccaacgcgccgggacgcagcgcctgccgggccccgggcaggatttgcaggtcgcccgcggaaaccggcgcgggtcccttggccgcctgaacctctgcacttcagacaggctgcgagtgcgcgcgtgtgcgagtgcggggcgtctgttttcctcactcaaaactccaggattgttttggttttgctttctgtgaagtgcaatgcaaggtgatgaatgttgaaatcgtttgagcttaattaatacacagtttaatccaaaataggcactgctgggctctaagctgcgaagtcatttccagaagttaagtcgttgttactttcctacagaggcacaggctcttttcttcctactttctgtaatccagctgacaaatgaataaaggcatttttcgcatttaggtgtttttgaatctttctaaagatattggactaattgtgaactctctttcacatatgttattaattattattattattttccaaacaggggctcactgtgttgcccaggctggagtgcattgtcaccatcctagctcactgcagcctcagactcctggactcaacagcttctctctcctcagtctccaagtggctgggactacaggcaatcaccaccacatctggctaattttttaaaatttttttcatagagatgggatctcattatgttgtccaaactggtcttgaactcctggcttcaagggatcctgctgcttcagcttcccaaagtgctggaattacaggcgtgagccaccatgcacccggcctctcacgtgtatttgtttttaaaagctctgttggctcacgcctgtaatcccaacactttgggaggccgaggtgggcggatcacaaggtcaggagttcaagactagcctggccaacatggtgaaaccccgtctccactaaaactacaaaaattagacaggcgtggtggcacgcacctgtagtctcagctactcgggaggctgaggcaggagaatcgcttgaacctgggaggcagaggttgtagtgagccgtgatcatggcactgcactccagcctgggcgacagagcaagactcctagttagtcttcactcatctccacaacagtgcttagggggattggattgaccatcttagagatagacgcttttactcagtcaatatttaagagttatttttaaagcacctacaatgtgctaggatataaagatgttcaaaatagacttggtcctggcccagagtcacagaagaaatcaataaaactgattattcttattcccgcatacctctactcagtagcacttagagcaaatttcagcgaaaccactaaaaaatgatcccatcactttgggggtatttatatctcctttggtatggtcattgtaacattcagaaagctatattcaaaaataagtgatgttgccaagatgttaggataaaggctactcctagcttgtttgctattggaaaatttaaagaaaatccaattccctgctgtttgctttagaattagaaactaatcatcatcagctctttttgtaaactgccaagtccccacaaaagtaactttgaagacaaaaagtatgtacttcacccttacttattttatgaacttaggtgttctccttatgccttccatctggaccagtgagaaaaataatggttcagggaacaaatacatttgcttagaaaacagaatctaaaccacacatcccagttccatgcagaggcagtagaaatagcactcactcttaccagaaaaacagagtggctgaggcaagtttatggtcagctttggggccatcacaccacaagggctttctattgtgaacagacaaataaaaactggcgttataccaggacacccacctgacttgggcctgactgagaagaacccaaatgacaaaacaacaa

SEQ ID NO: 916920 - DNA, 4001 bp, Homo sapiens
tatctttttaatcctctttccaggaggaggcctgagaaggagatggaaaccatatgtttaaaaagtttttaaaaatgtatagatgctcctgaatatttgtaaataactgcagtgaaaaatgtttacattagaactcacctgcccttgcactgattagaaagatcctctacagagcagaggagatcatttccaaccacccagaccactacaatcacaggaagaagccaacagcagcatcttcagccccagagactaaaggtgaaaggggcacctcgcagtggtggaagcacccgtgtgttccctcaacatgcctggggaggtggagaggaaggggaagcagctctgccttccctccaatctaactacacaacccctgctgccgtaacttatttttagacatttaatctaaaattcccagaaaggaagcggatctacaacctctgagtgatcctcagagttctgatttccaacctggcttgggcattttgtttgttttctgacttcaggtgcctacttaaagtacatctcccatcttccagaggcatccacagcctaagccaataaaaagagctgggagctttggagctttaagtgatgaaaaatccagcacccacaggtcaaaagtaatgaccttggggaagttactcatccttctaaagaatcaatttgtggtcaacaagatgagataataatactagacagctgttcgagatttcaacacaaaaattgcacagtatcgtctcttagtagacgtcagtcagtactatgcacttgctgtgggcacactgcgcaaagctgcgggatccgtccatgtttccactgcccatcactccgacgttggggacttatgttaccgactgtgcactccacctcggggagatgccttttacctgcttcttgttccctacagcttcaaatgtctgcagagcccaagaggtaaattcttattaagtgcaagagactaagttatcctgggttctccttccctctgttttgtttatccgtaaattgttaaataaaactccgctttgggaagaaatgcgtcgagtctttacatgcgcaaagcaggtgtctgcacatctctggggatcaggggtggggaaggaaccctgactaaagtctccaggttgggaatggcacaaatggagggaaaggacatggaagagcggatgaaagggatgcctctgcgagacggtgcaaggcggtcctcgccggtgaccctgtcctctgcactcggggaggaaaggacgctagaggggaggagccgcgagggcaggagtacctgaacgctctggccgcggtctggttcctcctccacgccgtgccctgttgcagcaccccctgcacgatctctttctcgttgggcagccggtagacggggaagatgtagagccaacagaggaccacgacacagagggcactggctcccatgggcagccgggtccgcgggaacttccacgccagtacagccatggcccctctggacgtttgtcgccgggcccgcccgcaggggctcatcgcagccccggcgtcccaggggcgggggccggggcctcagcacaaagctaggcgaagtggcagcggagggtcccccaccgccagccccccatgcacacacacctttggttctcttacttgcaaacgcacgcacgcttcttcggccccgtcggccccaaaggtcagcgcaaggattttttcaaatgcaacttttccaaggatttctttctaggggaagtggctgggggtgaagtcacgatctatggccatggtcgcttcccctgcagaaggcgggcgctggggtctccgagtgcgcagagagcggcggcggcgagtcgctcccgccggttctgcagcatcacggtcgccctcggcgagggtccgggagaaggctcggctccctcctaaacatgtggcccgtggcgtccccttgtcccctccgagcgatgctcctgcgcccttcgccgcctcccgcgctgctgcgccgccaggcaacccccccccccccaccccgccccgagacgcgctctctgcgccgcaccaagtccttggaaatttccacggcggcccgggaccgctatcctgccccgggctcctccgcctcgcccgccgggaccctcgctccccacccctcccggagaagaaaagaactcgctctcatcagttaattcagcggcgcgccgcagccttccgctgcgccccggacttcgcagacaaacgcccggggattggtggaaatcaaggtctccccctccctcccccacccgcaaaattgcctccttcgacccgatccgagccgcgacactcgcccagagcgcgcacccctcactcgtgcccttgttctttggagataacggcagacaataaaaaccaacagccccccgccaatagaaatatatcagtccctgagtgtggcggagactggctaatatcctgatccttcgacaagcggccggtgtgcccaggctgtcaccctgctgccgtcaccctagtctttctctagctggttggatattaacccgcagccaggcgcgaggaggctggcggagatttattccttcctgggcccccacccccattagccggtcccggagccgcggcccgtgtgtgtgcgcgcgcgcccgcacacacacacacacacacacacacacacacacacacacacacgttcacgggcgcaagcgagcgcgcgcacgaggaggtgcgtgcactccggggtcctccgcctcgcctcctccctgaaaggaagtgctgcatccagatgtgcaggcagctggtgcccaaacactagacctcaagatgtcacattgccttggaggcgcgcggccttttagattaaaggaccgttggttcttagacgtccttcttgcccttcttgcttgtgataagcgataagcttatcgcaaccccgaccttggaaaagcaccacccgccttgacccaccgagccgagagagtcgctgttagccatttctgctcgccccggcggccgacgcatagctcgggtacctcctagcggtcgcctattctatttgcttaagcatctcgtcaagcataaagtgtgcaaggacaaagaagaaacctggtcagcttagtcatcacgaaaacaaaatctaaggctataactccatttgttcagccgaccaggctgcggtgtctggtacctttgtctagcatccgtctccactgagaggtggaacttgagaagttgatgcaaagttatttaccaaaagcgaagtagcatcccagatgaccactttagtgtcattttctcaacaatactgtgctcttagttgagtgacctactgccctccaccggcaggcatgccccagaaatctctgtcctacttaggtaaatcagtagagacaggggaaaccttgaaatcccagtcacatcttaccacagtggaggctgatacagattctttaaaatgaagatcatcttaagtcctgcaaagtaaccagccaactctcttctatcctggaaaaggggaagggaagggggagcttttcctacttgcctgggctttggataaatcatctgccatctttgatcttataatttaagtaaaacacaaaccattcccatttttcttcctcaagttcaaggactatttgtagagtaaataacaaagaaataaactgacaaacaaaactagggcatattacagttatgaaggggctatgtaaatgtttccctatataatatcataagaatgcattaaagtcatgctttacatcaaaagatctgtgtgacacaatgtgctgtttttctttcttctgcaaactaagaattctcttaccttggtgggcttctgcccacccaacaatccaaacttattccctgctttttcttaacatgagcaccaaatctaatcaggtcatcgctctcacccttccaagtcacactacattggtccgttctcacattactataaagaataccactgagactgggtaatttgtaaaggaaagaggtttaattgactcacagttccacatggc

SEQ ID NO: 916921 - DNA, 4001 bp, Homo sapiens
ttctgtattatcccacagctcatccacgggcctaataataggttggtcgtggtggaaatgtcaccactgcttctaagttcattgaaatatataaagcctgcataaaaagaaactttacatcttcagaacgattattggttatgcatccattcaaaggtattatcttatttgatcttcactgctctgaagataagtagggcaggtatcatcatcctcattttagctggaagaaaactgaggtgaggggtgttgcagtgacttgcccaaggtcaccctgtgagttactggtcttgtgattccttgattagccctttctctttcctgcacctgagtggagtatagaaaactgaaatttctatttttaccaggagttttcatttggtgatcatcatgaaccaaaatagcactagaaggttctttattgagtaataacaaaagctacacttagatagagtttgaattaacctcctttaattgtcaggacaccttcacattttttttgaaagcaagcttttctttacatgagggtttcacatttggataagtatgtggggttacagtactttgtcttttctttctttgtgggctagatttaaaaccctcttcttaagaaacatcttgaccttcaaattgcccttttcaaatgaaaaggctcattgtctgtctcatacagtattgacaaagttgtcctctctgaaaagtaaattcagcttatttaaattagttaaggtctgatttctgtgtgaatgcaaacacttggtgataatgatgatgatgatgatggtgattaagaagatgatgatggtgatgataattactaccatttgtggagcactgtcaggggcgagactgaagcttgaagagattaaaaaacgtgctcagggtcaaacagctgtggacgatcatgactgatcctcagacctatttgttaaacagaaaaatgagatccacagttcaaactcacccctaccaaatttcaaagctggagcacttagccattaggccatcttcccatattttcatgaaaacattatcagagcatgcagccaactgtaataaaattggtgttgataaaaatttgcctggcacaggtgcagaatcatggttaagattcattcttgatggatcagaaatcacatggtgtctcactgacagctggcctcactctgtgatgacacctcggtgagcttgcttgagggttcggtgtgctgatgtacttcataggggctactggtaagacctccctgggaacttttactacagctctgtggaaggcagaagagatgaaagggtgaaggcctgatgattttggaaatatttctgatacttgtgttccttagtgagatatccaccctggaattccccagaccatctctccacagccatagttattttctagtcaggaagatgggatggtagatattcacagtaatgagactactagaacaaatgaaaaacaagacgccaacagctgcactggaaagaggatcgttagcactaagattagaggtcccaacagcagcggggcgcttcagtacaggaagagcaacaagtgggttagcacaccttcggaaagatggtgcatcacaattaggacttagtctccaaaaacattctctgtattttataaagtccagatttcaccctttacccataacaacagaggaaaacgacaagcttttgaacatatcatgacaattaacaaatgaaaaaaatatgtaagtctcctcttacctgccctgtggtttcagctggggagcagaaattttgtacaaccaatccaagacaaaaaattactaaatgttgtagcatcatgaggaaatatttgctccttctctgtgccaagcacctgtcaggctgacttagctattttaacttagtttgataaactcccagtgaattctttctcatttcactgtttacttttaaatcccttcctttcctttttcctagatcgaaccaggagataggtgagacctgccttcagaaaggaaaaatggcaaatccaggagtcttggtgaaattggccactgtaaatggtctatatatcctgctgaatgacaggatatcctgcaggggctgaggcagaggcttggcccgggatttttgtgcctgcgaagctctcagaacggtcctgcctctcctctactctgccccctcctctagtcctgcctactgctgccctgcggccctgtcaatgtttccacaaccacgccatggaacactgcaggccttttggtgccaatgcaaaggtccaagcttgctgtcgagcggggttgggggagtgcccataagtgagcacggtcccaggtatggaatgaatgttgcagaaaccttgcaggaggtggtggcttcaccctggataacctctactgcaaaaaaagtctccttgcagatgctgacaggtgggtttttgactcattctttcttcttttccatgccacttcagtaacaagtgactgagcctgtaggttcaatcttaccctttaagttccagatctaaagccaccccttccaggaagccttcctgtgctgcccctccacaggaccctgaagatgctcccacaattttgcacataaagccatgaaagccgaggtcacatctatctgtctgtctcccatgcccagctatgaatgccttgaggacagaagaatatagcctcatcttctctgtaccccttgattcctagagcagagacctgcacttcaaaataatgaaaacagttaaggatagtagccatcactttttgaaaacttactacatgctagtcactattctaggcctctccatggatttagttgtttaattctcacagtacttggtaaaacaggatgattcttctcattttacagaggaggaaactgaggcagagaggttaaggaatttatccaaggccacacagctaataggtggtaaatctagtattcaaactatgtggctccagagccagtactgtcaaccactgccctctgctgctgaaacaatcaatatttaatgaataaataaataatagatggtattctcaattctattggaaaccatgatggaaacgtgtcagacccagcaccaggaaggataaggtttggacttattaacaaaccagggcatgtctcatgacactaaattaaatgggagattcatgcacttacagatactaattttggttaaatgatcctttatttctctacaaagtttctctctctctctctctctctccccccgactcctttcaacttttgaaacaacatttataatgaccgataatctaggaaacttttccaacataggcccctcagaggccagcccagaaacctgggtggggagctcaaaaaaaaaaaaaaaaggcctaatgcttagctccactccagaataaccaaatcagaatgcctgggagtggcgcacaggagaattttccaaagcttcctgggtgatttcacttgcgctggactgttgcttgaggagaaatggattatgattgtgtgaagccagtgagactttgatatttatctgttacagcagctgtgttaccttaaaaaatataacagggacataaattggatgcttctttctgattcttttctttctaaaggatgtagataaaaatctggggcttggaacaggctcaattccaggtgaaataataaaatgagcccatactagcatttcctaaataatgttttattaaatacaatttagttatggaaaatgctgtaggggtagtggggaagaattctctcgccagataatttgggacgcctgtctctcatgtccctttctcatggattggccatgtttgttagtccattgaaagttctgagaagtcctttaaaacaacgcaaccaaatgaaacaaaaaacagttcaactttgcttaaggcagcatttcccaagctttttagactaagggttgctttctgtttttgcaaatttatattggcaacctccagattctgtgttctatcagtgtctctaagggaaatgccatgttagactttagcagg

SEQ ID NO: 916922 - DNA, 4001 bp, Homo sapiens
agatgggcccacccccagctcccactgcctccccattggcctggggctctgggggaagttccatctcctttgtccctgtagaacccttcctgagtaactgctttagccgctgtagctgagggagggagtgaagaaaacccaatgttaaaaggacttgtcaccctctctagagtaggggggcgctagagcaaactagacagttttctagtttcaggcaaggaatgtaccccaggattaggggggtattggtattggggactgcaggtgctggccagcaaaaaatgagtcacacacaaatgagatcaatttaagcactcttcttcagctgtaatggcttcccagccccccacacccagtggtcagaggcccagactcaccccactttgccgagtctctgctgggaaggagggcttaggggactccagcacctccttttctgtcatcctgcaagaggttggaccccactatgaaatctaatccctttcattcttctctccctttctgtcccttgcagtagggtggtcctcaaaggggaggctttcggagaaatgtgatgagagattttgctgttgttactgttgagatggggtctcactctgtcacccaggctggagtgcagtggcgtgatcatggctcactgcagcctcgacctcccagcctgaagcgatccccctacctcagcttcctgagtagctggaacacaaggtgcacactacctggctacttttttattttttgtagagacatggtcttgctttgttgcctaggctggtcccgaactagctcaagcaatcttcctgtttcaacctcccaaattgttgagacaggcgtgagccactgcactgggccaaatacagatcctttggcaggttttattaacagatttcatggaggtctagaaaaaagcttaacatggccgggtgtggtggtgcatgcctgtaatcccagcactttgggaggctgaggcaggcggatcactagagatcaggagttcaagactagcctggccaacatggtgaaaccccatctctactaaatatataaaaattagccgggtgtggtggcggacgcctgtaatcccatccactcaggaagctgaggaaggataatcgcttgaacccgggaggcggaggttgcagtgagccgggattgtgccactgccctccagcctgggtgacagagcaagacttcgtctcaaaaaaaaaaaaaaaaaaaaaaaaaaagcccaacagactaaagagcttcccaattagttcctcaaactgatactcatccttccatcctgaggggcgaccccatagtttacagcccttacacagtgttcaaagctgcgtggtttacgtcattttcctataggtactttgtttctcctggaaatctgtgggcaacagagatgtgatgcataccttcccagatctcctctcttcaagaggtttaatgtgtgtcctcgtgtgcacacaaggaaggatggactggagacatttgtcctcccctacttttttcttgagccctgggggccctgtgcctagttctgtcccagcctgcctcagggctcagctattttaagttttcagggtaatatgagcctttccttcccttactacttcattcccttcaccccacccccacccccaccccccgcttcaatccaaactcatcctagagtagaataataattttacgcctaaaacccaaaagactcacagacaaggagagaaatgaagaagctgagtagattatagatcagggcagctggggtgagcagtcgtggaaatcaagaggatgaagaggtaacttacgttcgggattccctaagtcagtccacaggctgtagagggagctgggagcctcgaggccttgatggtggtgctggggaaaaactggtcctcttccttgggggctaagcccccccagtaccccctgtgttcacaccagctacccagtcgctatttgtagacctcctagcctcctgccttggtgtcagggctgaaatgacagggctggaggaaagtggacagctgagaaacacagctgacacagagaaattggacactgagaggtctggggcagggccggaccctaactcctcccaaccccctagagctgctgttccttgattcttcatctaaggcgaacaggtgaataatggctgaattcaggaagggacagtttctgttcatgctcatttaacatttaaggggagtttatttttatttttcatttattttttgagacagggtaaaaaaagactaatttgaactcatagagctctcctatcagccatactagatggcttttttttttttttttttgagacagagtcttgctcttgttgcccaggctggagtgcaatgaagcgatccgggctcactgcaacctcccaggttcaagcgattctcctgcctcagcctcctaagtagctgggattacaggcgcccaccaccacgccaaggtaatttttgtatttttagtacagatggggtttcaccatgttggccaggctggtctcgaacccctgacctcaggtgatccgcctgccttggcctcccaaagtgctaggattacaggtgtgagccaccgtgcatggctagattgctttttatctgtaggtggttggaggagtactttgctatcctgtaagaaagtgaagaatatgtagtattgcttcattccctccagcagctcccagagacatctccccaccctccttcttgtaaaattttgtcctcagactgaagggaattaccagggctattaaaaagggccagttaacactggacagaagcatatagctgccacataaggaattttttaaatcatttctaagtaatgtccccttcctcatgagaactgcaaactcttaaaggtaggatggccaaccctcacacttcctaaacccttttgattccctgattccatctcccacctttgatgcctcagtatataactgatggatcaaagagacagatgccattctcatctcacaggggtgcacccttctactctttgggctgtgacatggatgaaagaggagatactcccatctcaggggagagcaatttagaggtggcaatgcagtgctgctctattccttgtatctgtaagaaataaaggactgtgttggagactgggtcaggcaagctcctgtaggatcgtcgttagggatacagctacttggacccaagagatttccagggcaacgtgctttgtcattctcacccactacttttttctatttaaggggggagtttgaaaagggggtgcaggatggttctgactctgcaggttctttaatggccctgctctgacaggctgcagaacaacagggcttgctttgagatgctctaaaggaaaagctccatcttgcaggcaagatgacttctgctcttcgtcttttttcagccacataggacagggactgctgagcatgtttggataatacagcatcttggcactgcgagttcagttgctgtagctttcattgtaataaaaatctgcttctgtccctgacaggtaaaacccaatcctccagctttaggattaaagaaaggcagccaggcacggtggctcacgcctgtaatcacagcactttggaaggccgaggcgggtggatcacaaggtcaggagttcgagaccagcctggccaacatggtgaaaccccatgtcaactaaaaatacaaaaattagctgggcacgatggggcacagctactcaggaggctgaggcaggagaactgcttgaactcgggaggtggaggttgcagtgagccgagatatcgcgccactgcactccagcctgggcaacagggcgagactccatctcaaaaaaaaaaaaaaaagaaaggcccaagttctccatccctaaagggttttcagaagacgagctgggctgggagtggtggctcatgcctgtaatcccagcactttaggaggccaaggcgggagatcacttgagcccaggagttcaagaccagcctgggcaacatggtaaaaccctgtctc

SEQ ID NO: 916923 - DNA, 4001 bp, Homo sapiens
ttctttttttgagatggagtcttgctctgtcacccaggctggagtgcagtgacacgatctcggctcactgcaaactctgcctcccgagttgaagggattctcctgcctcagcctcccgactagctgggattacaggcgcccactaccatgcccagctaatttttgtatttttagtagagatggggtttcaccatattgtccaggctggtctggaacttctgacctcaggtgatctgcccaccttggcctcccaaagtgctgggattacaggggtgaaccaccatgcccggccacctgaagcttttttaggagccaaatctttttggtggtcaggtaagtacaccatataaactgccctccatataggaaggaggagctccattctagaagacatctaaatgctgtgcaatgggtggctcaatcccaagaatatgacacgtttatgacctgtgaatcttgaatatgattataggttatcaactttgtgagatcctgaaacttcacttaaaattgttgcctgtaatcccagctactcaagaggctgaggcaggagaatggcttgtacccaggaggcaggggttgcagtaagcagagatcacatcactacactccagcctgggtgacaaagcaagactctgtctcaaaagaacaacaaattggtttttgcctgtcaccaagcaggctgtcccatgcatctttctccccactgttccctgctcactgccagctggtgtctatttaggaaactgaaacttatgcttgttgcagcctgagcctaacagaacagaattcatgcatatttgtggtctaaaaaggtcacatgattttattacaaaataaagagaaatgcttggggtgggagagtcttctactaacatgaataacatcagctgcctttctacctccagcaggaacaagggaagggagggattgggcaggggctattttcattttaactcttttagtagtgcttgatttttaaaactatgtatctgtattgcttttatgataccaaaaaaaagttaaaaaaatgatcaggtggccaggcatgatggctcatgcctgtaatcccagcactttgtgaggcccacaagacgagaggatggcttgagcccaggagtttgagaccaagcttgagcaacatagtgagattccatctccaaaaaaaaattaatgatgaggtcccaattcttgaggatttaagtgtctgatattaaaggagcaagtcagcaaagattcaaatatgaaaacaaaacaaaaaacctggtctccccaaatggattgcaaacactgaggttaagggctgaaacaattttttctcattatctctcattcttaggcacatattttgcactcaagaagcttttctgaaatgaactgaattttgtgtgtgaccttaggcaatcgtttcatctttcagtagcttatactttttaacaaaacaaggataatagatttatctatctttgtttttagatttatctatctttgaacatcgttttttggtgaagataaaaaataatgcagagcagagggaaaaacgtcagataccgaaccaacataacaatgccagattccgggtctcggaagctgcagggcagttttgggagaggggcattagggttagggagataggctggacagaagaagatcgaggaccgagcaggcgacagctcctatttcaatctggggaccgaagctaccctctccagggggtaacccctggggccagtcgcccttccctcggaggaactctcactctcacccccacccctaccccagcacaccctctcagggcccgtacctgattagggttgcagtccccgcgccctccaatggctctggtcgcgacttcccgtccctagtatgagctcgggtactagaacctcgcgccccgcctacaacttcggctaacccccctcggacccgcccccttgtagttggcagcggaagtccggagcggcccccattcccagccgccaccccgacactggctgccattcagtcaagcccttcccagactgcgagctcactggcgccgccgcaactccgcccctccgcagggcgggacaagctgagccgaaaccacacctgcagcttcagcgattggtggagaagttcaagtaggcactttctacgaggggaggagtccaattagtggactagcccaagactgaaacagctgattttcgagaacccgcgcgtgagccccggaaccgaaactagcttgaggagcctggagacgccaagggctccatgggaaggggtgggaccggaatttcgacgccttgggataggaagaggagggctgaggtaatgaaaacaatttttttttatttttattttttgagacatggtctcgctctgtcacccaggctggaatgcagcggcgcgatctcggctcgctgcagcctcgacctcccaggctcaggtgattctcccgcctcagcctcccaggtagttgggactacaagcgtgcataactccgccaggataattttttgtatttattgtagagacggggtttcgccatgttgcccaggctgatcttgaactcctgacctcaggtgatcatcccgcctcagcctctcacagtgctgggattacaggcgtgagccaccgcacctggctaatagctatttattgaaagtactgtgataagcattttagattcattgtatcattttaaatttacagggcaactcattgaggttaaaatcattctatctcctttagaaacttcaaaactgatcttagttcaagaaagaagttactattcagtgatcaccgaggctctaacaagtggagcctagattcgaaaccaaaccctgtgacttcaacacccaaacatttacgttcttacgttttactgtacagccttcctcctggataaatcagattaaaattttgaagacatgtatatagcttgtcagggtagtacagttattaattctgtggttaccacattcttttatatctcaagactcccagccccaggatctaagtcatagctcttgattatggcccacccccagtagggagctgaacttactacttctgatatgaaagaagccagagtagttgtttcttccaagtcactcacatctgagatggccctcaaaccctccttggtggtctccggctgagagatgtttgcgtctttctgatcttggtaatactggatcaactgctgaaccccagaccttaatgcaggtttaagtgcagcactgatcgctagacccataggcccccctgacatcccagccatggtcatcagaaggtcatatcccagatctatggccccatctcggcctcgttccctggccttgcccaggcagttttgagtagcataatacaaagctgtgcccaggttgtagaaggttcccactcctggcagcagctggactacattgtgcacagcttgctccttctcattctcacagtcctctgtcgggagggagcgcccgacccttcctgtgctttgctgctccctggctaacagctgcagagcagaggccagggcttccactgacacgttcctctctgtgcttctgcctttctggagccctcgaagatgctggatgaggacctgtgtagcattcacaccaccctggcggtagagctgtagctgtagagcccaaacatcagcctgacaaccagcttcctccagggcattccttagagccaggcttaccaagaacttgggtagaggggccatgtggctgaaaccaggcagtgactttgggtgcagaaattggcaggacaaggggtctgaggagggtgtctgggattccaaggacaagggaaagtgcatcaagacatttgtctgctttccatatgaagtggcatccacagggtgcagcaggaggtagcaaagtagcagctcaactggtatcatgatgagtctgaggccacgcatgtctggagcagagtaccctagaaaggggagaaatccgaaacatacaaaccatttccctaagggcgatggtgagcccaagact

SEQ ID NO: 916924 - DNA, 4001 bp, Homo sapiens
gtttctctactctgcccaaggccactcagtaagtgagtttggaaagcaggctttgaatctgagtggggattaaccatcgcactgtgttgttaggatcccttccaggggcaaatctgatcatcctaagaagtgggggaaggtgggaggagacttgaaggaggagaggtggaaaaggaaagtagagagaactaaggaagaggatggaagagactggaaaaaaggcgggtttagtaagctaggaggaaagagcctagaagagagaggaagctggagggctagaaggcaaagatgagagacgaaaacaggtagaaaggagaggaggggacagggaagtagaagagggggttgcatccccatttccaggttcagggaggactgggtaaccagtggtttcccaggggcctctcagttcacgtttctcataatatccctctcccagagatgagggagaggatgggatgacaactccccaggtctccccaaacccagtaaccccaagtcctcctgttgcacgttcagcctctcacctctcccaggcctctcagagggatggaaaatggagaggtcccttctctggacgtttctgctccaagaccttcatgcccctctttcctccagtgcccacttaccccagctcttttctcctcaaggcagaatccttacccctcctgctcaggttcctccaataggcctttctctagcccaagagagaaaggtcctctggagtgagtgggcaccgctttcctctgcatccccttgcagagtgaccagcctcctggcatggccctggctagaaatatccaacccctcttcttccccagccatcaggaggacacatttctccccaccccaacccataacaaggctgggtcgattggcttgaccaggacaggggcaccttttgtcttcagccccttgaaggggaagggagggaggagccacggcgtgaggggcggggccagtgttacctcccaaactcagaagggaagcgcaaggtctgggatcctcgtccgcccgcttggtggcctaaactcgcttatctcaacccctatctgcccgagtcctctgattgtgggaccacaggatcgaaagttaaaacagcttctctgagttgcccaatgcgtgaatgtggcggtgggggcaggcggggaggtggagccagttcagcacgaggagggttaactcggcgccgccgctgggaaatctcagcgtctacagcagccaagcgtggagcagttttgagggggaaattccccctcgtctgggccaccatgaggtctacatctggggcttgctcacgccccagccacacccttgaacaggaacctttagtggagggcaggataggggtttaacaaggatccactgccctctggcatcaaccttccagggaggggcggccacttcccccgactcagggcagaggggcactccttcacctcctttccctgactttccatggccctgggggtgcaggggtgaggctgtgaaaacgtgacccatgggggaggggagtactgaggcctggaccctcccagattcctccaggagttcgaaactgctaaaacccagtgccaccagccaccaacactagctgaaaccatctcttggggaccatccacccagccaggggaggatcccgagagctccccccacgaatccacccccatgcactcatagaggcccccgcacccacctcggaggcaacccctcacctcggcaacccctctgctgtcttctccctttctcagcgggcacttccaggccccataggtctgtagctctgtccagcgagttcaaggctggccctgctagcacctccccccttccaccaccaccaccaaaaagaaaaataagataaagcacacacatacatacacacacacacacacacacacacacacactcctctcccgtcctccctcttcagtgtaagcagtggctgccccagcccgctgtttccggcttctccttctacccaggtccctccctggagctctgacgacacagagaagagaaagtgggctggaggaggaagaggaagaaagtggggtgaatatgtgtgcctcctgtgccgagtgggggaacacgtgggggatcaggactggggtccaggccttggagccaggcttggggggaggctgacccccacttactctgtccccctcaaaagcatcagcttttctccagaaagtcacccaatatcaaacagagatttgccacccctaactgcctggctcccaaactcaaactctgccaagggctggggtttggacccacaagggactgggctccccagggcctcaggaaaagtaaatccctctggactctgcgctccctccagtggaggaccctaaaaagccgccagggagctcgatgccagccaactcctaggtccccctcccttccggcagggaacgccttagaggtcggtctcgtgaccactgacgggagggagtgggggaggggaaccctcagctcagaattctggaagactctaggagtcccttggactgaagctggtctttgctctctcctcacagggcacccctcctgagactgtggtgggaaccagcacaagccggagctgctgcctgcagattcacaaggggcaagtttgaatacgaatctgctgtgttcctatctgccaagttcctatatgtttctggggtaaacactgagacacgccaagaaacaaacacacacatgcacaacttccctgaccacaagactacacacacacacacacacacacacacacacacgtgcaggcaggctcacaaacagagcccattgcaatcacaacaccacacacacacacacacacacacacacacacacacacacacagtcttgctcaacttctgagtcatcaacataactagtggagggttctgcagtttttgctgggggaggagctggaggagaccaagggatccagagaggcctttactcccggacacctgagagccccggtgtgtggaagaggtggtgtctgaggggcggtgggaggaagtttctactcccctcctccctcccatagcaggggctgggctgaggggccaaagctaggcctatgctgccccctggtgcctgaattgatttccagaaccagctcctcctcctccatcccttgctaccccgcaggtctgtacatgagtgcacgtgtgtggacccagccaggcagcagagggtttgaacacagcaaaatatagcagttaaaagactggactgtggatacaggctgcttgggttcaaatcctgctaatgctgctaaccacacaaccctgagcaatttactctgtgattcattctcgtcatctgtaaaatggagcaaataagtcttaacccataatgtgagaataaaatgcagtaaaacatctgaaggcttagaacaatgcctgacacacagtaactgtcaggcactatttttatggttcataataaaccaggtatgaggaaaggagaagggtctccatcctacatagaagtccccagatttgggggtcatgttactgccaaaaggatattgagggtgtatgtgcgtatgtgtttgctgtgtctgcaggacagtgaatggaagagaagggagagcaggggtggaggtggcaggcagggactctgtccattggcttgtccaacaagccatgctaggatcaaggtgtgtgcacatacgtgttcacggcacacgtgctttgtatgtgctcccgagtgcccactctgcctgcagacatccacagacagtaggtgaagccaggtttcaccatctaagggtgtcagagctacaagtccccaaagacttggagaggaggagggaaaagagtaaatgtgatctctgactttggctccttttagggggtaggaaggcgaggagcaagtactggtagaaaaatagtatatattactccctctgtaactgactataccaatgggaacactgtgatgtaaggggaaaaaacagaatttagaggcaaatctggcttgggtatgactccatttag

SEQ ID NO: 916925 - DNA, 4001 bp, Homo sapiens
agaaaaataaggccactctgaggggtgcccaagaaacttggcctatctcctggggcagccagggacctcccatagatagccctcctagggaccgtccccaccaccactcatggccagaccaccttaaaccaggggcatcctgagtcaatgcctgagatgggggtaactccttcagtgatagacacaggggtgggaagagctgagctgtagccagagggatggggaggcaaagggagacagggcagtagagcgagagctctcttagagtggcagaggatttagttgcagctctagacctggctctggttctgtgggcaaagagccttccctttgtgggcttcgatcttctcatctataaaatatgagtgttagatgagtggaaaactttccaaactttttaaagcggtaggcaatgtcagcttttaatctgtggaatctcaattacataaaaggtacgaaaccgaagatgccctgttgaaagcaagcatggaaagcctgaaactcgactgcttctacttccctctccccacctcctgacgccaaaggcatccctagacaaacctctcaaaattctaggactccatgagataatttgaaaaccacaaggctcggccaggcgcagtggctcatgcctgtaatcccagcgctttgggaggccgaggcgggcagatcacgaggtcaggagatcaagaccatcctggctaacacagtgaaaccccatctctactaaaaatacaaaaacaaaattagcagggcgtggtggcgagcgcctgtagtcccagctactggggaggctgaggtgacagaatggcgtgaacctggggggcggagcttgcagtgagcagagatcgagccactgcactccagcctgggcgacagagagagactctgcctcaaaataaataaataaataaatgaaataaaataaaaatgaaaaccacaaggctagatgatgaagaggatgggagagtaataacagctactatttgttaagcacttactgtgtatgaggcattacactcagtgtattatctccttcaggcctcacgacactttttaaaatatataatatcccattttatagatgaagaaactgaggcttaaggagtttctctactctgcccaaggccactcagtaagtgagtttggaaagcaggctttgaatctgagtggggattaaccatcgcactgtgttgttaggatcccttccaggggcaaatctgatcatcctaagaagtgggggaaggtgggaggagacttgaaggaggagaggtggaaaaggaaagtagagagaactaaggaagaggatggaagagactggaaaaaaggcgggtttagtaagctaggaggaaagagcctagaagagagaggaagctggagggctagaaggcaaagatgagagacgaaaacaggtagaaaggagaggaggggacagggaagtagaagagggggttgcatccccatttccaggttcagggaggactgggtaaccagtggtttcccaggggcctctcagttcacgtttctcataatatccctctcccagagatgagggagaggatgggatgacaactccccaggtctccccaaacccagtaaccccaagtcctcctgttgcacgttcagcctctcacctctcccaggcctctcagagggatggaaaatggagaggtcccttctctggacgtttctgctccaagaccttcatgcccctctttcctccagtgcccacttaccccagctcttttctcctcaaggcagaatccttacccctcctgctcaggttcctccaataggcctttctctagcccaagagagaaaggtcctctggagtgagtgggcaccgctttcctctgcatccccttgcagagtgaccagcctcctggcatggccctggctagaaatatccaacccctcttcttccccagccatcaggaggacacatttctccccaccccaacccataacaaggctgggtcgattggcttgaccaggacaggggcaccttttgtcttcagccccttgaaggggaagggagggaggagccacggcgtgaggggcggggccagtgttacctcccaaactcagaagggaagcgcaaggtctgggatcctcgtccgcccgcttggtggcctaaactcgcttatctcaacccctatctgcccgagtcctctgattgtgggaccacaggatcgaaagttaaaacagcttctctgagttgcccaatgcgtgaatgtggcggtgggggcaggcggggaggtggagccagttcagcacgaggagggttaactcggcgccgccgctgggaaatctcagcgtctacagcagccaagcgtggagcagttttgagggggaaattccccctcgtctgggccaccatgaggtctacatctggggcttgctcacgccccagccacacccttgaacaggaacctttagtggagggcaggataggggtttaacaaggatccactgccctctggcatcaaccttccagggaggggcggccacttcccccgactcagggcagaggggcactccttcacctcctttccctgactttccatggccctgggggtgcaggggtgaggctgtgaaaacgtgacccatgggggaggggagtactgaggcctggaccctcccagattcctccaggagttcgaaactgctaaaacccagtgccaccagccaccaacactagctgaaaccatctcttggggaccatccacccagccaggggaggatcccgagagctccccccacgaatccacccccatgcactcatagaggcccccgcacccacctcggaggcaacccctcacctcggcaacccctctgctgtcttctccctttctcagcgggcacttccaggccccataggtctgtagctctgtccagcgagttcaaggctggccctgctagcacctccccccttccaccaccaccaccaaaaagaaaaataagataaagcacacacatacatacacacacacacacacacacacacacacactcctctcccgtcctccctcttcagtgtaagcagtggctgccccagcccgctgtttccggcttctccttctacccaggtccctccctggagctctgacgacacagagaagagaaagtgggctggaggaggaagaggaagaaagtggggtgaatatgtgtgcctcctgtgccgagtgggggaacacgtgggggatcaggactggggtccaggccttggagccaggcttggggggaggctgacccccacttactctgtccccctcaaaagcatcagcttttctccagaaagtcacccaatatcaaacagagatttgccacccctaactgcctggctcccaaactcaaactctgccaagggctggggtttggacccacaagggactgggctccccagggcctcaggaaaagtaaatccctctggactctgcgctccctccagtggaggaccctaaaaagccgccagggagctcgatgccagccaactcctaggtccccctcccttccggcagggaacgccttagaggtcggtctcgtgaccactgacgggagggagtgggggaggggaaccctcagctcagaattctggaagactctaggagtcccttggactgaagctggtctttgctctctcctcacagggcacccctcctgagactgtggtgggaaccagcacaagccggagctgctgcctgcagattcacaaggggcaagtttgaatacgaatctgctgtgttcctatctgccaagttcctatatgtttctggggtaaacactgagacacgccaagaaacaaacacacacatgcacaacttccctgaccacaagactacacacacacacacacacacacacacacacacgtgcaggcaggctcacaaacagagcccattgcaatcacaacaccacacacacacacacacacacacacacacacacacacacacagtcttgctcaacttctgagtcatcaacataactagtggagggtt

SEQ ID NO: 916926 - DNA, 4001 bp, Homo sapiens
tacagtgtcctacctttagaaatcaagttttcagcataaaaactaacaaggacatctatttgttggcacaaatcatctcagtctccattctttgacttattttaaaacaaactcaagagcaaatggctagagaaaaactgcttctatttaatgtgtgttttctaagtctaattttttcattcctagtggcaaggcctttcaaaagagtacaaaaactacacccaactttgcttctcattctaaacacatcacaaccaaatgggaaacattatcagccatcttaacaaggagaaaacaaagctaagtgaggtcaaaccaaaacattttttaattcattgtacctacctattttgagatcaggatttttcagatggaagtagtttgatgaacttatgcaataaaattatgtaatatcataatttaacataatattttagactaacttctctctcctcaaatagtcacaagggtggctaattcacatacaatacctctcagccactggggagagagtataataaacttaattgttttacatatcctgaggcacagagagaaaggccaatcaaattcaaagaggtttacagtaccttatatacatatatgattgagacaaagaactttcaagaatctgtactgaggaagcaaaaatgggcttaagtacaataggccctgccttaaagtagagagaccggtcaaacgtaagccccagcgccaaaaaagacaaggtctcactcatcaatccccatcttacaatcaagaggcagaacttaaatcacttaaagctgttttttcagatttgagcagtaaaataagctaataggccatttccgattaagtggcttctctcaaaacttatcacaagttatgtgaaatgggtaaaagtgttggttctgcattttatcaagtgagaaacaatagcatcctacttttggacaagccactacttccagagccactagccctccccccacctcccacttctttttatatcattcctccaaacttagaacccgaaaagctattccacaaaacaaaagcagcaccagtaaaaggggaggccactggttttgaaaataaagtttgttcttttgctgtcaacctggcaactttttaaaggtgaaacgtgccctactcaatcggttatactcttttctactcccacaccaaataaccactcgttcgacctcgatactaaaggtgaaaaaaggagtgggagaaatgattttgaaaggaaggggctacgggtgcaatggtaaagacagattctaagactggttttgagcactccgtggcttctaggagctgggaggctttcctgagtctgtcttgagaaatgtttggcaatctgacgcatcagtttttaggaacggtacacaaacagcccccacaattgaagagccatgcttcggatcctggctctgggtgacatcggctggagggcacgggacgggagcgctggggctacccggagaggatccgcgacatttgttattgtttgtgaagcccaggcggggacccggagcggagtgctcgggggccggggagtggaaggagaaaggagcagaggacaaagattcctccccgggtgcgaggctccctctctggacacatggggccagtatcaccccggggaataagagggccaaggccgtcgccgcaggttccccggagacatttccagccccagaattagcccggctttccctggacacccaaagacacctaaaatctcctcctgctcctgctcgcagagttggggctggcgcggcgagctcgggccctcagccgagcgctacatccgcgaactcacctgcctccggtcgcgcccgcggccggctcagcctccgcacggaccgcagccggccgggcgcccgtcagctcccttctccccgctccgccctcgccccgcccccgggaggtgggacccgcggcctcgccggaatctcagggcggcctccctgaactctcgcgagccttgcctcctcggcttctcggtggctgggtcggtccgactcgccctgacgtcatacgcaccacagccggaagtagccttctgtcgtcaacgcccgtcttcccggccccacccatctccgcctggtgaaggccagactggttttgagggagttgactgaactgtcgccacttcccctctcaccagcctcacctcactgccgtttttacgccaaacctgttcaggcctctcttgagagtggcctaatgtgttgcgacattagtcacattctaaatgtcatccgaatttttcaaacagtgcaatgcaaagaatgttagaaatggaaagagagaattcacgcatttttcagattgggaaacagttgtcaacaaagatggatcagctaagttgctcagtcggtagctgtggggactcgaagccacccaggttccttgacgcttccatttcaccatgaggggactccagagactggagaggaaccaggatttgtaaatgccacaaaaaatacattaaaaacctgtttgagttttcttggaaaatctaaaataactacagtactggcctgctttatcagtaggatctgagaattgtgcagaagagcactcccctataggatgacccaaaagggacaactttgggaaggttgatgcaatttgcgtctggggacaaaactggcctttgggaaagccaaatgagagaatgactcccaattattgttggcaagtttatcctcaatatgagtattggaggtcttataaaatattcttagcttttagcttactgagacaacgtatgaagctggtactgtgcttgcaaaaactatcacttagaaatgccacctgtcatctttaggtttcccaagagcaggtgacacgagcaaaacacctaggaaagaagcattacctcatttctctttcttacactgtgctttttcatacatagcttagtagtgggaaaagctctagtttggtaattagtgtatttttggggagatcagctccacttatatggtcattttgaaactcaaatgacagttgtcatatacaagcataggaggtttaattgtgatcagacaagcttgacaggcctatacacccttctccctgtactgcacgcatacacataccattcaaatgctacgataagattgagaacagtgtatggtttgttccacagcaaatttatgtcttcaaatgtgccatactagagtaatatgaactagtatagagtagcagtctaggttaatatgggatagcctaagactttgacctctagttcctaaattctcctaaattgagaccattgtaaacaaatttccctgggaagttgttgaaagtacctcaactgaaacaaattagagctatgaaccagaattttggtggtctatggaccccttttcaaaacagtgttcttaaatgcataaactacctagggttacaaaggaaattgataatgttaacatacagttaccaaaatactaaaaagtgagtttgtaatataattatgtggtaagtagtagtagcatctaagatggctgccaatgatccacgccttctagtattcctgccttctgtaattcccttctctagtaacttagttcttaaaaaggaaatatagcaaaagtgattaggatatcatttccgtgattaggttacaaaaatattctgggctccatcttgcttgtccttgctctctcacttgctcgctttcatggaagccagctgctgtcttgtgacctgccttacagagaagcccacatggcaaggaactgagagagatccagtcaacagccaccaaggaattcaggcccccagtccaacaacctgtgatgaactgaatactgccaataatcatgtaagtaagcttggaagtagattctttcccagttgagccttgagatgactgcagccccacctgacacctagactgcagccttgtaaaaccagatactgagccagcaggcccaactagccaagcccagatttctggcccacagaaactgtgagacaataaatatttgtggttt

SEQ ID NO: 916927 - DNA, 4001 bp, Homo sapiens
tttaggaagacaactggcaacaatatggaaaatgaataggaggaaaagaaactactgaaagttaaaaatgatcctgaactaaggcagccacagttactacatgaaggaacattggagtcaggagacatcccgctggcagaatcaaaaaagatgatgataatctagatataagggaaaatcaagaatgctttagatttcaacctttaaaaacttaggaaatgacgagcagctgagttttgtttttttgttgtttttttgtttgtttgtttttgacacaatgagttttaatgatgcctaaagccagttaacaaaaaccgggattgaaataaaaacctagggccatcaatgtaggatatcactaaggagtacacacagagcagcattcgtaaaggagatcaacattcattatctggtgcgtttgttaatgcagattcctgagtctcaatcaaaatatacggaataagtcatttaggcctctgaaaattttgagaaccactgaagacaaagaagcacacaggaccacgatggaccacgatggaattttggtgggatcaaacatgcgttctgtatggcagccagtgagtcagaattttatgaatatctgacactgaagtttttgattatttcaggacacaagctacagagaacaccaaagttagccatcttggctacacttacgctgtgaaatctgcagctgctgtagctgctttggtggcatccttattcagtgttgcaccccaaacagcacctttatgacccaaaaatgttccaatccagtctcctgtatctccctggcgtagcataggtttaccatctagaaaatattttttaaaacatgtaatttataagttcagattacttaaagtctaagattcaaatgtaaatatacaatgatgttcaatgacaaagtggaaaaattgtttcagctatttaactaccaccacccactgaaggcactaaggaatgtgcagtaataaattaactgaagagctgaacagatcattctctctgaaaagcatctgtaattggctgggaatactgatctgcgtcaaaacaatctagattttagtcttattttggacagacatcttagcctgaatctcagtttcccatttgaaaaatgaggctaataccacaaaggaatatccagtgagacaagagcgaacgtctttgtaaggtattgcacggcctggcctaatttctcctttccccaaatccttgaaagctatttaccgtgttgtcccgagagtctaggcaaatgctgaccagctccttcaaaaatagcaataaaaataaaataaggagagaggtcttagttggaggtaatagtttctacaaaagcgtcctctcggctccagctgcggattccctaacacactcctttctccaccggaccagtgttggctctcatctcagatgttaatatcgccccctcccccctcaccacaccaccgcttcggcactggagcgtgcgggtcccgatccctttcagcccagtcccagccgtcgaggaccaggattgcggccttgctcacctttgcaagcgctgattaagaaatacccataaggcgtgatgccactgaaggccaaatcaaccacgggtcgcgtgtggccagagcaggtgagcggcgtctgtctcattgccatggcggcggcgaagccagcgaccggactggcgagctgagggtcgtcgttgtcttttctctcttctgctgcagtgcctcgggctgctccaggcccccgccctgacactagggctgggctgggcaacaggaaaagaagggcaatccggtggcaccgaggttagggaggggtgagggaggggtcagggagtctgcgaccagcaagcaacagtcgacgagggagggaaagggagggagggaggaaagtaggggatggggagaagcggagaaccgggccagccacgattcacagcgtccacaccggcatcggcaggaagtgacgacgtaaatgacgcagagcacccgccggaaatgacgattggcgggagggcgggctcgccgggtagaagtgacttgaagaaagagcgagaagtatagaagggcgcaggcgctagttcagtgctcgtgaggtaactggcgctggcccacgccgactaagggagacgctctaggcaccgggatggggtccctgtccccgagctctagcgggtcagaacgccttcctggtccgcggccgagttgaaagttgttcccactcccataagtccaaggaccagcgtcagctgtgtacctgccgagcagccctactgaggactgtgctcggcctctgaatatctagacggacacgagccatacccagtgacggcccaaaccagcgaacgctgtctggcaacgttttttgcaatttgtcttatttaaaaaccatatacgggcttggagtggtggtgcctgtggtcccacctacttggaaggctgaggtgggaggataactcgagcccgagaggtcgacaccgcagtaagcggtgctcgcgccaccgcactccagcctgggcaacagagcgagaccatgtattaaaaaaaaaaaaaaaatccccagtcatttcttccgctgtgtaagttttcctatgttgctaatgttttaggagtggatactatatagttttaaatgcgattaaattcaagttactttttccttggtggacttcggagaactctagagtcgtagatccccaatttttttgatgaaatactctcatccgtaaagtgagccttcactcattttataagcgaatgaatgctgaattctatcaaaaacttttacaccttttgatatgatgtatatatgagtgatgatttgcaaattacatagatgtgcattataatacatggacaaaaatagaaatattaaaataatatttaaatataaacaaactctgatattgtctgcagcaggcagcccactgtggctctgtgaaaccaccagagctgttaattgttgatactgtttcctaaccaggagagggcttttctctgggcaagttgtatctttattgatagaatgtaaacccaatacaacagagatttttgtgttttctttgctactttatccccaaggtcaaaacgtctgggcacatagcaataaatatgtaatcaacataaatgtctgtgaatgttttcttcatctttttgcagcaaacaccgtctacaagattcgagtcaaacaacgtgagaacttgaaatacgtctccattctttttccttagtactctcgttcattcacttacggtaaagcacttactatatatgtttttcattttatcttgttcgactcctcctttgtgccatcctctcccttttgtctcacacatacgcaccactcacacatttatgaactccttaatggcaatggttatggctttgtcatttgtactctagtgccagaaaagtgaatggcatttagtgaatactcagcatgactgtttactgattaaatagattgttgcattactgatggaggtaaataaaagacccactcaaaatgacacaactggtcagatactgatacatgttcatttattgctcattgtgtgtagataagaatataattggtaagttatggtacatacttggctctaaagaatgtattatttcctgctcatttggattctgagttctaagagtattgtgtattatgaccaattgggtaggcttcaaggtcaatttaatattagaagacaggttaatgtaattgatataattaacaatattaaaagattaaagaaaatcatatcaaaagatgtgtaagaagtttttgatagaattcagcattctttcacttataagaattctgagacactagaaatagaagggacttttttaacctcatagaatatctgaaaccccacacctaatggtgaaatacagaaagcattctgtattagattaggtacgagacagatgattgctactgcctcttcaatacagcatcgtactagatgttcaggtaacttaaaaatgcataaatcttccaaagaaagt

SEQ ID NO: 916928 - DNA, 4001 bp, Homo sapiens
agtttttttgtgcgtgctttgttttgttggtttttctgaaacagagtctctttctgttgcccagactggagtacagtggcacaatctcggctttctgcaacctccgcctcctggattcaagcgatgctcctgccgcagcctccagagtagctgggactacaggtgtgcgccatgacatccggctattttagtagaaacggggttttgccatgttggccaggctagtctccaactcctgacctcaagtggtccacccaactcggcctcccaaagtgctgggattacaggcatgagccactgcgactggcctcctgctaattttttaatttttttcgagaaacagtgtctccctgtgttgcccaagctggtctccaatacctgggctcaagtgatgcccccaccctgatctcccagactgctgggattacaggagtgagccacagcttttcttcattaaataaatacctgagctcctactacacggcactgaaagataatccatcgggcaagacaacacaactataatttgctgtgtttaagatgatattgatctgcggaacacagggaatatttgtccattaataaaaaaggaaaaatcaccgtgaagaaacttccttggaatgaatataaagcataatttccatgatcctaaggatgaaatcattgcctttctcaaccagagctcctcatctgaaccacagaacacagataatgatttaagtggctcttttctctattctcccactcgggggtacataacagctccattctagcagcagaggagagagaataattcattacatgcagtgggtgtcgtagggctgtgggccttagcacccctgttctgaggctgccaacaatttagagaccagaggctctatctgtgcacacacgtagcatgaattagtacctgtattgtaaagggaaaaagtcataactacttctgctggcctaagccgtcctgggttagacaagcttggaaagtgcacgaccatcactatcattccgctgtcactgcaccatgcacagtcctgtcacctttacacgtgtagaatgcatcgaaatccttccaaaatttttagtgacctgcttttcccttgctaaagtaaacagtaacttgctgtgtgcccggctgctgggcgcgtaaggtgcgttcagagtcaacacacggtcccagtttccaaagcaaactactgggagatcagacacaagctgctgttcgcgctcgccccaccccaagcacccagcactctaaggtgcccacatttcacacccatctgttgcctcccgcttggtgcacagtcctttgtgaagccccagggataaagcagcgaccaagaggacccggcctgctccccggggctgacgccagctgcggggaccccgtggggcggaccacagttaggccagtgggctccggctgggtaagcgccagatacaatccgccaagcggagtgacggacagggagccacgctcgaagagggggtcgaggccgggaccttccccgctccctcctcctgccccaacccgccctgaggactccgcccaggaagccctggggaccccgcccggagcccccaccctaggactcccgggacccccgccctggggaccccaccagcagtccccgctcaggactccctgagaccctgcccgcagcccccgccccagaacgccggagatccccgccctggggaccctcccggagccccgcccaagacgccccgagcccccgcccgccctccagacgccgccccggccgggcctgaaccgctacccgcggctgccgctcaccgccgtcaggtctggcagccggtcccgcatccccgccggccgggcagcgcgccccgccgctcaagcctgtcccgagctgcctccggccgggcctcgggctctccggtctccgcctcaggccccgcggtcccggcccggcgccagcagccctccctggagccggcgctgccacggcaaccgcgccccgcgcgctctgcgcatgcccggcccgcgccgcgccccgcacccacccacacggcggcagcgctttccagcgggagcccggaggggcggggcctgggggcggggcctaggcggggaggggcggggtccggccgagccccaggctggcagttccgctacacgtgctgtttgtcccttgatctgcttttatgctttcacactcattgttttatttatcaaaatatagagcattcaacgaatagtgacaaaagagcaaagctcccggaatgtgctgggtgcagctttgggtaatacatatgccgaaccttctctttaagggtccacgcgcagcctcgggtgtgaatgaaggagaagagatcgtgtaccacacatgatgcttacggagcataacacggcagggggcggtaacgggaagagcgtccgcaggcccagccctgggataccattctggcaggagaaacaggcaatacagacacagacaaataaatgatagatgagaaaagaaagtaagggcatgggcacggaactggcagagaggtcgtcatgaaggtgcaggagcttaggtgaactacccaggttgggggaacagtccccaagaccattatcacctctgacaccaacggcaaattctggcggtttccaaaaccaccttcaagttccataatttgctagaaggaatcacagaatacactaaaaactactgtactcacaactatggtttcttagcaggaaaatgatacggattaacatcagccaaggaagaagggcagagggggagtctggggattacggcgtgcagcttcaaggtcctcccgtggtcctctccctgtgtagtcaggcctcattacttgccctgcactgatgtgtggccttacacacgaagtactgccagccagggaagctcacttgagccacagtgtgcagaacgtttactgggctccattgcatgtgcatgattgattgattgtttgattgctttcatgcttgatctcagcctcttggttaagtgatatccatgtaaccctaagcccccaccataaatcacactgttactctctggctagccgaagactcccaggcaaacaaagattgccttccaggaggagaaggcaaggccagatttgtttttaaacaaggttaaagtctttactgcctcctggaggaggtggctttggtctgaccagaaggcagcgctaagaaatctgcttgagagcaacaggctacacattaaaaaacaggacgttttggacttggttctaggtgtgatgtggttctgttacccgatggaaggtcttgacagccagttgtccaggtgagtgtggtggcgggcacctgtaatcccagctactcaggaggctgatgcatgagaattgcttgaacccgggaggtggagcttgcagtgagccaagatcgcaccactgcactccagcctggacagtaaagcgagactccgtctccaaaaaaaaaaaaaagatatgttttttctctccatatcctgaacttccccaccagaatgcctcctggaccccgcaacaggcaagtgcttttctttcggccttcttgcctctgccaccaccattttaattctccctctctggtaaatactgggccctccctcgtttctccctctctcccagtggatttttcaaaaacatatgataatattggcagcagctggatggtgttgaattggcaaccaaaactttttgtttgtttgtttgtttgtttgagacagagtcttattctgtctcccagactggagtgcagtggcatggtcatagtccactgccgccttgaactcctgggctcaagtaatcctcccacctcagcctccaaaagcacagggaccacagacatgagcccaccatgcccaacctcaaaactttccttatcctgccagagaaaaaaaatgaagttgtgaataatcgttgtgggaattcagggaccctgaatggagggaccggctgaagccatggaagaagaacataaattatgaagatttcatggacatttattagttccc

SEQ ID NO: 916929 - DNA, 4001 bp, Homo sapiens
agccagcaaagcttcatctgcatttacagccactccccatcgctgtcattgcctcctgagctcctcctcctgtcagataagccacgacattagattttctttctttttcttcctcttgtatttttggtagagatgggtttcgccaagttgcccaggctggtctcaaactcctgaactcagggcgatccacccaccaactcctcctaaagtggtgtgattacaggtgtgagccaccgtgcccactagcattagattgtcataggagcgtgaaccctattgtgaactgctcatgtgagggatataggttgcgaactccttatgagactctaatgcctgatgacgtaaggtggaacagtttcattctgaaaccatctcccgccaacctcatcggcatctgtgaaaaaaattgtcttccacaaaatcagtccctggtgcctggtgccaaaagccatgcagtttgtggtaccttgttacagcagccctagcaaactcacacagtaatggaggcactgaacgaaaaagtatatgattttcattgaagcaaatacttcatgatgtctcattgaaagacctagctgccccctagctagctgtcagtggagattccggtgcattgagggggaaaaaccaggtagacagcacagagttctgtttccaggtgtatttcagttgagctgtgctgcacattacagtaactcgactcctttattgccactacttcccaccgagtgggaaggaagtgtggtctcataggtataagaaactccaatgtggagaggacccattacagaaggaagcaacaatcgcataaatgaaagaaagaaaggggggatgaagggttgatagagaaaaatgaaagaggaaaaaagacattgaaaagaaaacagaggctaaaatggtgaaaccccgtctctactaaaaatacaaaaaaataaatagccggccgtggtggtgggagcctgtaatcccagctacttgggaggctgaggcaggagaatcgcttgaacctgggaggcggaggttgcagtgaaccgagatcgcgccattgcactccagcctgagtgacagagcaagactccctcccccactccccaccccaaataaaaagaaggaaagaaaacagagattcagtcaacaagggatagcacatcaggctgtacacttttaaagcatggttattgatatctcatttaaatatcgcaacaaccctggaaagtaattaccgtatttatgctttgcagatgaggaagccgaagctgaaagcaacgattccatggtctgaaaggctatgcagtcctctgacaagtaattcctgtaacctcattctttcccttccccctctcctgatggccccctctccaggaataaacagaggtcccccattcctgggttttctcatgtttctctctgcaccaaatctgctgagtcaggtttactcccttatcatatagaaacacagaagccaaaccccacaagatgctggttccgaagaaacacaggttaattcacttggtgatttctgtttgttcacataaacacccgttccgctcccagcctcttccctttttctccctccccaactgcaaagtcctcccccagctgcctcgctgccattcccttcccaccttctttaccctccccgccgcgcccgccccccataccccgttcactaccgtgtccctcctctggtcactccggtttccgatggcaccggcccagtcggaggggaaataatgacagggttgggtagggcaaggtgtgccagcctcaaggaaatgcttttcagtccctccttcccactgcggggcgtggctgccggcaaaggatggagttcgggcgggctcccgcgaagggaagtctgcgggctccgaggtttccgggactcgccacactcgagccacaggaaacctctgctgcaactgtaaaggctggacttgttgctgatctatactcatttcctactctagtgattgctagatgtcaggtatcacggtgactccagtccaggtgaaaacggagtcacgatacagggcaacagcgccacctcacggccggccccgtagcagcggcctccattggcgcctaaaaatggtcaggattcacattcaggtggattattccgcgccaggaacattctccacctgaaggctttgccggggtgttacaagataatactgaagggacgggagtggtggcttacgcctgtaatcccagaactttgagaggccaaggcgggtggatcacctgaggtcagcagttcgagaccagcctggccaacgtggcgaaaccccgtctctactaaaaatacaaaaattaggcgtgatggcgggcgcctataatcccagctactcaggaggctgaagcaggagaatctcttgaacccaggaggcagagatcgcatagagccgagattgtgccactgcattgcagcttgggcgacagagcaagactccgtctcagaaaaaaaaaaaaaaaaaagaaaaaaaaaagtactgaccactgcggagacgtgggggaacctataaggaattaatgagaattaaaaccccaagattacgtaatagatcattcatttagagcccgcgcgcgcgcgcgcgcgcacacacacacacacacacacacacacacatatatcccattatgtcctgggttctcctctggggaaacagtgaacaaggtagttatgttacccgtccacatggaaactaaaataatagaaaatacttaagacaatagatagctgaaggaattctgttagatattaacacctaatacaaattcaattaaagaaataagagtcataggtaacttgaatatgtgaccaatttattcagcattgaacgcataccaaacacaaactgacagtcattagagcaaaaagaacttgagtcaatgtaatgtggcatatttagagattgaggtatgtcagttctctagagctttctctattggcattttcacttccttcagggctttttaaaaacaggatgaattgtacttaatgccactgaactgttcatttttaaatggctaatggttgattttatgttatgtgaattttacctcaaaaggggaaaggaagacatctcatcagttagttgttctttagattctttatgtcataagtgatacatcaaatccaaatgaactgattggaacttcatattatgtaattttctactctacctccccaagcatgctcctccatgacagataaagtggtttactcatttttaaaatttctgcaatgtattgctagatactcattctgatgcacagaattttgtctaaaatctagttactattatagaaatagaagttaaaaaagaaaccaaaatacaatccagaaaggggaggcaaaatttttctctccaatttttttgagcaaatcacataaattatacattaaaaacattttgagttagagaaaacactggaaatgataatgcccacacacagaaacaactaagtaccaaatagtctgagttacacagcagacattcaccaggagttatatatgtatagctagtcccacacattatactcattaataagatggttagaatatccattatttctcttttttcttcaagttttcattcccttgtaatttcaattattacctccatctcaaatttataagcctccaactcattgtcaacaatgctttggccccagtgtttctaccagatcgttatttctgcctcattattaattccataggaatttgttgaatgcccattatctctctgtccagattaagtactgaacggtagtgggaagtcacactgaaatatacactggagatctcttccttctccagtttagcctacatgaatcctaactgccagatcctgcgctcctctaaactgttaaagccatccatccatgtgttacttagtatattccctcttgtatgattctgcagttgtgaggaaggaatctactggtttagtggggtggaatctatttacggaaggcatggaggaattcctggaaag

SEQ ID NO: 916930 - DNA, 4001 bp, Homo sapiens
gctgagatcgtgacactgcacaccagcctgggtgagtgagtgagaccccatcttaaaaaaaaaaaaaaaaagattacttacaatatccaataaaatgtaaatactatgtaagtagttgttacgctacactgtttaggaataacaaaaaaaaagtctgcacatgttcagtacagatccaatttttttcctgaatatttttgagctgcgcttggttgaattcacagatgcagaacccacagatacgcagagccaactgtatacaataaaaaaggggaatctgacacaaataaatattttccaagttacaactaaagggaacaaggaggaggccagatgatcaaacgaaaactgtttcagaacatcttaaacattgttcttagaacaagctaatggctggggtgtgtacaaaattttaatagcccctatactggaaggaaaaaaaaactcaattttggctccacagcgccccctcgtgggtatgagatgaagtgcaagtgcttcacattcaaaatctctggttaagccgtgtcttctgatggaattaaatcgaatgcagtccctcaactttgtatgtcatgcatatgcagctgtcttttgtaaggctgttgcagatccaattccccacaaacccttctcccctccttcagtcaagaggccttccctgagttcctgtcatggtcagccacattacttggcactcgggaaactcagatgaataaaacgtaggccccattccaaacagctggtctagcttttgctccacggcccgattttgtcccagaatattccgctcatatatcggtctctctttgtttcctatttctcctcccttgatctctcacatttcatcaccttcctcctcctccatccctccaaaatagcgttcctcacacttgccaaattataaagcccagtttgaaaagcaaggctctgagactctgtgatgacagtgcaaagagcgtgggactgaaaacacaacacctggggaccattaagcaaatctctccctctcttacctgtttccgggaggggggcgggtggggagaacatttacggagtatttacagtaccaggccaagtactttatgcgcatgtcatttaatccctataccgaccctaggaagtgccttctagggcaggtgtgggaattaaacagctccattacagttgggtaaatcgaggctggaaaacttaagtttacaaagctgagttaagtgacaaagccaaatttaaacctgtatctggctggttctaggtccctttcctttaaccaacctgagttctcaatagtgtactacctaaagtatagatgacttatgcatttcgggggtggggaggggcaactttggactctgatgctctcacacacaaaaaaggggcgaactacactcgatgtattcagtaaatgagtttctaattcctactagtgagtgaggttcaatcagaaacggctgggagggaggacggggtcttaaagggacccccagcgtgacaacatctaagtcccctctccccatcacggtcgagtgtaacgcacccagggcttccccgctactccagcacggatgggggtaacttccccgagccccgcaactcccggcggcccctccacgcagccccaggccccggaggccgccccgcccctctcccgaacagccccaccccctcccccagcggtcccacctccgctccgggcggccgggcgagcggcaggactcaccttcgtccgactcgcggccccgacagctgcgctcgtcgtcctcggcgctctccagctcttcatcctcctcggggtagtactcgggggccggcggcgctccagcctgggccggggccggggccagcagccccgcggcactcatgtcgcctctgaccgcagctgagcgtggcccacggacaccgcggccacccgcgctcggtactcgccgtctgcctagcagtgtccgcggcagcccccaactcgaggaccggcagccacggcgaccccttccccgtctccgccgagctccgccccccgcgcccgcgctcggcaacgggggcctcgcgccgcgagcgacttccgggtcgagagctgcccgacaacggcctgattccgccatccttgggggagtggagatgccgctggacgcccccgtcgccacaacctcagccctttcatcgccgtcttaaaatcctcaacgtatagtgggggaggggcggagccaggttcgctagagtcaggcaaatctacgggcaggcccagcagcggtcaggaccccgaggctcgcaggcgacttccggagacagccgccaggcggcgcctggagctagaactaaagcggtgatcgttagcgacctaggggcggagggtttgaagggcccttggcaggtggaggtggtctctaatttaagcagggaacgacgcgacctgcccccttattaggtcggaaaacctagacgtccagagtgtgcgtgatcatgcagcctggctcctcctgtgactagttagagctttattaagagctaaaagacaaggatgctgatattccatcctggggacagcaaaatagtattttcccagcccttaggaatcctttctgtttgtgtaaggtttattcggtaagatgttcccccggttttacaaatgagaaacgagctgtcgtttgcctaaaaaaaaatagtaacgtccagtctgattttttagactccgagacccaggccctccgcggtacagctgccttgaatattaattttttaaaaggtgcttttgcttaatccaacagcttgctctgagctctcaactgaagaaggggagaatttgcctaccagaagttatttggctaaggcccacgtggaagcttaaaaaacaggagagctgagtatctgcaagaattaatttgtgcgattccctctgagtagaaaaggaacacggtgttataagttttgctgaacgaatagatttaaggtgtccctttagctaagagcaatgtggtctagttgtgtgtagcgagaaaaaagggtaaggtttttaatggtttgtccaaagtagccccacttttatgttccacccgagtctccgtaggaaacgcaaccagtagtgaaaatgaacagatgtgaaaaccagggtggaaccgaatattcccattctcagaccttttgtgattaaatttatctctgaattgttccctatggactcttctgaaaatgaaacgttattctcatcccacttattttgacatttatttactaccttgttttaattaaaatcttggctctatttgtaagtgattttttctcccaacaaaactaaagaatttccagaatggaatgctaagatgtctttccaggagttctgagatcttctgaagccccttctaaataagaatcattctcagatcgcaccgtaggtctgccatctatatttaaactaggattccagaactgtctcttgtccaaaagatgaagtcattttctttctttgtgctgttggagaacatctaaattacttgcaatcaactatattgagtaacttgcgttcctgtcagtagcagtaatcatagtgcagaaaaagcaaagattttagaaatcaagagttcattgatacaattaatttttaagtttatttcgttgctaaatggtttcctttcaagacgctgagatttttatcctgcttatgttttactgctgtcttcttgactgcaaacagcatctgttaatggtcatgcatttcttttttatatgtaatgaatagacacaactgagcacttgggttatgaaaacttaccccatttttttctgtccagattgccagctgcagaactaaaaaatgctctttagtgaaggtggacctactcaaaaaaattctcttatggctttagtcttacctaacctttagatttatttaatatgattttggacagtcgctatactcctgtaaaaatcaagttccctcaaaaccaagttttaccaccttgaaatctttttatatatcccttctcaaaacggtactcagccacaccgct

SEQ ID NO: 916931 - DNA, 4001 bp, Homo sapiens
ctaagcccaggagtttgaggttacagagtgagctgactgtgccactgcacttcagcttgggcaacagagagcgagaccctgtctcaaaacaaaaacaaaaaaaagttatatgaatgtggtctctctctcaaaatatacttttttttggccagtcatggtggctcatgcctataatcccaaaattttgggaggccaaggaaggaggatcacttgactccaggagttcaagaccagcttgggcaacatagtgagactgtgtctctagaaaaaaaaaaacaaattaactgggcatggtggtgcctgtctgtagtctcagctaccggggtggtggggagaggagtgctgagatgagaggatggcttgagtccaggaggtcgagactgcaatgaattatgatggcgccaccgtactccagcctgggcaacagggcaagaccttgtctcaaaaaaaaaaaaagcctgggcgatggagcaagtgtcgatcatggctcactgaagcttcaacctcttgggctcaagccatcctcctgccttagcctccccagcagctgggactacaagtgtgtgtcaccaagcctggctaatttttctgtagacatgggagtctatgttgtcagggctggtcttgaactcctggcctcttgctgccttagcccccaaagtgctgggattacaggcatgagccactgtccggcttcccctcccctccccctgcccctgacagggtcttgctctgcccaggctggagtgcagtggcgtgatctcagctcactatagcatcaaacttctgggctcaagccatcctcctgcctcaacctcctgagtagcggggaccacaggcgtgtgccaccatgcatggtctttttttttttttttttgtagagatgaggtcttactatgttgcccaggctggtctcaaactcctgggttcaagtgatccttcaaacttggtctcacaaagtcctgggattattacaggcatgagccaccactcccagcctcaaaatatcttattgtactgtgttcaactattttccaagcggttgaccatagctaactgaaactcaggaaaaggaaactttggataaggggagactgctgtaataacattgtctttgaaggcttttcagtccccaactctccctccattcaccctaaaaaaaattgaacccagctgggaactggaccccaacctagggtcccggaccacctcaatcttctctgtgccactgtagtgagctcagcaaattgaggagttaatggccagagtgtcaggggcaggctggagaaggaaggtaatttttctgctctctgccctgcaagtttcttcctcaaattgctgaacagagagcactgacccagcagggccaaagtgaggaggggtgacaaatgtctaaactgctgatgagatgctggagaccaatgtgctggggtgggtgggtcgtgggtagggaggaaaggaaacctagagatgggaataggagcagtcttcaccttgcccctgggccatgggaccattactctctctgccacctacctcaatgccagcagcctgtttgtactagaccagagcagtgcaggtagggctgactcgcaggtgaactcagtgagcccagaatcccaggtttgggagggacagccttttgctgtaatacagaaatgccacccgttggtgcaggtgatgacccctcactccccatgggcacgttaggtaggaacatacgtccggcatccaggcacaaaagggtcttgcggcaacaccccgcgatctcaagagcacccagacagaaggagtggaggcaggtactgatagttttgttgcccttgaggttcggagcacagctggacaccaaggccccctccgctgcccagctcagcagcccttcctccccagcttctttaccacccccagtctccttaccgggtccagtgtcttcagcactgcaattttaccagcccagctctgcgagttctcgagaaggggcggggccagcgccgttatgtccggctgcagtaagtgacctctcactcccctcagcttatccctcagccattggctggaagcgggtggctcaaccattggctggaacccgcctcctggagccgagacaggcaggttgctaagaagcctgggagaagaggctggctctttttgctgtcactctcgccaacagtccggagtccattatacccctggtgtgcaaagaatgggacccttgtgcaccagggctgtatgtccggagctcgggcagtgtggaaggtgacaaggaatccaaaagttgggctgacaggtgggagattttgagacacccctgccgcccctccctggaggaggcctcgggatccagtccggttttccccggctgtgatctccactttaaacccagggtagacctacctctatctactctgttgcaactacaactaccctgtttatcttttagggaaagcaaagtcaatcgcttagttctcgtattccaggaatgataacagaaatgcctaaaatagtggttccaagaatttgagattccttgggctagtcgaatttctccccaaacaaaaatgaaacaacaacactgaatagccgtcttttattttgcgtagaaaaaaaaaataataatcgccccttggtggcacacgcctgtagtcccagtactcgggaggctgaggcgggaggatcgcttaagcccaggagttcgaggttgcactgagccaagatcgcggcactgcactccagcctggacaacagagcaagaccccatctcttaaaaaacaaactgccccttaacaagagcaatggcagcttaacaccccgaagtatgaaggttgtagtctcttatctcaaagtaaggggcataaatataatacatttcctattacccttttgtcatttgatgcaggacaaaatttatcaaacctagtcccccaatctggacaaatgtatccatacactgccctctagaggccggacggtggagctgcaattttaatcagtttaagtgaaggtgttcacctttaattttgaaagatcatttcctttcctttcggctctccaactagagcttttaccaggaatcagggaacgggggtggggggtattaccaagagatataaggtaagggaaccgacagtgaaaagttggcaagttggctttggctcttaagtgtttggaaatggaaaggatttcaatctgtatacaatcaaatcactgaagaaggctaatgcccaacctatcctaccagttgttaaaaaaaaaatatatatatatatatatatgtatatatatatggagagagagagagtgagagagagagagagagggagaaagagggagagagagagaaagcgagcttcaacctaaaaaaaaaaaagtctcagccaaaggaagatacagagaagtcagttagggactatctaaaagcctccttcctaatagtgtcatctacttttgtgtgacacacatactttacataattgaccttaatcttcagcttttactttacagatgaagaaacgaggcggaaggcactaactaacttgatcaaggccacagctggttaagttgacagagacaggcctagaatgtcagatttgtctggcaccagtcctctttcctatccaccttcagattctttggaatttaaagcctactgcaaccacacataatcctatttcatttcccttccctcgacctttagactgtggtggactgaagggtttgaagtacactaggagtcaagagcagatccagaggaaattttcccgttgaggtggaagctacaagaaaactaactcagtgatgtttttcaacctttgggtcatggacccctttgagaaacatatagaaatggatcctagaaatatgcacatacggccgggcgcagtggctcacgcccgtaatcccagcactttgggaggccaaggtgggtggatcacgaggtcaggagttcaagaccagcctgaccaacatggtgaaaccccgtctctactaaaaatacaaaa

SEQ ID NO: 916932 - DNA, 4001 bp, Homo sapiens
aaaaacctaaatttttacatttaaataagtgaaaacttcttatttttgctttttttaattaaagaaggaattgtcatgataatgtcaggtctatatattagtagattaaatatacatgacccttttgcaaagttcatatacacatgaatctttgaaaagttcacatcctctgacattattgaaaaatttatcccaggaaaaccacagttccaatatgtagtctaattctgagtaccaaagttcacatttctgatattaaattattttttattgggggtaatcattttatttttgaacatgatatttattctcaataaaagttgtatgttttccttgggaaatttgtaatcagacctttacatttttatgtactgttatatctacgtctggatattattactgaacatcctctagcatttgtgaaataatgctgtattacataatcagatatactatttgtggatcaattagtaaaactttaaagcaaattttaaattaattaaaaattttggtgaaaactaattttactctgattgaaaagtaaacattacaatccccttcagtactcacagcctcagagaactgtatcagtcacactaaaagtcacttgggagaattcctcagtagattatagaaaaaaataatccaccatttttaaaatcaagaaaatacacacacactaactataatttatcctttctaacaatcccaaagggaatctactcttaccactcaaatggctagtgcttctaaaaattaaaacaacccctgccccaccaatgttctttttaatgccccctctcatactcttggaatttacttaacaaatcactatctgcttgtggtaggaaaaatctgtaagcccctctacaaggcccctgtcctttcggttgcttgatatttcccccagattctcagagcaaatttggtttttcttaaaaatcgccatcctcaaagcagtatattcctgatgttccgacagtgagtctcactctagctagctgctacaaaaacctttcattcagaagaaggcaagaggtttcaccgaccgtgcacagccctctcattcacacacttcataaacaacaggactttgcccaaccctctcctctaggaaggcatcccagttttttttatcaaccagtttgcagcatcagtatcattcccttccaaaagaccttgcagaaaaattatggatttcacagcataggattagggctggaaaggaccgatgtcattgcatagactcaccaattctgtccacatttcaaaacagcagctaatgctttcttaaagctcacatctgaaaatccttttaggattgagagcaattaaaaggggaatcataacccccgtggttcccccataaggtcctgacagatctgataaatggaactgagtcagagatacagaggctgggctgctggggaaagaaaatggcttgtctcctccaggccctaattccttcctctgaaacagttccctttaaattcaagaaaccatgcagagatgtacccccccccaccccccttgcaggttttcgttttttaaaagaaagcctgtctgcctcttgctcgcccccatgatactcacggcagctgccttagctggaataagtcctcctccatgtccgcgctgcgccaggatgagcccttctcatggcccttacatggtagtggtggatgacgagccctccggttttcagcaccgggaagctggacagcacccgcgccgcttcctccctggagcagcagctgttcggggagggagccgctggggaccagcccacgagacaaagcctccgccgccaggagaccgcggcgagagtgggcggagaagaggaggcggagggcagagcgagctgcgcggggagagggggcagggagagcccttctgcttggaagagttcacaggctctctggctgatggtgtatcactgggatgcctatagggcacaccagtctgtgaaatggttgtccgggtaccagtgagcaccctttgattgacgatgcgtgtctaaatgtttatttgcgtggattcattaatgttatccgtataacactcttgaaacccaggctgctgtaacaaatacaggcatgcatttaagtacggtttactgagcacctatgtgccaggcactgtaataggcactgggggtatgacagaacaaattcgacctgtcattgtcatcgtggagctaagggtctagtgaaatgaatcaagaaaagaaaaatgtaaattaggtatgagaaggccaaagatcactcattctttcaacaagcgttattgggtgaattctacagccctgaccctggggaataaaaacatgagtaaaataaagtctctgccttcaagatcctagatagtttaatggttcccctaagccacctctcactagaatttctgacccctttagaacttaagctccatgaggtttcactgatgtgtcccaagtactagaacagtgtctggcacatagaaggtaccccataaatatttgttgaataaatggttctcagttcaggctgcatataagaattgcctggctccatttcaaaccaattgaactcaactctcgggaggtggaggccaagcctgggtattttttattttttcaatatttatttatttatttttgagacaagttcttgctctgttgcccaggctggagttgcagtggcatgatcatggctcattacagccccaaccacctgggctaaagcaatcctcccacctcaacctccctagtagctgggatcacaggctcatcccagcatacccagctaatttatttattgtagagatggggtcttgctttgttgcccaggctgatctagaactcctggcctcaagcaatcctcccatctcggcctcccaaaatgctgggattatagatgtgagccattgcgcccggcctcagggtattttttaaaagctccccagcaccatgaagtggaaacccctgatcaagtgtgaacaaatgaaaagaaaagctggaaaattatacaacagaaaactactaagatgatccatgatggcaactggcaaaagctatgagaatgaccgttgaatggacacttacaaggaactaaaggaagaaggaaacatttttttctttttttctttaattgttgacaaagggtgggggaagttggaagagggaacaagaaaaccaatctgagaactgaaaacaatctcacatcgaatccataaaaggacttgaaaatccaaaattgaatgtgtgccaggcacccggatatgtacttcaccatggtccccttgatctttgcaacaatcctatgagcaggtgtgatttttatccttattttgtaagatgaggaaacaaggctcagagaagggtagatttgcttgcacaaggtcatgaggacaggaaagagttgatctggacttaaaaccccggcagtctatctccacaacctgcgcccttaaatgctaggctttctctgagtgtctcaaaagaaaccatccattgcgggtatagtaggagaaattggaactattgaaacattggataactttaaacaaatctaatgttgggaaaaccaattatacagtggtactcaagctccaatgtattatttatctagtaaatattaatgagcaacaactatgtgtctgtcacaatgatagtttgaacttattcatggctccttctcacctcatactggagtcaatcacaagttgtcccacccacacttatttctaaaggaatctctcccccatccctgctgtgcactacatttggtatcacatgattcctggccacagctgattggctaagagggtggacacttatctaaagacatccaatccaaacacttgtcagtatccccattgttgcatagctgggaaagggagctggacaacctggtaccttttcgattatggattcaaatgtctctgaaggtttttgctttaattaccccttttccctcaatcctggtgtcaggtggggctctctagggctctatgaatattca

SEQ ID NO: 916933 - DNA, 4001 bp, Homo sapiens
attcaggaccattttataggaataatttttcaagtctccctgggttaatgtcacagtaagccacatactatatatcagatattttggaaataactgcaaaagcaagagttgccgaataagcttctgtaactccgatactgcaatataaggatcaaatgagaaacacaagtacagctggccatccgtgtcagcaggttctgtaaccacaaataccgggggagggaagaccatacctgaaaatgctttacaaactaagttgtacgatagtctcaatgggttcaaaacaaatgaactgaaggacatcactgcccaacatgagatgtactgcaccttcaataacatcttcctctgatccactcagatctttcttatcttcagtctcaaagtcataggctctcgtaaactgatcttccacagacggcttcccagatttcctggaatacttttttccggaggacaccatatttagatgcttcctgactttaaaaaacaaatttctttaaccttctgaatgcaaagacatcattttaatacactggtaaaagtttaaatatcaaaggagatatcgaacaaggattgttgaatacaattttaacagtttcctcatttatttggggggccaaaagttaagaagataatgacatttgttaaaaaataataaaataaataggccaagcacggtagctcacgcctgaaatcccagcactttggaaggttgaggcaggcagatcacctgaggtcaggagttcaagaccagcctggccaacatgatgaaaccccgtctctactgaaaaaaaaaaacaaaattaaccgggcgtggtggcacgtgcctgtagtcccagctgctcaggaggctgaggcaggagaatcgcttgaacccgggagacagaggtcacagtgagccaagatcgcagccactgcactccagcctgggtgacaagagtgaaacttcgtctcaaaaaaaaaaaacaacaacagaaatggccgggcgctgtggctcatgcctgtaatcccatcactttgggaggccgaggtgggtggatcacctgaggtcaggagtttgagaccagcctggccaacatggtgaaaccccgtctctactaaaaatacaaaattagccgggcgcggtggcgggtgcctatgatctcagttactcaggaggctgaggcagaagaatcgcttcaacccgggaggcggaggttgcagtgagctgagatggccccactgcactccagcctgggcgacagagtgagacttcgtctcaatcaatcaatcgatgagagagaatgacagtgtccaccccgactccaagcgcgcagtgctggagaggtggcccctgaggcctgggagttccaaattttggggccgcctctgccagattctggctaaatctgggcaactctagcagggcgctcagtcacgcggggaaattatagttgctggcgggacacgacatgaggatgccagaaataagctcataataatcaagacaaataataaaaacgtcccgcaatttaggtctcggaaaatgaacacaggcagaagatttcgacaacaaatacatcgaggaaccacgaaaggcgccctcggcgtggagcgggcaggagggagacgcgcggagcgaggtagggccctgcccggccccgccgcgtccctcctgtaagtggtcccagggtgtagcgatggggcccagccccagcccagcccgcccgctttccactaggccctatcctgctcaaggccctgtcctcaggttcgcggcctccgttttctcgtcagaggccccaggcgacgccaggaggtaagatttacctcactggtcaagggcagcctctggcctggacacctgcgatagacagacgcctcccctgctcacacctgaaacacaccgcaatggccgaggaccagttactggtcgtcgacaggcgtcctccacaactcctccacaagcgcgcttcacctgaggtggccccttctccgcgacgcttctgaggcaagctgggattcgcacaggagaaaagccagtcccgcctcatccggacacgtcgctgattggctggacgcagagcgcaggcgtgaactgggtggcgaggctccgcccccatggggcgattgcgcgcccaaatagctggcccagggtgctttggccgccggagcgggttgcgagtacacttgaggcctggtgccttccagtttttaagttttaaatgtttataatcgaaaattgcagctaggcgcagtggctcacacctgtaatcccagcactttgggaggccgaggcagacggatcacttgaggtcaggagttccagaccagcctgtccaacatggcgaaacccatctctactaaaaatacaaaaattagccggacgtggtggcgggcgcctgtaatcccagctacttgggaagctgaggcaggagaatcgcttgaacccgggaggcagaggttgcagtgagcaagaccatgccattgtactccagcctgggcaacagagtgagactccatgtcaagaaaaaaaaaaagaaaattgcggaataatatgtaaattatgaaacatgatgaacataccacctaatttatgaagtagggctttaccaacattcactgaatctcctcaggcaggcctttccatccgatcctcaccaggaccccacccttccccattcagggatataagaaaattatcctaaatttatgtaaatcattcacccttccttattttctaagttttattaccacatgaaaatgtgtcgttaaacaacacggcttagtttcgttcgcgtttggcattacaaaaaattgtcccatagtctatgtagtgttctgacagtccactagaatggcaaaactacaaaatatgactacacggagtgatgatgaatctatgtaacaaagggaacccattcagtgggtgggagtataattgtaaaacaattatttggtgtaactggaaatcacctatcaattgcaaaacaatttttgaagatacaatttatgaaggaaatgaaactcacctataatcccactacccagaaataatatacagtttaaaattgggggtattattgcctttcatccttttttctgtgcttatatgtattttcccccaaataattttaaaatatatttcaacctttgtacctgccttagtttgctcacagctctgcaatcctttttctatttgaaatcatacattttactttttttttttttttttttttgagacagggttttgctctcttgccaaggctgaagtgcagtggcatggcatgatcacggctcactgcagccttgatttcctgggcccaaatgatccccctgtctctgcctcctgcgtagctgggactcatgcacgtgccaccatgcctggctaattaagaaaaaaaaaaaaaaaaagtttgccgagatggggtctcactatgttgcccaggctgttctcaaactcctaggctcaaatgatcctctcacctcggccttccaaagtgctgggattacaggcatgagccaacttgcctggcctatattttacttctttaatatttggcaaaggcttcaggatcttattgacgccaatcacttttcaactgcctagttcaagtaagagattcaaaggaaccctcctgtttactgttttgctttgaatcctcttccttatgatgctcagcattccactggctcgtttaaatacaccagtgtattgggtaaggaatgacggatgacgactcccagacttgttcctgtaattccattcactacatcaaacctgttgatacaggatacagtgaaccttgtaaatttttcattactgaaaggattcaaaaaagtttgtaaagcgttagtacagtacctgccacataataaatgtgccataaatggtggcttttatgattgacaattggtcccaattggaatcctgcttttcctctcttgccagcctcattcttggcctcatactgcatcagccacattgcgttttcccaaatgtgctgtgcactcttatg

SEQ ID NO: 916934 - DNA, 4001 bp, Homo sapiens
ttgatcccccaacaacaggccataccaagaaacctcaggaaagtaataatctattttaattgtttttttttttttgttactcaagaaagctttcaaagttcagatattaacactgatgtgcaataccaaattgttagccccacaggacagatggaaacaggaaaagtcagatggttggcactcaaaagcaaaagcaattaagcagttgaaagtgggttggattgtcggtttatttttgttccatttgaacgaatcaagtgagagacatagactcttgcaaggaggaaatcaagtcaaacttgacgcttcctctctctgacagcccaagctggactggttgtctactccccttattcagtttaattgctttatgtgctctgattttcgcagagcttgtattctatcttgtttacgttcccccccccccccatatccctctccccaacagaaagaaatctttctcctttcttcactccccctctttcctctaagaaaggcaatcctctccaggaggagaaagaaacgctgtgcgtgcttagggtgggaggagggcgagaggggaggtgtgggagagaaagagagaaaagattgagattgggggtgggggacggaggagagagaacaagagaaggaaagaggaagcaagaagatgggggatgcccaacatcaactccaggctctaaatcacgggcgctgtgcaaagtgcttttccaggagatgcacatgtagtctcatatttctcacaataggccacccggggatccctccctaggtctcagactcccaccactaaaacccaagtgtatcgagaagaaaatctttgggatggattcgagcagataggcaccgccgaggtggccgcgccgccagtcccgcttccttacctggagggcggaccgggaggtggtgccgggtctcggtccccagtgctctccccgcgtggaccggcgcgaggcacacgcgtactctcgctgcctccgctcttggaggggcagcctgcaacacaaaaggggtgtgtgggtgtgggtgtgtgggaggttttccagggccaccagctggtcccacgtggtcgcccccaccctacacacaccccttcggggcgccaagcccccctctcggctgagcaccaccctggggacttgcccggggtgcagcctcaagttgccgctgctaactgctgctgccgctgccgctgctgcaggaggaggtggaaagacactgggggcagtactcggtctagagcatccccacactgcagcttctccaggaatccctccagtgaggaggcggccgcccatcatctccgagccccagcatcctgattggctccacctcgggtacgctgcgccaaggagccaatccccgcgcactaataataggtggatccgttcagccaacatcgcccatcccagttctgttagtgtctctccatccccacagcggacagggacctgggaagcggggtggaggcgggttgggggagggggtgaagtaagaggggaacagatcccaaggagacacaatcaagggcgtctgataaaacctctaggtagactcaggaatgccccacaagctgttcagcaagcagtatgcacaggagaaagagagcataatacaaagcttttttttttttttttttactctcaatcaaaacctaccctgatactgagcatgcccagactgcaacagcgacctaggagtttcgatgtgtgtgggttcgccagctgtgggtttttgaaaagctgggaccggggacaggagaggtagaagtttgtctttggccatttaacccggcggagttgtgaaagctgggtagggtggggatgtgaaagggttccgcacaagtgtcctcaaactgagccgcggggaggtggcccacctggctgccggaggctcatcatgctgttcttctggggttccgggttggaagcgggggcgggataagctgagctttgctggaagcctggggacttcccgcgaagggtgcggtggagccgagatgcgggagaagcagctccgtcccataggtggggccgggagcgcgactccacccatcagcggcggctgccaggccgtggagagtgcactgggagtttccattgcagcgaccaataagtttgtacacttgggtcaagtgcaacattgttggagatgcttttttattttttcatttttattttttgccacctccctcccccatctctctcgaccccttgccagagcagtgacgactaaagcatagattctctccctgcttcctctcttcccagctgaaccgttctgctcggaagtaagaagcttttctcttgtgagggcggtggtgacctgattgtctctaagctctcaggcaatttatagcttggtaataccgaaataccgaacaggaaggctcagcgggtgggggaagggaccgcgcgccaggctaggggcgggagcggagcccagctgggagaggggcccgtccattatctgctccacaggtgaaaggatttcaaaacggagagaactatttccctttctccctccctcaacctcgtttaaaggcctttgaacctcttatttgttttatttagaaatcctagcattttgtgtaaacttgatcaatagctacaaatgagaactctcctaattgggttctttattttactgagaagattatcttggcatctcaggtagggaaataaatagctatctcaattccccaaacccatccactttgaactggagttttattaacattggtgtgcaaaggtaaatgtagcaagaattcaattaacagtaacacatttcttcaagtttttaattaaatctcttctacttatgtaatgtttaagattaagatccttattctaagtatacgggaaaagaaggcaacgtgatataaatatatccttctaagtgacaaacacttgtatttgggctatgcttgaataataggaagtttaacattagaggtagaagtgtgaaaataatgcaccccagacttgtgacttcatgtaaatattcactttccattttccaaaatagtctccaaaccttattttaaaatcatttcatagttggagaaataagataaaagaatttggtctaaattttatttcagttatttagtgaaggagaggaggaggagaagacagagaaggaagaaaaacgacaggataaaaagtagaagaagttggaggaggaggaaggggaggagaaggaggatggtgaggtggaggaaaaggagaagaaggaggaagagaagacgaagaagaattaagtaaccctgtaattttgttgtccaataaatatctttggatgagaagattattataatatccacttaatatagatctttattctaaatatatgcctagcatactttctagattccagtgattaaaactggcacatttatcctatttaccaatagctgcatgtagaaaaaaagtatgcttattttagaataaattagtcaatagaatacaaatacagattttaaaatttttgctccagacactgattttgtcattaatattttagtcaatttcttttcctgtttacttcacatcttacctagcaatctttctatttcagtggccagaatccttggcaacatgaatggtatcagaagtttgtaacccaatgttccttgagggagactgcaggttaaaataagaaatgggctttacatgtatattgtgcttaactttagaattgataacattttctgtacataaataataagaagactctatttatatggtgactgtagctatactaagattttaactctccctcctattcctaaattctctccaagctcttgggaatgtgttgaagacgtcctcctggatctactgggctgacacaacattatactttgccgcaagtgtgtatcatctctttgcctattgaagcagactcatttttattaaaaggaagatcgggtcaattgttctgtagagacaaagagagagctctttgtcactcttatcattccatttcttaagtacttt

SEQ ID NO: 916935 - DNA, 4001 bp, Homo sapiens
ttcttctttagaatttaagatgatactatgctagtcaaaagatatgatggagtcatcataaacgttttctgccccataaatgtatcacaacgagtactttgccctcttatgtaagaggattataggacaaatgattttcagtttactccagtaaattgaaagagaaggctcaacttgcttcctctactaatttattatcttagaaaatagaagttagtatttctataaaagacatttgtaagctctaattttacagatttattatcatcattgtgtcattaaagtacttactgttctattaggaattctggagtatgtttttctttgttttctttctttcagaattattctgtttttctaaaaggaaaacaatatatacagaggttacttgactacacatagttcagaatcatttttgtcataaatatgttaattttattatttaatatttctacttaaaattttactatatattccaataaaaataatgtcatatatatccatatttagtatatataatacagatagtttggattttaaagttgtttgatgagctagagattgagagtctgtggatagtttatatactgattttatgaaaagtcaattatgctttctatagtgttttaatttgaaattagagtaacactaatctaggcagacattagagaatattacatttattaagaaataaatcacatgattcttagtcaattaaatatctggtgctgtctcaattaccaatatgactattacaaatcaaccttgtacagccccatgttacttttaagttttatatttttcaccgatgttagaaacacctcaatatgttatacatatttgcctattttcagaagctaatcaatatctagatataacctactaactattctagtacataggataaacatacatgtatttaaatatacatgtttatatacatattaatagatatgtaggtacatacacacacaaataaatatgtatatattacaagcccatcaggaattaagagaaaaatgattgcacgtcattgcataaaaaagataaactttcagtttaaagagtaaaaaaattaaacccttctcaagaggcaacattaagaattgctttaatgtaataaagatatcaggaatttctgatttggtttgacatgttaacaactcataaatgaaaatttccatgatgctacagacaagtacctttttatataagttctcatcattttcagtcttcaaaaaatttaggtatcatgaaaatgaggaaagaatgaaatatttaaaataggtcttataataagtatgttactctgtttttaagagttctcatggcatctattttcaacagaattacaaaaatattttaatatcagcagctctagctattgggtcacataggtaactcagcataaaatatctaaagtgacagcggtatttccaaaacctcatttactgcatctgctcaacagttaaatctccaagatctgcttttcctttattcctgcttgaaactcaactgtttcttagtaaaatccatttggaagagcaatgttaaaatgcacctaggtttgcctgactgcctctaaaaacatgacttagagccataatcaattttagatatgctttgtatagttttagtatacggacacttcttttttattaaaacaaaaactagagcaagattctgtggacatacacattaaggtaaacagtgacacagagcttcttacaagaaatatgggaaaaaaacctgttaaataagacaaagacattctattaaaaaataagagaatagttgacactatatacattgtacattactacttaccaagggccaggcttcccaaagggatgcagtgaaagaattaaacagtgtttttgacttacgagccatctgtggggatttgatttcattttggttttgcatgcatatctatcacaaggatgaatgggcaaacttgttctactgtaggggacaaacaactattttattcttggtggtagaatcagggaggagccaagatggccgaataggaacagtgctgtctacagctcccagcgtgagtgacgcagaagacaggtgatttctgcatttccatctgaggtaccgggttcatctcactagggagtgccagacagtgggagcaggtcagtgggtgtgcgcaccgtgcgcgagccgaaacaggggcgaggcattgcctcacttgggaagcgcaaggggtcagggagttccctttcggagtcaaagaaaggggtaacagacgcacctggaaaatcgggtcactccctcccgaatactgcgcttttccgaccggcttaaaaaatggcgcaccacgagattatatcccgcacctggctcggcgggtcctacgcccacgtagtctcgctgattgctagcacagcagtctgagatcaaactgcaaggcggcagccaggctgggggaggggcgcccgccattgcccgggcttgcttaggtaaacaaagcagccgggaagctcgaactgggtggagcccaccacagctcaaggaggcctgcctgcctctgtaggctccacctctgggggcagggcacagacaaacaaaaagacagcagtaacctctgcagacttaaatgtccctgtctgacagctttgaagagagcagtggttctcccagcacgcagctgcagatctgagaacgggcagactgcctcctcaagtgtgtccctgacccccgagcggcctaactgggaggcaccccccagcaggggcacactgacacctcacacggcagcgtactccaacagacctgcagctgagggtcctgtctgttagaaggaaaactaacaaacagaaaggacatccacaccaaaaacccatctgtacatcaccatcatcaaagaccaaaagtagataaaaccacaaagatggggaaaaaacagaacagaaaaactggaaactctaaaaagcagagtgcctctcctcctccaaaggaacgcagttcctcaccagcaacggaacaaagctggatggagaatgactttgacgagctgagagaagaaggcttcagacgatcaaattactctgagctacgggaggacattcaaaccaaaggcaaagaagttgaaaactttgaaaaaaaatttagaagaatgtataactagaataaccaatacagagaagtgcttaaaggagctgatggagctgaaaaccaaggctcgagaactacgtgaagaatgcagaagcctcaggagccaatgcgatcaactggaagaaagggtatcagcaatagaagatgaaatgaatgaaatgaagcgagaagggaagtttagagaaaaaagaataaaaagaaatgagcaaagcttccaagaaatatgggactatgtgaaaagaccaagtctacgtctgactggtgtacctgaaagtgatggggagaatggaaccaagttggaaaacactctgcaggatattatccaggagaacttccccaatctagcaaggcaggccaacattcagattcaggaaatacagagaatgccacaaagatactcctcgagaagagcaactccaagacacataattgtcagattcaccaaagttgaaatgaaggaaaaaatgttaagggcagccagagagaaaggttgggttacccacaaagggaagcccatcagactaacagcggatctctcggcagaaaccctacaagccagaagagagtgggggccaatattcaacattcttaaagaaaacaattttcgacccagaatttcatatccagccaaactaaacttcataagcgaaggagaaataaaatactttacagacaagcaaatgctgagagattttgtcaccaccaggcccgccctaaaagagctcctgaaggaagtgctaaacatggaaaggaacaactggcaccagccgctgcaaaatcatgccaaaatgtaaagaccatggagactaggaagaaactgcatcgactaaccagcaaaagaaccagctaacatcataatgacaggattaaat

SEQ ID NO: 916936 - DNA, 4001 bp, Homo sapiens
tacatcaaacgaggcatttctctatacctccttccatctgacagtactatcgcttagctgtccctgaagaataataagaaaagaaagcttatatccccaatgatggaattagagactgctgaagctgctgtaaaggctctgtccaacaagtaccatttacttgacctattatgcaggcagccaggggcatgttggtgttttgatatatttttctttcttttaacaagacgttacaaaaatgttttccccttcaggatttttaaaatttagggtatctttctagcattactttctaaacttagttccagtacaggaggattcttgtccaactgagcctccatgtgccttctaaagggagtgctgaaattgtataaacatcatgtttacatccattaaatattgtcctattaaaagaaaataaagccaggcataagtttggtatccagacaataaaatgcaaatagtacaaaggtagaataaagtgaaaattctacacaaatgtagcttccatacaaaagttaaacagttgctttatttcacgaaagggttaatactggagaaagtgaatatcaacatgtacacaaagctaactagaagattagctttctcaaagtagaaatccaagcctccctataaaattgttgtcccttgcaaatgttttgaaactttacattttttgatcccccaacaacaggccataccaagaaacctcaggaaagtaataatctattttaattgtttttttttttttgttactcaagaaagctttcaaagttcagatattaacactgatgtgcaataccaaattgttagccccacaggacagatggaaacaggaaaagtcagatggttggcactcaaaagcaaaagcaattaagcagttgaaagtgggttggattgtcggtttatttttgttccatttgaacgaatcaagtgagagacatagactcttgcaaggaggaaatcaagtcaaacttgacgcttcctctctctgacagcccaagctggactggttgtctactccccttattcagtttaattgctttatgtgctctgattttcgcagagcttgtattctatcttgtttacgttcccccccccccccatatccctctccccaacagaaagaaatctttctcctttcttcactccccctctttcctctaagaaaggcaatcctctccaggaggagaaagaaacgctgtgcgtgcttagggtgggaggagggcgagaggggaggtgtgggagagaaagagagaaaagattgagattgggggtgggggacggaggagagagaacaagagaaggaaagaggaagcaagaagatgggggatgcccaacatcaactccaggctctaaatcacgggcgctgtgcaaagtgcttttccaggagatgcacatgtagtctcatatttctcacaataggccacccggggatccctccctaggtctcagactcccaccactaaaacccaagtgtatcgagaagaaaatctttgggatggattcgagcagataggcaccgccgaggtggccgcgccgccagtcccgcttccttacctggagggcggaccgggaggtggtgccgggtctcggtccccagtgctctccccgcgtggaccggcgcgaggcacacgcgtactctcgctgcctccgctcttggaggggcagcctgcaacacaaaaggggtgtgtgggtgtgggtgtgtgggaggttttccagggccaccagctggtcccacgtggtcgcccccaccctacacacaccccttcggggcgccaagcccccctctcggctgagcaccaccctggggacttgcccggggtgcagcctcaagttgccgctgctaactgctgctgccgctgccgctgctgcaggaggaggtggaaagacactgggggcagtactcggtctagagcatccccacactgcagcttctccaggaatccctccagtgaggaggcggccgcccatcatctccgagccccagcatcctgattggctccacctcgggtacgctgcgccaaggagccaatccccgcgcactaataataggtggatccgttcagccaacatcgcccatcccagttctgttagtgtctctccatccccacagcggacagggacctgggaagcggggtggaggcgggttgggggagggggtgaagtaagaggggaacagatcccaaggagacacaatcaagggcgtctgataaaacctctaggtagactcaggaatgccccacaagctgttcagcaagcagtatgcacaggagaaagagagcataatacaaagcttttttttttttttttttactctcaatcaaaacctaccctgatactgagcatgcccagactgcaacagcgacctaggagtttcgatgtgtgtgggttcgccagctgtgggtttttgaaaagctgggaccggggacaggagaggtagaagtttgtctttggccatttaacccggcggagttgtgaaagctgggtagggtggggatgtgaaagggttccgcacaagtgtcctcaaactgagccgcggggaggtggcccacctggctgccggaggctcatcatgctgttcttctggggttccgggttggaagcgggggcgggataagctgagctttgctggaagcctggggacttcccgcgaagggtgcggtggagccgagatgcgggagaagcagctccgtcccataggtggggccgggagcgcgactccacccatcagcggcggctgccaggccgtggagagtgcactgggagtttccattgcagcgaccaataagtttgtacacttgggtcaagtgcaacattgttggagatgcttttttattttttcatttttattttttgccacctccctcccccatctctctcgaccccttgccagagcagtgacgactaaagcatagattctctccctgcttcctctcttcccagctgaaccgttctgctcggaagtaagaagcttttctcttgtgagggcggtggtgacctgattgtctctaagctctcaggcaatttatagcttggtaataccgaaataccgaacaggaaggctcagcgggtgggggaagggaccgcgcgccaggctaggggcgggagcggagcccagctgggagaggggcccgtccattatctgctccacaggtgaaaggatttcaaaacggagagaactatttccctttctccctccctcaacctcgtttaaaggcctttgaacctcttatttgttttatttagaaatcctagcattttgtgtaaacttgatcaatagctacaaatgagaactctcctaattgggttctttattttactgagaagattatcttggcatctcaggtagggaaataaatagctatctcaattccccaaacccatccactttgaactggagttttattaacattggtgtgcaaaggtaaatgtagcaagaattcaattaacagtaacacatttcttcaagtttttaattaaatctcttctacttatgtaatgtttaagattaagatccttattctaagtatacgggaaaagaaggcaacgtgatataaatatatccttctaagtgacaaacacttgtatttgggctatgcttgaataataggaagtttaacattagaggtagaagtgtgaaaataatgcaccccagacttgtgacttcatgtaaatattcactttccattttccaaaatagtctccaaaccttattttaaaatcatttcatagttggagaaataagataaaagaatttggtctaaattttatttcagttatttagtgaaggagaggaggaggagaagacagagaaggaagaaaaacgacaggataaaaagtagaagaagttggaggaggaggaaggggaggagaaggaggatggtgaggtggaggaaaaggagaagaaggaggaagagaagacgaagaagaattaagtaaccctgtaattttgttgtccaataaatatctttggatgagaagattattataatatccac

SEQ ID NO: 916937 - DNA, 4001 bp, Homo sapiens
acgcacgacacagaatacaacatgctcacacagtgccttccactgagtttcatacactcctaggaatttaacacctactgaacgaatggaaatgattctcagttgtgtttatacactgagaaaattttaaagtttccctatccagggtccaagcagcggcatatcttcaagctctgccaagtgcagacagagcccccttggctcacgttgccgtggatcagagaataccaaaccctgcagctacccatgtgaacgatggaatgtaaaagctaaactaaacccattcccactccccgcttggctttgacgcaggggtggtggtggagaggattcactaagtgtgccccgctttgctccctcccagcacgcagggctccatgttgtcctgagcttggctgtccagctcttgttgccctgactaccttcaactcttaaaatcccgccaggagatcaaaatgacaggaaaagcaaagggaaagaacctagagaaggaatggcaaccttccagtcgaaaatccccaaagcagtgttttttgactcctagtgcaacaagtgaccctctcaagcggctcttgaaaccacgcagcccgcaactcggggatccacctcgcgtgcgcccgaggagcacagcaggctggacacaccaaccttttccccaaccgtgacccaaacagtggcttggattcgatcctttccacccccaagccttgaggaaaatccacttgagacttttttccatctccagatttccgacggtcgatatcctcctgcatccagcccatttcctagtttcctgaagggtagggaggacgtctgtgagttggatgtctgagagcgtgcgtgtgctagggattttaaacgtctcccctctcttccacttcttcgatatgtgctctgagctttaggtgtcgcctcacaaatgggatcaataatccttgttttaccaactttgtcatgaaaccctagaaaatcatatatattaaaagggctttagaaattgtcaggtgcccgacaggttgcagccgcgggttacctcggaggccaaggcagccacctctgcaagggagttctgcgtccaagcatggcttgtccgtcccgcctggcccccatcaacaaggccgggaccagcggccggtggaacgagcgagagcagccctagtcccacaggtgagccgcccccacaagcagccaagccgcgagccgtcccggcgccgtcaccgcccgcactcacttctccactccgggagggagatgggaggcgtgggagaacgcggagaggcgcggcgaggctgggagcgggagacggcgccgggaggcgggaagcggaccagagaatgggagaagcccggcaggtggacaggaggaaacaaaacccaaacgccccaccctcgaagtcgtcaggagctgagcgaaggaaggagcgaggtaggaaagcgtggcgccccaaatatgccgcgggagcggcgcgggaggcgcagaaccccggagcttgcagcctagcgcgcggggtcccagcggagcgcgaggacgcgagcggagccctcccggttacctgtgctgcttccgccctggctgcccctgtcccgagggaagatgcccgagcacttctcccactccacctggccggcgaagcacagctcggtgacgatgtgcagagccttctggcacagactgttcactccgtcctccttgtggaaactcatcgtttggcttttctttcgttttctctttttttcccagttagccgtcttttcctcttcccgtacctctaacccctctggcgccctaagccatagtccgcccgcggtgactttggctggagattgcgccgctgagagccggcaactcttaggagccccacgttggccccatggcgggagcggagggcgtaggggaaggagaggcgcgcgaggaggctgcggctgccgcgaggtttgcgccaactctcccgccgcgcgagcgagccgaggcgcgctggaactagagacccggcatggagtgctgaggggaggggggagccgtaaaaaagccaaagcaagccctcgactcgcaagcacgcccccctcctctccccagcgcactggtgtttctggcgggtgcctggcggcgacgcgtccaatcgcagcccggcgcgggcgctaggtgacaggcggcggagcgcgcagacccggctccccgcgtcctctgaagaagggactcgcgagggagggagggagggagggcgggcggcccggcgcccctgccgaggccggggatgctcatcgttgcccagagttggcccgaggagccctctccgttttcccaatacttttccctgcatcagtgcagccatccccgccgcctttgtctctccaacttttccacggatgtattctactttctgtgctatctgcttctgcccttctggaaaagtcatcccaatcgaagaaaaactgaaaaagttaattagaaaaaagaatgcgtgaataagcaaaccctcttaggtagatcacaaaataaaatgttatttgtactaataatcagataagattctgtcgattaatccgtaattggcgattgagaatgcacaacttgactccctccatctcctttcttagcgacttaaaacaagacatgggtgttaaagggaacaggattaagttcaaatctgtcacacatctcagcctaaccttgaagttgttttcaggtcttggcgatcctcctacttcagcctccctagtagctaggactccagggactccaggcgctattttttttttttaaacttattgtaaagacaaggatctcactatggtgccctggctggtctcgaactcctgggctcaatcaatcctaccgccttagcttcccaaaatgctggcactagccaccacggccggcctgctttcgggtctttgcctgagtctgtaaaatgggagatttggactcggatgtcttaagctcacctgtttttataattctttaatgcaaatgggtgcaaatcagtagaactaaagcgacaaaataataaacatgggcttcaggatataatatgtttatatggtttttaaactgttttcgggcagagtttgatcccatatcataacctgaggattgatttaaccctcttgtgatgagggattctttatttttgaagtgggatacattgaacttgttagcgtgtctatgctagtagaataagtagtcttttttaaaaacagctaatcagttcatggtaaattatttgctttgcacaggactatggtaaacctagtataaatattaggcatagcactccagtagggaagcattcattagttgaatcattttgacctgatccataggacgattggtttaactaggactatttttaccacgaattaagacaaactaaaatctgcaggcttcatttggtttttgtctttatgcacactgacttgggtggtttttaagtcaaattgtctaaagaaataatttcactgtcaatcaaaaaatattaaacatctactgtatgcacaaaactaaataacacactttaataaggccctttccaattgccttttgccccccattctgctacagtctacacagacagaccggtagaaaacagcctgcaatgcaatgctgtactttcatatttaccatatgaactaattgctgtgtaggaggaccaaatgagtaattatctttatactacttacagattctaattgcttaagtggagtaatgcagaaggtctccctaatgaccctcttgtgtttgatttcagtgttaaacattaggtaaacaaattctgaaaataactttcctggtatttgtttatgctgttcctggcctgttgctactcttactgctgtgttttcacaacaagcagagttaatttcacttggatattcgtttttctgaattcatttctctgaaaaaaattttctttcatctaaaatgaatatcacaggttttgatttttttctttgttctttggaccatctcgcagctcattagcaggtgaatcaaaacagttt

SEQ ID NO: 916938 - DNA, 4001 bp, Homo sapiens
gaccaagaggggcagaggggacatctcattggccaaggtcttgaaacaagtttgtctcagaagaactcagatactctaactatcctgggctggaactttgtggctccaaacggtgtccagcccatacttggcactcccctgggtgtttttttttttaacggttctggccttttggatatggcacaactgctgccacctgcaaggctgccctggtgataactcccttggcccagcatgtggtgttcaggcagccacttttcccaaattgttgaatactctgcccacctcctataatgagatgctgaacagatttgagctgaagaggcagttaaacttcacacattgaatttgtaataagtcccacccgcaatcatcttaaaagcatttgtaccgatgtaattgctgtcatttcaaaaccttgaaaagacttcctccctatcctccccctgtacccctaccctgacaattcctattctttttcgtaaaggaactgtggaaatcgaggctcaatctggtttttttgctgttgttgttttcctatcctgactaagcagaggatagaggcgggcaagggagaaaagagaagaaggaaggggttgggatcttagaagcacctgaggttactgggggtggatgagcaaaagataagggaatttatttgcattttgaaaataaaacaatacacataactgataggtaaaatagcacacaaataaccatttgggaaagaaattctgactgtttcataccatccaggaaatagaagagatctgtcccttgcaaagggacctgaggtagactatagagagccttagaccaccctagctcacccctcacagtaccatccaatcaccaagtctcccatcaatcaacccaccaaacaacatatttgtagggcaccttttatgtacaaggtgtcaaagacatgcagagatacagagacacaaacacacctggagacagtgggaacatgaaaggaccagagaaacaaagaaatccaaagggaggcaaaatgccctctgacggacaacccccccaccccagtttcctcactacagctgtccagacaggcagagtcccaagttcccgtgatgtccccagtactctgccaggggagacttaccttgctgcggcccccgccaggaaccacctcctcctgtggctccttacagacagccccaaagctctgagctaggctgaaggccaggatggctgtgaatagcagcatgatcctcatggtgcctgggagagcaaagggacaggactcaggtaaaggagagaagaggaagatacagcatgggtgaagacacaagagacattcattaccagcagcttggcttgaccctgcttccccagcccccaactccactgtccaagccctggtctggagagagggtggaaagtatttctgagaagggggtacagcccttgggcttagtttccctgctaccccatcagatatctccccaggagatgtgcaatgctatagtggtgccaggaggactctagctcccaagaaagatgatagatttgtaggacatggactggtctgtttcctcagtcagctggaggagggatcctggatgctattttccagtactagataatcccaagacttaggcaaaaactttctggtatgaaagaatgagtctgtagccacaggctccaaacaccaaccagctctcggccctacaggtgctttgtgctcaccttcccagtcccctgctcccctatcagaggctgccatctgctttattccctcctgacgctggctcctgtcccctggtgccagctctggtccatccagcattctcccacttgcctacctgtggagcagctctgtgccgggggctgggtggtctggcaggatcaaggaactggctaggaccgctgcctgctcccctcacacactggtgctgccggtgctcctgcaaagagagaaaccgagtggaggggatctaggaaggctgcagtcactcagtcccagctccctgataaaggctctgggagggtctaggggagctgaggggaggggctgagagtcaccaatcccagggtggctggaggggaggcggggaggctgtaggggggaggaggatgcagacagtagccacacacccagacacacacataccccacagacccagcagtgagaccatttcctaacagcacccgagctggctgctgtgtatggtttgtgtacagtttgacactgctggggcttagaggacaatactccaaaatgaaggcctcaatagccgcctcagaagcagaagtttttctctgaccctctcttgtcctcttgtcactcggttccattctcccccaagaccagctataaaaaccagaacccctttgccccaaagccagccataaaacctaaaattactctatgtaaaaactggccaaaaaaattatctgaccggccgagtgcagtggctcacgcttgtaatcccagcactttgggaggccgaggcgggcggatcacgaggtcaagagatcgagaccatcctggccaacatggtgaaacgctgtctctactaaaaatacaaaaattagctggtcatggtggcgcgtgcctgtaatcctagctactcgggaggctgagccgagattgcaccactgcactccagcctggtggcagagcaagactccatctaaaaaaaaaaaaaaattcagaaaagatgacactcaccccttttttggggtctcctactttcgttgtggagtttcacgagtcatgggcagattcttctcaggtctaaagctctgctctcttctacactacattacctaatctctttggtttttgaggatgccaaaaataaattactttgtattatttaaaaaactagacatatagctagtcatatataataactagataaaaaatacagttttagagatgacttatgacagttattcacaacaaagtattactactatacagggctacttatttcttcgtgcatttaaatttttaaaaacatggtctggggcacctaaagacaatgaaagcactcaccattgaggatgaaactcccattaaaaataggctaagcacgccaggcatggtggctcacgcctgtaatcccagcactttgggaggccgaggcgggcggatcacttggggtcagaagttcgagaccagcctggccaacatgttgaaaccccatctctactaaaaatacaaaaaattagctgagcatagtggctggtgcctgtaatctcagctacttgggaggctgaggcaggagaatcgcttgaacccacgagacagagattgcattgagccgagatcacgccattgcactccagcctgggcaacagagcaagactccacctcaaaaaaaaaaaaaaaaaaaagactaagcacagagtgggctaatcggcactgggctgcctgccagccttgggggagcatctttacagtggggcactcgataaaaatgccacacatctcgtcccatgacatttccctcttttggggggcctaggattcaatataaaaatgagatccttgattaggggggttctgtattctgccttccagctatgcctgctttacccatttaaatatgaggccctaaaacctatgttttcttccccctttttattaaagggctccaccctaaaggcaataatctaattaaaaaacaagctagttaaaaagcccaaaatacaacttcctaaaaaaaaaaaaaaaaaaaaaaggccgggcacagtggctcacgcctgtaatcctagcactttgggaggccgaggcaggtggatcacaaggtcaggaatttgagaccagcctgaccaacaaggtgaaaccctgtctgtactaaaaatacaaaaattagctgggcgtggtggcacacccctgtaatcccagctactcaggaggctaaggcaggagaatggcttgaacccagggggcggaggtttcagtgagccaaggtcacgccactgcactccagcctgttgacagagagactccagctcaaaaaaaaaaa

SEQ ID NO: 916939 - DNA, 4001 bp, Homo sapiens
agaaatctaattggaaagagctcttagttttgcgactccaaaacctcttttgaaaatttagtttgaccttccaactatctccaacagatcaaagttaaacagtccagattccaaacctagtatagttcctttaaatctgcattgtaaacattgatactgatatgctgccaaatctaaaaaagtttcttagctccttgagctaaaatgaaaaaccagtagtccaggaaaacgcaagggtctatcaaagaaatattcttattaatctaaaacacgggtctccaaaaggatccctgtccctttcaacttcttgtggagggggaagtgggggaggtttgaagaagccccttccaacttttcacctgaccttttcattaagatcaggaagcccctcgctttcaagacatccacatcagactctaaggaacgaatgcgaagccagcgggccagtgagaagaggtcaggccgcgcaggtctcttgatcattccaagatctttgtcctgcagccagccccaccagcccctccagctcctccagcccatgcgtttcacttcagagatgtttcatgacataatccggctccggagtcccccggagtcccgggggctcacactccaccctcagggaggtcgctgatgccagaccctgggagcacctccccgctccactcgtctgcgctgcagccggttcctatttgcccgacgccgcgactgcgacccaggctccccgccgcagccgttcttgggggggctcccgcaactcagcgggcgcgaccccccgcccgctccctcgctgctcacgccgggcccccgctatgtgactgggggcccgacccgcacccatggggcaccgctcctccctcggggtccgcgcctgcacccgacgctcaaagcccctctcggagtcccacgctcgcatgcgctgtcccgagccctctgggggtcccctcctctcaccccgctgtcctggcccctctcggggtcaccctgctcccacccgctgtcccggcctctctctaggtgtcctgctctcagccccgctgtctcagcccagcccccttccgggacccctcctcttctcccactgtcttggcccttcctggggtcttctcacactctgttctaagccctctggggatcccctgtcttcacatcccctgaccggtcccctctctttactctgtcctggattctctctgggtcccctcccctcacctcggggtctcctctccccgggtgctgtcccagcccctctcggggtccccatctctcagactctcagtgccggcccctctcggggacccttcccctctccccgctgtccctgaccttttctgggacctggtccttcaggggaccccctcccctcatccccctatcctagtgcctcatgaggcacccacccctcaccccactaccccagcccctctccgggtcccttcctctcacgcgcactgtcccggcccctcttggagacccctcccctcagactttcagtcttggaccctctcggagtcctctccactcagagccactgcctcggtccctctcggagtcccctctcctcacccgctgtcccggtccctcccggggtctcctctccacagtctgcactgtcgagcccgctcccgcaactcccctcactctgcctggggtcccgccgcctcggctcccactgtcatgccccgcgccccggtgctctcacctcagacctgctgtcaccacccccgggcccggcgccgccgccgccgcttcctctcccacacttgttcctgagtcgctctcctgtggcttgttccccggcggatccttgggtccggtcgctgagtgccggatccggctgtgcgcagcctctgctcgcggtctcggcgttgcgtcccactctccacgcaggaccccgccgcccggcgccacaaggaccctcccgcggccgccgccgctgctgctgtccgaggtgcggctcctgccaggggtggccaatcgcaccggactgcgccgagcacgccccgccccaccgtctcagtccgcccgccccctgccccggaccacgccccaagctcggctccaataggctctctactgaccttccctgatcgcggggcacagggccggggccgtatataggtatttgattgatggagcctgggaagccgagcggtcgatggaacccgaggattggcggagttgtcgatgggcgggacagggcagggcggggtctcctcagacgcggaagaccttgcaactttagtaacctacgggcccgcctggggtgcggtcagtcttgtttgtgctgctctccggtcaaagttcatggcgcttctccccacgcctttacttttcttgggagattcccagggaccaccatgttagagcctttggggaggaccccagtctctcgctagaccttgcacagctttcttagtaattctgccatgaactaatatagcattaatttgcccaggatttgtaaaaatttcctggatttaaaccatttctttttaaaatctcttgcaagggagttgcctctccttgaattgagttcagcagccgtcagtttgataccgttgggggaaaaaaaatctatatacagtactaggtgcatactttgcccaactaagcgttcaatgcggggcacattttgataggtgcaaggacaaagctttagaaattttcagtttgtaggtttttatgacagtaggaagactgtggtaggggaaccctattattagcttaacaaggtttcagcaaagctattcaatataacctttttccagggccacaggttttaatgattctatgtgaacgtgtggccaaaggataacgagctttgacccaggtttaacatgtgataatcagagactcctcttgatccacgctaaaggatagtgcctgccaggggtgaaagtgcatcatgctactaagacccatttgtgttatttttgtgaaactggatatgctgatcaaatcaacaccggaaacagaaaactgctttccttactcttaacgccaaaagtaagtttatggactttagaatttagcattttatgaagaaattgtctcaggaacacattttgatcctaagttttgtcagatgtatacaggccttagttctcagagaaccctcgattgttaactttttaactccagctgacaaaatgtgtttgtgttctaaacagtatacatgtttcttctagtgttttaagaatcatacgccattcatcacctgaggtcaagggttccagacctgcctggccaacatggtgaaatcccgtctgtacgaaaaatacaaaaattagccgggcatggtggcacccacctgtaatcccagctactagaaaggctgaggcaggagaatcacttgaacccggaggcggaggttgcagtgagtcgagatcgcatcacttcactccagcctgggtgaaagagcaaaactccgtctcaaaaaaagaaaaaaagaaaaagaaaaaaaagaatcatactccattccaattgtgatgtccccctttaaagtttcagtttgggtgttagggtaggcagagaaggcctggaagcaaagaagttgtggaaatggggctggcagggcttcgtttcaagtcaagtcgagttcctgagcggtgtggctgagtaccgttttgagaagggatatataaaaagatttcaaggtggtaaaacttggttttgagggaacttgatttttacaggagtatagcgactgtccaaaatcatattaaataaatctaaaggttaggtaagactaaagccataagagaatttttttgagtaggtccaccttcactaaagagcattttttagttctgcagctggcaatctggacagaaaaaaatggggtaagttttcataacccaagtgctcagttgtgtctattcattacatataaaaaagaaatgcatgaccattaacagatgctgtttgcagtcaagaagacagcagtaaaacataagcaggataaaaatctcagcgtcttgaaaggaaaccatttagca

SEQ ID NO: 916940 - DNA, 4001 bp, Homo sapiens
tggagtttcgctcttgttgcccaggctgaagtgccatggtgtgatctcggctcaccgcaacctctgccttccgggttcaagcgattctcctgcctcagcctccctcgtagctgggattacaggcacccgccaccatgcccggctaattttggtattagtagagacggggtttcaccgtgttgaccaggctgatctcaaactcctgacctcaggtgatccaccgacctcggtatcccaaaattctggaattacaggcgtgagccaccacacctggccttgcttttcattttcttacctgcagttcgcacagtcccctgggggctcagtggcaagttcagcgtcgggtgccagagcgcctcattcttggtgaccctgggagtcttcatcaccaaggagatgctaggtccccctccagagacctgcatgttggccatgaaccaagctgctgtcttaacagtggtctctgtcatctggagaaagtagcgggagatctcacaggtcacctccttcccactgcagtcagcatggagcaaggcctcggcctggggaatctggaccaggtccactggggagaagcagggcacacacagagggcaaattagcgtgagaacaccagggccaacgggaggcagtatgtgtggctgtaatcgggacctgggctgtcctggtggagggagcccgggaggaccaaggacacaggtggaaggcttttacctgaggcctcaaagataataggtgggtcatcttgggccagtgtgcccccttggaaatcggtgaagtcctccagggagccatcgtccagcactggcacctgcttcagcacaagggaggcccttgccctgtcctcactgctggcgagagctccacggtgcgcaccgtccttcgccaggaagcagtctaggaccacgtccactgcccgccactgcccctctgctgggtggggctctgcagacaaaggctggggtgagcaccgccttccccagaaagctactccacacttgcttcctgcccccgccctcaagctgtggagtcatcaaagggtaaaagttgccatccaagatcctagctgtttctgtgtccctctattctcccgtcatccccaaaccagctttctggagagcacctgctagtccaggcaaatacttcttggtgagagttaaagtcctggatttgccttgctcagaggagtttatgcttgcatttccaactgttgaataaaagactatcttttcagtcaaaggaattctcagaaaacaagcaagtgccaccgcagagagaggagactggacagttactgttgctggggcactgacagcctgcactgctttctcccatttcgggtagccttcccctcccccgccttcaaggtcaccttccaagtgatttcctcacctggggagtcctttcctcttctgaagtgtcagctcccaggccagtgccctctctgtaggacagtggctcctgaccacagccacagaggcagcccctctttagcattttccctgtggagtccccaccctccctccacacacactattggttccttcctttgccagccgctgagcctttcccctgttgggcttagaaggcgatggggtcatccccggcccctttgctcttctggaatctcggggagggtggcaccctggggcttcagtagctcttctcccagccagctctccccgactcccagactcactggtttctgctgctccagatagagccaggcagagcagcaggcaccagccctcctgtgtgcccatggaggctgctctcgagttccctccttgcccaccgcccttctccacagtcctacgctgcttgcgaggcccggcggaagaagggggctctccaagcacacctggcagcctgcagcctttaggtttcttccctgttccctctgctgccgacttttctttcactttcacttagagcaagatggcagcccgcgtccctgtgtgaagccgtctgcagcagctgccagagccctgcttgctgtttcctttctcaccacccacctcacccggaaatcccctggtgatttcaagacctgacctctgcacccttttgctccccacctgtcccaaaaaagtggagctataactgtgggaaaaggggatctgaagtcagacacaggatccacagtagcctggggacctttctcacccccgcccttaagcaggccccaacataaccggctgagaaacctcctctgccagatcctgacctgagccaggaggcggccaggaaactggattttgggactgggatttcagagaggaagctggagagctgcagggtggtcatctgtcactttattttgcccgtcttgtagcatgtgggtctttcgcagcaggaagtgtgttttacaaccagagcccccgccctcctgcagcgcaggcgcagctggctgggctcctgcttcccactctccacctcatccatatttgtcctcgtccctgccagtctcgaaaaggcactctgtcacgtgtacacaggaaagggccctgacaagaggatgggactgcagttgtggctgccaggtctcactctcccttggatggtcggcggggtgggggtggaggccagggctgtagtgcagctcccgcaggtgctggctcagggggagcaggcaggctccggttttcggtaatcctcctggatggggatggtgctgccctcctcctccctggggcagctgtaatgacaaggctctgcaggctccacaggactttctcctttgtctgcagaaggagatccgatgagtcttggccagcagtgggggcagggggagacgggagaaggagatgggtagaggcgggtgcgcttgggggaggggtgtcaggagcacgccagctaaggggagagaaggggtaggaccaaggctggtgaagtggagctggtgggtttcagtgagattccaggcgtgggcagtggggttgagccagtggggtgtggtgcaggggcaggaccggaggcctgtgttctgtctcttacttgatctatatttccttcgttgatggaggaacagggccccggccagggtgaaaacaaggaacattccagagaagatcacaaggatgcgaataaaatcggagctgcacagggatctttgggctgtaataggaggggacacacaggggttaggggagggtctagcccttggctccctcagcccagccctcctgtcaccttgcctctcccctttcccccaccttattctatcccacccgccaccgttggccaactcctctcctaaacagtggactctgctttttcccctcctcttatccctaatcctaggagctttctgtctggcttccctcctggcccctcgtgtatgcattctctctagcggtggggattaaggagaaaactcacgtggccagtgggtagagagagtccgggcaggcagctgcctgaagtcagccagagtctgcatgtgcccagctgtcctggcctccagcatctctggaaaaacagagacagaatgagtagcagcaggggaccccatagggcacatctgaaggcctgagaggtgctggatgggatgggaaggcagaaacaggctgaccttatctaggggtaggagtggggagtactggttggggtatcaccgctaccccacgtgatggcacagagagttgcctggaacttaccactgacataaggtaagtgggtgggctgagggtgtgggctcagggcctgagacgaccgagcggtcagcgaagggtttggaagaggatcacactcggtgcactccttgtccctgcactgccagccattgcgacaggcacactcagcattggcagtgatggtgcagttgcgaacgagaagacctgggggaagagaggcccagggagcataggacactcagacctgtggagaccttcaaggtccacttgcttcatcccccaacccccatcccaggcccacctctagggacgtgcttccctttccattcccacccctgcaaaggcctgccctttgctcacggtccc

SEQ ID NO: 916941 - DNA, 4001 bp, Homo sapiens
cttctgaccaacctccccctgctgaagactggaagtgtttcactaattgctggaaggaagagcccttatctttccgttagcttccagaattaagccatgccaagcaggacttctgagctcaaacgccttgggtggacttctgagcgcaaatgctttaatttcctttgcaaagcactttcttttccctcaataaatacagagagctggaataagagagggtaggctctggagtaaaagccccactctgccacatactaggcatgtgaccatgcaccagccatttactatctcaaacactcagtttcctcatattcaacatgggcgggcggggggaggagtcgggggggcggatactaccacctacaatcattggttagactgaggtttaaaattaaacgggaatttggttaagcaccgggaacagagcccagcacgccaggcactcactcccccaaatactccactgggatttcagttatcttctcttacttttcctctagggtgatggggatctgccagatcactgtgggagtcctgctcgctcctctaactctcccacgtcctacccaccttcttacagccctgttctcccaatccagtcagtagcttttcccctgaaatctctccttccctcactggccttggagaaaaggactgtgaagagagagactccaagaaacaaagccatggggacctgcaaatgcacaccccagccaggctgcccaagccttcctcaccagtgcagctggtgtcgccaacggtgacccggaaggtgaaattaggctggtgggcttggccctcggctttgagaaggtcgtacacaggcgtcttccctattctggtcccatactcctgcagaaggctgatcggggtcttgcctgggttggcggccagcatttgctctatactgggggaaggggcacagacccacatcacacctcccctctctgcacccacctagccaagcacttccataccagacctaggcacattatgggggacatagggtccaaggaaccccagacagtctagcatccattggctgggttccaagtggaggtgcaggctggaaaagtagggcccactaccccaaagcaaggggggaagaatgcattgctcctgcctcagttaaggtgggcacgatcctgtgccccaatgcaggttgaaagtgcataccccctgacacagtgcaagccaggaacccagtacccaccaaatgcactgaatgtgggggcataaagcccagtgttccagtgcagtctgggaaccgggccaaccccaaactatttagagctggaggcagcagccactgccccggtgcacgccgggaaccactgcccactgccccagtgcttgccgggaacaaccctcaggccaggtgcatgctggggccgcgccgctactccctccgcacggccccacgcttttcgccctgaaggaatcggtacgagacggctcacctaggcagcccgcagcccgtggtagtgccggagccttgctcctcttcactcattccctcctccgtccccgcgggcgccaccgtgactgcagcctccacgcgccccaatacacagccgacgagctagggccggggccaagcccggagtcgcggccggtagggcccgccgcggggcacgctgggatatggagtcccccgcccaccctacttcgtgagcctccatctggaggggagctatccgccccacaaccctctgcgtgcgtggctcgcccgggcaggctgcaccgccttctgggaggagcgggccctccgccgtcgcttctcgagaaggccgtatttttttgtttgtaataccgtcccgcctccttccttccgcgccccctctctcccggtccgtgaagctgtggacatgcgtactagcggaggggaagccgctgggtagggaggcggtaaggactcacttgggcacggagccttttggatcgcgagaaaactacagaacccaagagcccgcgcgccatctgtgtcgcagctggagaggcagggtcaagcacgcacgagaagcttcatggcgtcattggttactcccattgcgattacttcccctaggtgcactgagattggttacttcgactaaaggggcggagacaaggaaaagtcagccccccccgaccccgcctccttgatgaaggaaggttgtgattggtccggagaggctgccgtcggatcctggctctttgcggtctgggagggtgggccttacctagacgccggaggggaccgatctctgtttccgcagggctctggagctggtgcaggtttaagtccgtctcagacagtcccctcaacccacagcctaagccccttgcccttgggcctccgtgacacagaacttgcttccttttcctaggtcgtccttcacctcccttcaggtgttgcttcttttgtgaaacctttttagaaccgctctagtgaacctctctttaactggcgaggaaacctctggggcctgataatcaggctgtaatgtgggacgacaggattagaaggactaggcaccttggtggtcttgttccctcttccatgagtcttgggtctctcagctgaagagagcaaaagtgaattttggccgcctaagattaatcaactgatctgggtgttgagcagacgcgcattgtttagtcctagagccccattgcctcctcccccaaagttgcacaaccactgggctgagggaaatcttgtgaccttggagagagaaagggagagaccacattaaaaaaaaaaaaggttctaatgagtgttctgagaaggggtcaagaaagatgtcttactctgagccggggttggaggtccagaggaatcttgaaatgataatgaggggtcatccaggaacactggaggaggatggggcctagagccgagtgaattccaagtgggtgaaattggagtgagtggtgacaatcaagggaaggagagctggcaagatcggtatgatagggggagcaatgccagagcgctagggatcccaactgaggggctgctctctccgatgtagaaaggagtctataagacgggtcatagggggttcctgtggaatcagcctgaggcctgaggtgggacctccataggacaccgccagcagggaggcgcggggcccaggcgggccaggtacgagcctggagcgcgccggatggcagcagcgggctcctttaagaggccggcggctccatcgcagcatcccccgctcagggcgtgtccgtcccggggggccaggggcgggggccctggaaggagcgggagttcaagccgagcagggacggggctaggggtcggggggtgggggcagaaagctgaagctgacacccgtgcatccggacaccgcacgagcatcgcctgtgacagcgccccgggtccggtggagggcagcggggggaggagggaaggaggaggagaaggaggaggaggcgggagcagcatccggagcggagctgcagcagcgccgccttttgtgctgcggccgcggagcccccgaggtgagagcctggccgagttgtgggggggtggggggcagggatgggtctgggtcctgggatccgggcgtggagggagggtcgggatgcagatgtggcctggtgcggggtgatggcgtggggatgctgaggctgtggggatggaggaactggggacctggacccgacgcctgtggggctgggaaggaagggaatggagcggagggatgccgcggcccagcttggagacgaagggcctccagagctggaaaggaccgtattggggtggggtggaggatgattgggggacagacttaaaggacagagggcaagagaacatctcctcccactcatcctcaggaagagagagagggaaggaggagggagagttttggccccctctagggaaggaaaggaagggcaaggactgatatacccaccatctccacacacacacacacacacacacacacacacacacacacacacacacacacacacacacacacacacacacacacacacacaca

SEQ ID NO: 916942 - DNA, 4001 bp, Homo sapiens
aatcagggaggctcaaccaacagcttcctcctcggatcctttgctgccaaacaccggcgaaaagactgagaaaagagagtctcagagaagagggtatctttgtacccaagaaccagaggagcaacaaactccaacctgcgcgtgaaggaaggacatcttgctagaacaaggaggtatgttggggagtaactccctttagcctcaagcctctacccctctccctccctaacccaggccccaacctactgccacaacccctctatggggctaaccaacccctccaccccaagaattcttcatagcagcagaagccctggaaaaccctgttcaggtccagagggactctcaggaagaggccaggtcagggtggctaagtgtcacctggccaggcctcggggcagagtgggtggtgcagggcctgggttccttgaagggcttctgggatgcctcggttcctccctcacctgctgtcctccagggccggctccagcatgctcccccctttgaggtgtttgagggccacctcagctgccttgtgcttggctgccttcttgctggggccctgacctgagagagggggcatgggcaatactggaggtcactgaaaggacgggaaagaaaccagcatcccacagcctctctcctcgtagccagagggaatcaatcaagccccttctgaccaacctccccctgctgaagactggaagtgtttcactaattgctggaaggaagagcccttatctttccgttagcttccagaattaagccatgccaagcaggacttctgagctcaaacgccttgggtggacttctgagcgcaaatgctttaatttcctttgcaaagcactttcttttccctcaataaatacagagagctggaataagagagggtaggctctggagtaaaagccccactctgccacatactaggcatgtgaccatgcaccagccatttactatctcaaacactcagtttcctcatattcaacatgggcgggcggggggaggagtcgggggggcggatactaccacctacaatcattggttagactgaggtttaaaattaaacgggaatttggttaagcaccgggaacagagcccagcacgccaggcactcactcccccaaatactccactgggatttcagttatcttctcttacttttcctctagggtgatggggatctgccagatcactgtgggagtcctgctcgctcctctaactctcccacgtcctacccaccttcttacagccctgttctcccaatccagtcagtagcttttcccctgaaatctctccttccctcactggccttggagaaaaggactgtgaagagagagactccaagaaacaaagccatggggacctgcaaatgcacaccccagccaggctgcccaagccttcctcaccagtgcagctggtgtcgccaacggtgacccggaaggtgaaattaggctggtgggcttggccctcggctttgagaaggtcgtacacaggcgtcttccctattctggtcccatactcctgcagaaggctgatcggggtcttgcctgggttggcggccagcatttgctctatactgggggaaggggcacagacccacatcacacctcccctctctgcacccacctagccaagcacttccataccagacctaggcacattatgggggacatagggtccaaggaaccccagacagtctagcatccattggctgggttccaagtggaggtgcaggctggaaaagtagggcccactaccccaaagcaaggggggaagaatgcattgctcctgcctcagttaaggtgggcacgatcctgtgccccaatgcaggttgaaagtgcataccccctgacacagtgcaagccaggaacccagtacccaccaaatgcactgaatgtgggggcataaagcccagtgttccagtgcagtctgggaaccgggccaaccccaaactatttagagctggaggcagcagccactgccccggtgcacgccgggaaccactgcccactgccccagtgcttgccgggaacaaccctcaggccaggtgcatgctggggccgcgccgctactccctccgcacggccccacgcttttcgccctgaaggaatcggtacgagacggctcacctaggcagcccgcagcccgtggtagtgccggagccttgctcctcttcactcattccctcctccgtccccgcgggcgccaccgtgactgcagcctccacgcgccccaatacacagccgacgagctagggccggggccaagcccggagtcgcggccggtagggcccgccgcggggcacgctgggatatggagtcccccgcccaccctacttcgtgagcctccatctggaggggagctatccgccccacaaccctctgcgtgcgtggctcgcccgggcaggctgcaccgccttctgggaggagcgggccctccgccgtcgcttctcgagaaggccgtatttttttgtttgtaataccgtcccgcctccttccttccgcgccccctctctcccggtccgtgaagctgtggacatgcgtactagcggaggggaagccgctgggtagggaggcggtaaggactcacttgggcacggagccttttggatcgcgagaaaactacagaacccaagagcccgcgcgccatctgtgtcgcagctggagaggcagggtcaagcacgcacgagaagcttcatggcgtcattggttactcccattgcgattacttcccctaggtgcactgagattggttacttcgactaaaggggcggagacaaggaaaagtcagccccccccgaccccgcctccttgatgaaggaaggttgtgattggtccggagaggctgccgtcggatcctggctctttgcggtctgggagggtgggccttacctagacgccggaggggaccgatctctgtttccgcagggctctggagctggtgcaggtttaagtccgtctcagacagtcccctcaacccacagcctaagccccttgcccttgggcctccgtgacacagaacttgcttccttttcctaggtcgtccttcacctcccttcaggtgttgcttcttttgtgaaacctttttagaaccgctctagtgaacctctctttaactggcgaggaaacctctggggcctgataatcaggctgtaatgtgggacgacaggattagaaggactaggcaccttggtggtcttgttccctcttccatgagtcttgggtctctcagctgaagagagcaaaagtgaattttggccgcctaagattaatcaactgatctgggtgttgagcagacgcgcattgtttagtcctagagccccattgcctcctcccccaaagttgcacaaccactgggctgagggaaatcttgtgaccttggagagagaaagggagagaccacattaaaaaaaaaaaaggttctaatgagtgttctgagaaggggtcaagaaagatgtcttactctgagccggggttggaggtccagaggaatcttgaaatgataatgaggggtcatccaggaacactggaggaggatggggcctagagccgagtgaattccaagtgggtgaaattggagtgagtggtgacaatcaagggaaggagagctggcaagatcggtatgatagggggagcaatgccagagcgctagggatcccaactgaggggctgctctctccgatgtagaaaggagtctataagacgggtcatagggggttcctgtggaatcagcctgaggcctgaggtgggacctccataggacaccgccagcagggaggcgcggggcccaggcgggccaggtacgagcctggagcgcgccggatggcagcagcgggctcctttaagaggccggcggctccatcgcagcatcccccgctcagggcgtgtccgtcccggggggccaggggcgggggccctggaaggagcgggagttcaagccgagcagggacggggctaggggtcggggggtgggggcagaaagctgaagctgacacccgt

SEQ ID NO: 916943 - DNA, 4001 bp, Homo sapiens
atataaaaatattgatttggaaacctgacatagaaaattaattaagtccttatatttggaaatattccactcattaggccataagtatgagatcaaggcactttcggaagttgccaaaataagtcactgagtttataacctgggttggacataaaagttaactttaaaactcaaaatttgaaacgtttctgtgagtgcaagtttgtgtatatgaatgtgtgtgtgtgcatgtttatgtgtgtgtgtgtatgaagcctgaagacagaacatttcatatttcacccagattctatcctgtgttcatcttgtgtcctttggtcagggactgtgttgaatcttgcagcctttggatcgatgcttctagaaaaatctttactcaactttaattggttcataacctgccttatctcaaatcactgattttgaagagcatatttatttcatcagtgttttgatcccatatccctcaactagacccttgtttccctaactatatttcacagaactacatctactcctctgactacttgctacacatcgtacaccagtaaaaaaggatgttagattctaaaaaatgaaaaaaaaacctttaaataattaaaatagcattctgtaaagaagtaccaccatctatcctcacttccatgttctaaatgtcaagattgatctaattttctttctttcttttttttcctttgggttttctgggagaatgggtgtccttgcttcagaaaagtcaggtaaagcacaacaagaagttttattttagagcttattctcaccgttataatctttacagcgaatagtctccaggctgatggtcttcctctaggaagtttgtaggaagaagttgcagggtggggaagctgactaagccactgaatttgcatgtgagattaaaatctcctcaaagactgagattccctgaaacatagtcaaaacaattatggaagatttcagtgatctttaatgacacagttaaaaagacaatgcaagaatgcagtgcaatgaaacagatcttcaaggatttattcactggattcctttcgtggaacatccatctcttcccaaggtgtctatgtgactctgagatttttccttttctcacagcacttcaattgctgcagtaccctcaaagaggcttgctttagcttgctgtttcctagaattaagataaatgagtgaccccagggatagatggctgtggttgtcattccaaacataagcagcagtttgttttctcgcacagtaaaacatgatatttctatggccatgcctataaaatacaagataaagaggatgatgaaagatatcaaaactttcattgccttcacatgagcttctgtgttggagtctctcaatcctgtcacattcgattgcatctgcctgttgtgtctccaaagggaaatgattaaaaaaatacatgtaattagggatagtgtaaagaagaaaatgactcccagatttagcaaaatctgtttaataaagtattcacttttatacatgttgagatcccagactgtgtcattcttcgttttataatcattaagaatcttcgcaatgtatgcaaaattaagtaacgatgaaataagtaagaatactatcatgaagggaagaaccatatttgttctgctcttcaaccagagaaatatgtagttggaaaaatttgctatcttcaggaaatagaagatgctgaggctggtggcaaaccacatacttgattgattaccaattacccaaaagtaactaatatattcaattaggttaccggaggcatatatatttggagagaatatctgtataaatccatctgtaattattatccatatcagaaaaattcttgaaatagctaagccggtgagaataaagccaatcgtagataacttattcttggcacagtcaatgcagtttacaagtccaataaatccattccccaaaaccccaaacactgactcactaactacaacaaaaatgaagatgccttccactacacgtagcatatctgctaattcttaatattgcttctgttacatctatcttagattacctgctgcagaatgaggcatatattggctgctcgacggaagtgtgactttcttctctttcattatataaagacttgaaattgccccagtaatggcttgagatggaatcagaaatttcttaatgaagacctttccaaatatgtctacaaaacatagctagtctggagaatgtatgttcagactgaatgcctatctataatttgttaaaatgcaaatgaaagtttctgtttcatggattttacatgtcctcctgagactattttgcatttaataaattgaattgtggaggaggagtgccaaacatatacctatagaatgtaatgcaaaacagaaacaaaaattttgactttatcttttaaaatatcaaatcattatttatgtcatttataatcaatttatatatgtacagaaaatactatatagaaatgaaaaacaaatttagccactgtagatacttactctaaatgatcgatttaatttttaattaaaatttaagctcaactctaggtatgacaagtttcacaaatatgtcacaaatctgttgctgttgttttatacttatggttattacacccttgaatgcagaagattatgttgactacccttgacatgaaaggctcttaggaataatctcttcatttaacacattactgtttgctggcacccattcatttatccaacaagtatttactgaatgtctagatacaacaagctctcttttgatctttgagggaatatagtggtagacagaatttcaaaacttgtgtgatttatggagtgtatattctaatgagggaggtgggaaacaattaagtaaatcaacatactgatctaagaattaaaagtgaaattaaaagtgaaatctaacatttattgagcttttattatattcctagcgctatgttaagtatctttttctcatcttaatttcacaagccttcaatcctttaaaagaggggctatttttgtatttacattaaatatgaataaactaagctttggagaaaagaagaccttctctcacttatcctggcatgactaccataaataaaattgcacaatgatttcaaaatgaagttaaattaagcttaggaatagactacaaatgatagcaaaacaaaacaaaccaaccaaaagcaagtagaaaacttaaattctcatgggctgcacatactgaaattgacagataagaatatgtatagataaattagctaatgtatacactgtttacaaaaaacaagatgcaatttcagagaagagcagcaagagactgttagaaagaaattggaacatttggggaaaaaacttctagaaatggagaatataattatataaaatgtaaatgaactaaatactccaagtaaaaaattaatagtaacaaagaagaatttaaaactctgactgtatactgcttacaagaaacacaatttaaatatagaaaaggaaaactttaaagtaaaattatggaaaaataagccatgcaaacatcatccaaaagaaatctggcataattataacaatattctataaagcagactttaaggtaagaagcagcattagagaagaaatggggagtgtactttatagtgataaaaatgctcaaatctacagaaaggtagggtaatcccaaaaatttatgaaccaaataatctaccaaacatttacagaaaaggaaaaataagacaaatctacaatcacaatgaaagactgtaaaatacataactcaataactcatcttagaaacaccaaaaatcaatagatggaaaatacatgaaaaaacaattgacaaacttgtgttcaacggtaaaataattcatattcttttcaagtgcacatagactatttttaccaagactgatcatgaatccaaaagaatatctcacaagtgttgaatgttctctgaattcaaaggaataaaatgaagttcaataataaaaagataactagagaaagaaa

SEQ ID NO: 916944 - DNA, 4001 bp, Homo sapiens
gatatatagatgcataaaattctagaaatcaaaaactctcttattgttaccaaaagcagataagtagttgcttgggaaaaagggctggaggggagagggtaaactgcaaagggcactgacattgtggtcacacaagtgtatacattgtcaaaactctaactgaaatgtggactaacatgttgcattttattatatgtaaattatacctcaataatatttactttaaaaggcataatgtaaaatatgtatgtacacatacatacaatataattactaaaaaaccgttatctttttatgtggcagttactcatattaaactttttaaccctctcaattctctcaacacatcagtatagtaatagtggcaagtccaaacttccctaattctattccaaataactgttctaattatctgtagctcaccatttaaataggagtacttgagataataaaataattacctaaatcacccatctcaatgaatgatttagaattgaagagccattgccaaacaaaagattgtagatttacaattaacatctaagtatgctgtagtatatgtttttaatttacaatagaatctgccaataatttcctcaaataagtttcaaattcctaataatgtagaaatacatgtcataaatacataatattcttaggtaagatgctattatagagaagaatttaaaacatttacagtgaccttcacaataaaagaaaccaggggaagcataaaatatcttttaaactccttgtagactcctgtttctgtctgcaatattcaataatctgtggtctgaatggcttatgaaattgtgagtttctcatcgtttagcccataccttagctgccaccaaaagaaaggcctgtcttaacttagcgtttcctagaatcagaagaaaggagtggcttgaaggagagaagactccaatcgtctcacaaagcatgtagatcactgtgttctgatacagctcagaaatccatgatatgagaacacatagaaagaaactagcatagaataaaaggaatgagatcacaattttcaaggcatttgtatggaccttggtcctggggtctctgtgtcctttgtaattgagttgcattttctggagatgtttctgcagggagaaaattaacaggagaaaagagatgaaggccacagtaaatggtgttagactgaacatagtcatagtgaatttgaccgacactgaaaatgtttcaaagtcactcatactgaaattccaagttgtgtttctttcatatcggtccagccagtcttttatatgcatgtttatttgtatcagatttaaaaataagaagaccaaggttcctagcagtatcatcagaatcactttgtttactctccacttcaaatagagaaaagcagggctagagaaactcgctattttgagcaaataaaagatgctgaagattgtagcaagccagagattgaagtgattagaaactatccagctaaaaatcataattcttaatcctgttccagacacaaatatggctagataatgcagagctaaaaaccaacttactaatatttcccagatcagcccaattctggagattgccaagataatgaggagtttatcgactgaggacagctctcttttactgacccagtcaatgcagttgatcagtactataaatccattgctcaaattcccaattatgaattctgcaattattacaagagtgaagatactcggcagggcactttccatgtcagaacagagaaagttcaatgtctaatgtcactgctggttattcactgatctaaaatgctattcacatccttgagtgtccagtggagttcttcttccttctcctttttctgctccttctttcattgttggctcaacgtcaaagcagaaatctctaaagtttgctgatcgatcttcacataactgttctggtgatatctttatttttcttcaatttctctgctgagccctagctaagatatttatgtcttcaccatgggcagaaatatttcatagatgattatgcagcaaagttaaactcacatttgcaaccatgcaaataaagatatattctctttcattgttttgtacttttttgccttgtctgagcatagaaaattagattcaaccagcttgagttctgaggtacaaatattataaaaatctgattcatagaatatgtagctaaatgaagcttttatggctaatagcatagccaatgaagctttataaaatatgcaaagacttacctatgctatttcaaaagagtgctcaatttcttgtggagctaaagctggatctggtcaatactgtgactaaagagaaactcgtttacaaagcatccatctttctcattccctgcctcatcactacttagcagtgctcaccaccatccctccataggcaccaaatgccttcacattttatccgcttttcccctcatatttcttttttaaacttaaaagtgataaaaaaacaaattttacaaaatcagcaacagctaccaaagaaagcagtactatattacatcataacttgcaaaactgaaaaccaagcaaagaaatagatacactagttccccttatccatgaggcctatgtcccaagacccccagtggatgcctaaaacagcagatagtaccaaactctatatacaatatatttttttcctgtattcacctacctatgataaagtttaatttgtaaatcaagcacagtaaaagattacaaaaataactaataataaaatagaacaattaaaacaatatactataataaaagttgccaggggttgtggctcatccctgtaatcctagcaatttgggagattgaggcgggaggaccgctcgagcccaaaagtttgagaccggcctgggcaacatagggagaccctgtatctaaaataaataaaaattaaaaaaataaaaagtaaaaaaatgtgttaaaatatatagtgtggtgtctctcactctctcaagataccttactgtactgtacacacctatttttggactgtggttgaccttgggtcactgaaactgcagataagcggggactaatgtgttcattgtgaagagtcaaggttcctcaccccgccccactctttcaaaaactaccgaaaaaaagtggattaccaaaattctgaaaacgtggagactcaagaaagattgtctaattcaaaattaatataaataaaacactttatcttgattataagataataagtagccatttagctagatgaatacaaagctatttttatttaataaagatataatttgtgaattatgaatgtttgtattttattactcatgcaatctttattgggtgatctacagagtactaaaaaatttacaaaataattgcatcatctttaatgatttgcaagtttcaattataacttaaaataggtagatattttctattttgttgttataatggtatatttgtcaagatagaatagaaaatgtctcctttaacagtttgttaggtttgtatatttatgacctttaaatatgtagctatgtggcatgtggtcttccatttgcattcttgacccagggctgaagagatcttttatactttttcattttagggtgttcttcctacctatctagagaaaagggtttggggatgccggtcacaacttgataataccccaaatctgtacaaataggcctgaggaatggtactgtacttgctggtatatgaaaaaataccacagtttttagaacttgtgatataacacatgacaaagacatagagaatggataacaggcttgcggttctgagctgcattttcctggtgtgtttccataagagaaaacatttaaaaatataaatttaatcaaagagatgtagtctctcacttctataagagaaagagaatagatgctagggagcatcacagaaaaactttttcagcagtctgaactgaaaaggaaaatgaggcaaagggcaggaagaggaaacaatgaaaggtttgagtatgtaaagtattttttaa

SEQ ID NO: 916945 - DNA, 4001 bp, Homo sapiens
ctctctctctctctctctctctctctgtgtgtgtgtgtgcgtgcgtgtgtatgaatatgtatattgtattttattaaatctagaatgcatagactagaagacatgtcattgttttatgtaccaccattaacaagtatcattattttaattggtcagaggagagggaaaatatgatcatcttaataaacagcaaaaaatttgatagtttttaacagagattttattacaatactatacacaggaagataggaaacaaatattctccctgaagaatatttttaaaagaatttatctcaaagctagagtcagtattacgtttattgttaaaacactagaaaacactccatttgcaaagacagcagttacgatcaggattacttaacactttgaatgttcaaaccatttcattatacaactgataccaaaaaagaattacaagtagtaaaatggagaagtaaaataatcattataagtcactatatgcagatgatataattttctatctgcaaagccaagagaatgagcaaagcaaatgtggtagtttagtaaggcagctggcttctaattcaacaaacgaagcaaattacttttttgcatacacgctaatcaggtactaaatattatacaaaaattaaaaacacttaatataggtactaaaattccatattcttttatgtactttatctaccagattgagatgtaagtttaagaagcctatttttagtaactgtgtcacatacatacatacacacatgtattttatacattataggttttctcatttaaaaatctcaaaaaaggtgaatgattgatacaaaatctatattatctgtttgtataagaactctttatagtattcgcattcttctctgtatggtaatatacatactttcatatatcctaatttgtgatatgtttggatggtgttgattccaagcatatctttgtaaaattcacaaagttatacacaatgaaagaatcttaaggaagtataaatttatataacatacaagaatttcttaggagctattttttttctaatatattcaagatgattctctaaattctttgtgacctgagggctccccatctttgaacatgtacctcagccacagtagcactgacagagaggcctgtctcagcttcttgtttccaagaatcagaacacatgagtgacatgaaggataagccattcccatcacctgggaaagaataattagattttcctccaacctttcagaggtccaaactgatatgaaaaaagacagagagaaaatggcatagagtaggaagaaagtgatcacacttttaactcctctgtgggctttggtgctggcgtctccggatattttgacagtgtgctgcatcttcttgcgatgtttccacatggagaagatgaggagaagaaacattgccagggacaaagtaaagggtatgaaaatgaacacagtgctggttaatacaataagactggaaaatcgtgtaaagttacttgaatcagaactgcaagtcttgtttcttctgtatccattgatactggcatttatatggatgtttatcagtgcaatatttaaaaacaagaagaccgaagtcacaagaagcagcaccaaaaccacctttttaaccctccactttaggtagagaaaaatagagttagaaaaattggctatcttgagaaaataaaaagtaccgaggcctgtagctaaccagacactaaaatgattgatcactgtccagatattagtaagcattctgaacattttttcagtggcaaataaagctgggaaaaacacagacacacaccagcttccgaatattaaccaaaccaggctaattcgagagattgccaaagcagtgaggatccgatcaaccgaagagatctttcttcccttgacccagtcaatacagttcaccagtgctatgaaactatttcctaaatttccaattataaattccacaattaaaacgaatgtaaatatgctctttatgacaccacccattgcctgtaagagcatgccccaatgtctaatatcactgctgaagacttcttaatgcattcatctaaaatgctatgtatatctgattcttgaaaattcaataatatattccctttaaaaagggaatgttaaaccagcaaccatccagatttgctaatggctgggtttaaagctctcttcataaaaatctctgtatttccccagacagctcagctgagcttcatccagatgctgtgtgccttatacacagtaggctgaagtcttttgtagctggtgagaaaggaaacactgaattctcatttgtaaacatgcaaataaggacatatttattttcattggtttgtgtgttttttttttttttttttgtcttatctacatacttcagtctgtcaaattgagttctggggaagtatcattacaaaaattggtatatgaaactttgtaagcactgagaatttttacatacttccgtgtttgggtggagaaaaatggggagatgatggtgaaagtttacagaacctcagttagacaagaggaataagttttgttctgcttttctgagatctattgaacagcattgtgaatatggttaataatagtgtattgtacattacaaaattgctgaaaaagtaactttcaaatattctcaccataaaaaaatatttgttacctgttatctgttatatttattatcatttgaatacgttaattagtttcatttaattattccacatagtagtcataaatcataacaacacctgatacctcataaatgtatgcaagtaaaatatgtcaatttacaataaaaataaagaaaataaagaaaaatcagatggttttttaaagttaagtctgtaaagggacttattcatagttatccaaagctcctcctacaaagtagcagagttttctaataatcttgtggaagacattattcctagaatgctgggtaccaagaataatacttttctattattttactttttacaagtacatgcccagcaaacatgcgcgcacacacacaaacacacaaacgcatacatttatttgggatctaaatctttttctcttttcacttaaataattcaggctttttactttcagcatttattatgcatctagttcatgtttagtactgtgatagttttaaacacatttaaaaagacttgcaagtttatattaaatagtaatacatgtaaatattccggagactttggaaatattttctctgtacatgtgagaagaggtagaaatctatctattgtctcataaagcagtcattgtgtttgaatgagttcatccacatggcaagaattcttattctgtgcctctcccctgcccagtagggcatattgcttcatcagcaccaaataccttcacatttttttcacatatactcactctcccagcaacatctactccatgatcctcactacagggaccaatgtagataaaggatgacatactgtctagccaagacggggaaatcagcagcatgatacagtcattcttcttcaatagctaaaaaagtaagtaaagtgagcaaagcaccaatgaaacaaattcagcaacagctaccaaacaaagtagaaaaatatgcctcataaacgtcaaagatggcagagaaagatgtaaggtgttccactatgaagaactgatccctcaccttcagtcccctgaagcaaagctaagcaaaaataaaataaaataaaaccaaaatatcttggaaattaccgtatatttagtcaagagagctattgaaaaggcaaactcagctagcatggacaaatattaaggaaaaatcccaaggctagaagtacaaacgtactatccacatagagacaagaaggttaccctggcctcgctatatccaggcaataaagatgaggttgggaaagaagacaaagagaaagacaaactaccatggtgggtggggggttgtgtggtgggttctgttgagacttcatggatactttgaaaagagagcagagctcacgtctccag

SEQ ID NO: 916946 - DNA, 4001 bp, Homo sapiens
catcaacacactgtgtaatttcaccatttacaccattataataatacatatcattaatacatttcctatcaattatatagatttcacagatttttatgtaatttttacataatttttaacatttgaggaaagtttcatttgattatcttctatagtttctataccctcctttgattggcctgtttttttaagatagagaatatttgagtttttttgaggaatattaggaatgggagacaaaggagaaaattggaaattcaggggctcaaggtggctaagaaaaacaaatggaaatacttgacatcagatgtcaacttcacaaaaggtttcctttaattcaaaaagtggaagcaatgacttttctaactacagataaaaaaattataacagcactgaaatgatcatcagcatgtttcttcattcctattatagaaatgatttttattctaggctattcacatactggtattaaatctagtattctttagtactgttttggtatacatatacaaaatttactctacatatgtttttcactccaattttattgtgtgcatcattaactaacaacaattctatttgctttctactaagcataaaataagaattcataatgaaataaaacctaccccaaagatccattcttatcattgatttaaaattgaatgtctttaccatccaaaaaattagaggttcaccaatgatagttaagcacatatatgtggtacaaattacaatggaaaagagaaatgatttcttcataaaagctgtacgttcttaattataaagagagataataaattcttcaaatgaaatactatacaatgaactataataaaatataaatactatatatgtgaaatatactcagcttcataatttatggtcaacgttgttattcacacacatgcacacatatacacccataaatatatatatgacttttctaggtatctgttttgaaattactcacatacaaacactatggaaaaactgatagaaatataaaatgttccagacaccatcagtttgttttctgctagaagacccacgatgctccccttgtgaatctatggagttgagggtttctcttctttcactcagcgtgtcatctgccacaaaactgaaagaaaggtctgttttagcttcctacttcccataatcaggatgaatgagtggaatgaaggatacatgattgcaacagtttggcaaagcaggagtacaagtttgctctgctgtgtcctaagattccaagttgatgtgattatacacagaaagtaaatggcaaataacatgaggaaggaggtcacagtttgcaaagcttttatatggaccttggtgctgggatcttgagatcctttgctatggagccgcatcttcttgagatgtttacaaagagaacagattaacagcagaaaacatattaggctcagagtaaagggtatgaggtttgctagagtagttacagtcaagcttgaaaggtgtattgcattcctcaatttgatcttccaagtcacatttccttcatattcttttgtccacactctctcatccatggttatcacagcaagattacaaatcagaaataccaagggccccaacagtatcaccagaacaacactcttaattctcttctttaggtggagagaaataaggttggagaaattggcaatcttgagcaaacaaaatatgctgaggctagcagcaagccacatgctgaaatggttcgttacagcccaggcattagaagcaacaattcttacttctaaaccatataaagcagaattaaacacagttgcataccaaaggaataacatgacccagagtaaaccaattctggagaccaccagagcagtgagaatttgctcagctgaggagatctttcgtgtgttaacccagtcaatgacatttactagggctatgaagccattggcaacatttccaagaacaaatgcaaacactaccagaattgatgaaatgatgagcagaaaacacatcatgtttgaacagataaaaaaatgcaggcttagtaacacttgttctgagtcctttaacatccagatgttaacttcgatgaacacttgattactaaatgtgcaataacattttctgcctttaaattcagtgactagtgtcaacaggcaagcaccagcatatgctaatagatgaattcaaaactgtctttatagaaatagaaaaggtcattattctcaaaacagctcaaattcactcctcttcatatacattctctccttgctatatgctgtacttttttatactgaggttgaagtggaaaatgaattctcatgtgttagtatgcaaagaaaggcatattatttttcattgttttgcaatttttttccttgtttaacctctccataatttgtatacagcatcttcagttgttccatagggaaattgtaaaacccaatacatatatcatatagtaaatgtctaaattgttaaaggagcttggtcataactaggatcataccaatatggacttatttttatgccagatttaaataccagattctaaaccttttatcaaaatcatccaagattatcttggaaatccctgggaggctgatacactttaaaatctggtttctgataaccaataaattgatatgacatcattgttaataagctcctaaacacatagacacacatgcactcacacccttagggcatggaaggaattattttcttataattccccaaatggaaaatgagtttccaggaactcatccaggtggtattagtcttattttccaactcagggctgtcagacaatgaataatatttatcaaacatgtttctcaagcttaggcctttggtatatttacactcaagtctgttttgtttaaacattaattatttaattaaaatgttcagcaattttgtaaatatttctaagtaccctactctttgtcacataatcctgcagtaccctcccacctcaggcagggtgactaccttgaccttggactctgaattcactcacgtaatttgcttcagtcaacaggaaattagtagaatttacagagatttaagatggcttccatattgaagtttcctgctcttttccactaaccatgaggacatcatctggctagcacactgttcccagaagaagaaagagaaactaatggagtcagaatgccactgccttatctaccctaaatcagccaaactagcggcaagatgcagtacgtggcccatctccaatcaccagagccatccaccaaacctaggttagaaaaatgtaatccaaagacataatgatacacaattatctaactcagttttctcttgcagaaaaacataagtgatgtaggtattctgctaaatcaggagtgtgggaaatatgcccaccattgttgtgtcaggaattcaggatcgaaggaaaaaatagagaatgtccaagttttgtcatatgaagtgggtaattaaacctaaaagaaaaacctattcagaaatctgtggttggcaggtaacatcatgtcaagtttcctaaagttgcaactaaaatcagaaagtttctacttaaaatctcttagagttacacatgaatgtatacaaatagtggatttttcccttcagtatataatgagcagagtaataataattttcatggaccatttctcctaattaataatttttatcatatagctagactgcacacttagaaatgaaccaaaacaaaaatggaaaacatagcaatgtgtcataaacactcatgtaaccatcatgtagggcaagacatggaacattgctaagagcctaagtttacctcaatgccactttctaattccctacacctttcttcatgtctcctgtgataagcaacatccctaatttatgatggtctttttttaatattctttatactttaccaataaggtattcgaccctaaactcaatagcttggtttggcctgatttgatctatgtataggtgcaatcctatatgttcttattcatggcttcctggaatca

SEQ ID NO: 916947 - DNA, 4001 bp, Homo sapiens
attttttctaagctattaacatactatattaaatataatattcctcagtattgcttttgatacacataaaaatgtacactagatatatttttcacccttgaattttattttgtgcattgttatctaacaataattgtatttgctttatattaaacataaaataagaattcatcatgaatgtctataatcccagcactttgggaggctgaggcagtggatcacttgaggtcaagagttcgagaccagcctggccagcatggtgaaaccccatctctactaaaaaaaaaaagaaaaatacaaaaaattagccacgtgtggtagcgcatgcctggagtcccagccactcaggaggctgacgcatggaaatcacttgaaccccagaggtgaacgttgtggtgagccaagattgtgctactgcattccagcctggacaacagggcaagactccatctcaaaaaaaagaaaaaaagaattcatgattaaaaaaaaaacaaaaaaacctaccccaaagacacattctcatcgatttagaattaaatgtccttaccatccaaaaaattagaggttcaaacaatgatagttaaacagttaaacacactatggtacatatacgtgatacaaattacaacgaaaaacagcaatgattttacaacgaaaaacagcaatgattttctgatataagctgtcagttcttaattataaatagagatcataaattcctcaaatgaaatatcatataaaaaaatgtgtgaaatacacatgggttcataattctgagaaatttcttatcctactttggtataactgaacagtttatatgaaaagttgattaaaggtatgttatggtaaatattaaattttcatatacattcagacatacacacacacgcaaatgtatattatatatatatacttttatataataaacttaggtaaaagacttttctatgtcaacttttggaaattactcaaatacatagactacggaaaaacttgtgggaaatataaaatgttccagacaccatcaatttgttttctgctagaaaacacacaatgcacctcttgtgaatctatggagttgactggttctgtccttttgcccagcaagtcacctgccacaaaactgaaagaaaggtctgctttagcgtcttgttcccccaaatcagaatgaatgagtggaatgatggatatatgattccaaaagcttggcaaagcattaagacaatttcttttggtcgcatcttaaaattccaaaacgatatgattagacacagaaagtaaatggcaagtaatatgaggaaggaggtcacagtttgcagagcttttatgtggatcttggtgctgggatcttgagatcctttgccatggagctgcatcttcttcagatgtttacacagagagtagattaacagcagaaaagatatcagggtcagagtgaatggtatcaagtttgctagcatggctacagtcaagttggaaaggtgcattgcattcctcagtttgatcttccaagttacgtttccttcacattcttctgtccacacatttatatacgtgtgtttcatcacaaggtgacaaaccaaaaagaacaaagaccccaacactatcaccagaactacactcttagccttcctttttaagtgatgaaaaataagtctggagaaattgacgatcttgagcaaataaaatatgctgaggctagtagcaagccagatgctgaaatgattggttactgcccaggcattagaaataaaaattattacttttaaattagatgaagttggattcaacacagttgaataccaatgtaataatattacccagagcaaaccaactctggagactgccagagcagcaataatttgatcagctgaggagatcttttgtctcttgacccaggcaatgaaatttatcagtgctataaagccattggcaaaatttccaagaataaatgcaaccactactagaatggaaaaaacaatgtgtagaaaactcatcatgtctaaacaaaaaagcaagtaaaaaattcaggcctaatgtcactgatggtgactcctctgatattcaagactttaagttaaatatgcacttgattcctgaatgtccaataacattctttatacttttaaattctgtgaacaatgtcaacagaaaagcaccagcttaaactaatgaatgagttcaatgctgcctttatgggaaatactgttagtcccaaaacaactcaaattaattcttattcataaagtctctattcttgctataggctgaaatttttcatactgatgttgaagggaaagctgaattctcatttgctagcattcaaataaagacatatcctctttcattgctttgcaattttttccttgtttcacctttccataatttgtgttcagcccttcagttgttggggaaattttaatacccagtacatagatgacacaaaaaatatattgttaaaagagcctggtgaaatctaggatcaaaatcactatggatttatttttaaagccagatttaaatacacagaatctaaactttttatcaaaatcacctaagattttcttggaaaccacaggaaagccaatactccttataatttggttgctgttaaccaatacttctatatggcatcactattaacaagctcataaacacacacacagacacacacacactttcactcttcaaggatggaaggaattgctttcttgtaacttatgacatggaaaatgagtttccaggagctcgtcctggtggaattagtcctatttttcccatgccagattttcagccaatgaataatattcatgaaacatatctctcatgcttaggcttttggtaatgctacctgcaagcttgtaaacattcctgagtaccagacctttgtcacataattttgcagtgtcctcccaccacaggcatagtgacaaccttgcactagggctctgagttcgatcatgtaatttgctttgatgaacagaaaattactacactttacatcgaaatttgagatgacctccacattaggctttcttgttcctttccggtttataatgagaacatgtccacactaacacactgttcccagaataagaatgagtaactcatggaatcatatggctcctgcctgatccagccttaaatcggccaaactctaactagatccaagaggcaaaacttggaccatctcaaatcaccagagccatccaccaaaccccagcttaagaaaacagaatccaaaaacatgtgagatataaatatctaatgtggttttggagaagtttcttttgcagaaaaagctaagtgatataggtactctgctaatccaagagtttgagaaatatgtgcgcccttgttgtgtcagaaattcaggagccaaaggaaaaataggttggaaatatcaaagtttttgtaatatgaggtgaatatctaaaactagaagaaaacttttggaaagatctggaggctgtaggtaacagcatctcaaatttctccattttgcaactaaaataagaattcactttagctctcttgagttgtataagaatgtacgtaaatggtggattttccccctaggtatataatgagcagagcaattaataatttttacgtgacatttctcccaatttgtaattttttaaataaaattataatgcacacttagaaatgggccaaaacaaaaataggtaagagcaatgtatcataaacacttatgtaaccatcatgcaggataagacatggaacactgcaaacagactaggtccacttccaggccactttccaagcccctaaacctttattcacatctcctgagataagcaatattcataatctatgatgatcatttgcttgaatttctttatactttaccagctaggttcacaaccctaaactccacagcttggtctgtcctgctttgaactgtgtataggtgcagtcctgtgtgttcttcttgttcatggcttcttgcactagatatcatgtttctgaaatttagt

SEQ ID NO: 916948 - DNA, 4001 bp, Homo sapiens
taatacatagatttcatagatactattttaacacttaaaaaaagtttcactgaattattttccataatttttatactattttcacattgacagatttttttttagaaaacggaagactggagttctcttatctgaagtttagaaagaattttaaaaatggaagataaggatataattagcaattcaggggcttagaagtgctttagaaaaaatactaaaataatttacatctgagctcaatttcaaaaaaagtttttctttaattgaaaagctggaagaaatgactgttctaactgcatatggaagctgataatagcaatcaagatcatgatcatgatttttcatccctcttatagcagagatttttttctaagctattcacatacttgtattaaatctaatattcctcagtactgtttatggtacacatacatgaaatttactatacgtatacttctcactcaaattttattgtgttcattgttttgtaacaataattctgattgctttttactaaacataaaataggaattcataatggaataaaaccctgaagatacatcctcattagtgattaagaattgaacgaccttattatcaaaaagttataggttaaaacaacagattgtaagcacactgtggtatatttgtgtcattcaaataacaatagaaaagagcaatatttttcctgagataagctgttagttcttaataattataaatagatataaattctacaaatgaaatataaaatacatgtatgaaataaacatggcttcataattgaggaatttttgtcatattttctataatttggcagtttttgtgaaaaaacaataaaaagcatgttattgtcaatgttcttcagtttttcatacacacacacacacacacacacatctatatatatgtacttttctagactaactttaggtaaaagacttttctaggtatacatgtggaaattattcatatacatatattacagaaaacccagtaagaaatataaaatgtttcatacaccaccagtttgttttctgctagaagacacacaatgcccctcttgtgaatctatggagacgaaggcttctgtctttcacccagtacctcacatgccgcaaaactgaaagaaaaatctgctttagcttcttgtttcccaaaatcaggatgaatgggtgggttgaaggatagctgaatataatagcttggcagaacatgaagacaggttgcttttccagcctcccaaaattacaaactgatatgatcatggacagaaagtaaatggcacataacagaagaaaggaggtcacagtttgcaaagcttttatgtggaccttggtgctgggatcttgagatcctttgccatggagctgcatcttcttgagatgtttacacagagaacagattaacagcagaaaagatatcagggtcagagtgaggggtacaaagtttgctagcatggttagagtcatatttgaatggtacattgcactcctcaatttgatcttccaagtcacgtttccttcatattcttttgtccatacagtctcatccatgtttatcacaaaaagatgacaaaccaaaaatagcaaaggccccaacagtatcaccagaacaacactcttaactctcctctttatgcgaagaaaaataaggttggagaaattggcaatcctgagcaaataaaacatgctgaggctagtagcaagccagctgctgaaatggttggttactgcccagacattataagcagtaattcttacttctacactataaaaagctggattcaactgagttgcataccaatgtagtaataacacccagagcaaaccaactctggagaccgccagagcagtgagaatttggtcaacaaaggagatcttttgtctcttgacccactcaatggaatttaccaatgctatgaagccattagcaaaatttccaataacaaatataaccactattagaatggaaaaaatgatgggcagaaaagttatcatgtctgaacagacaaaaagaaatttttaaaatgctggtgtaatatcactggttgtgattgcttgaatatcctgaccttaaattctatatgcacctgatttgtgtatgtgctgtgacattctttttacttttaattgctgtgaccagtgtcaagtcagaaatcaccatggcatgctaatggataagttcaatgctctctttatggaaaacattcttattttcaaaacaattcaaattaactgactcattcaccatctgttcttgttataggctggaattattcatactgaaattgacatgaaacctgaattctcatttgctagtatgcaaacaaggacatgttcacttccagtgtttgcaatttttccttgtgtaacctctccatcatttgtctttagcgacttcagttgcttgggaagttttataacccgatatgtagatcgtatagtaaatgtctaaaatcttaaagggagcttgatcataactaagatcatcaccaatacggacttttttaaatgccagatttaaatacacagaatccaaactgcttttatcaaaagcatctaagatttacttgagaaccacaggcaggccaatactccataagatctggttgctgctaatacttttgtgtaacttcattattcacaagctcataaatacacacacaaacacacacatgtgcacaccacttatgaatggaacgaattattttctcataatttccaaaataaaaaatcagtttccaggaggttgtccaggtgaaattagtcctattttcccactcaaggttttcagcccacgaataatgtttatttatcaaacatatctctaattcttaggcctttggtaaagtttctctcaagtctaatatttaaatatttattatttaattaaaatgttcagcaattttataagtattcctgagtaccagaccctttgatatataatcttgcagtatcctcccatcacacgaagactgactacctttcccctgaacttgaagttcaatcatttaacttactttgatgaacaaaaaattaatacactttgcatagaaatttgagatagcttccatactgggtgttcttcctctttccatttactatgagaatatcacctggctagtacactgttcccagaaggagaatcagaaactaatgaaggcagattgccccccacctgatccagactaaattggccaaactctaacgacctccaagatgcagaatttggcccatctcaagtcaccagagctatccaacaaacccatttagaaaaacaaaatccaaagccatgtgatatataaatatctaatgtagttttgaagggtttctcttgcagaaaaacataactgataaaagaactctgctaaaccaagagtgtgggaaatgtgtacaaccttgttgtgtcaggaattcaggagccaaaagaaaaaatagatggggaacggcaaagatttgttcatgtgaggtggataattaaggctagaagaaatcctttggaaaaatctggggtggcaaataaaatcatctcaaatttcctcatgttgcaactaaataaagttcttacttcaactctcttagagttgtataagaatgtataccaatagtttatttttcccctcagtatataatgagacgagtaataataatttctatgagacgtttctcctaattaaaactttttatgttaaaattataatgcacacttagaaatgaaccaaaacaaaaatgggaaataccgcagtgtatcataaacattcaagtaaccattatgtggagcaagacaaggaacactgaaaacagcctaggtccacctccatgccactttccaaccccctaaacccttcttcacatctcctgagataagcaatatccataatttatattgattatttccttaattttcttcacactttaccaactaggtatgcaaccctaaactccatcgcttggtctggcctgctttgaactctgtgtaggtgcattcctacatgttct

SEQ ID NO: 916949 - DNA, 4001 bp, Homo sapiens
atttatatattatatttacattgattttatttttcaaaaagagaggatttgagttctcttatctgaagtttagaaggaatttcataaatggaaggtaaggatataattagcaattcaggggcttaaaagtgctttagaaagaatactaaaataatttgcatgagatctcaacttcaaaaacagcttttctttaattcaaaagcggaagaaatgacgtttctaactgcatatgcataactgatgataccaatccagatcatgatcatgatatttcatccctttattagagaagggattttttcctaagctattcacatatgaaatctaatattcctcagtaccgcttatggtagacatacattaaatttactctgcatatgcttctcactcaaattctactgtgtgcattcttttctaacaataattctcattgctttttactaaacataaaatagaaattcataatggaataaaacaccaaagatacatcctcattattgatttagaattgaatgactttaccatccaataaattcgaggttcaagcaatgaattctaagcacaatgtggtgtattcctgtggttcaaataacaatagaaaagagcaatatttatcctgggataagctgttacttcttaataattataaatagacatcataaattctacaaatgaaatataaaatacatgaatgaaatatacatggcttcaaaattctaagaaatttttgtcatattttgtataatttggcagtttgtatgaaaaaaacagaaaagagcatgttattgtcaatgttcttaagttttcatacacacataaacacacacatatatatatttttttttctagactaatattaggtcaaaggcttttctaggtatacgttgggaaattattcatacacatacagtatagaaaaaccagtaagaaatataaaatgtttcatacaccaccagtttgttttctgctagaagacacacaatgcccctctcatgaatctatggagatgaaggcttctctcctttcacccagtacctcacttgccgcaaaactgaaagaaaagtctgctttagcttcttgtttccccaaatcaggatgaatgggtggattgaaggatagctgaatctaatagctttgcagaacatgaagacaggtttgttttccagactcccaaaactccaaactgatatcattatggacagaaagtaaacggcacataacaagaggaaaaagatcacagtttgcaaagcttttatgtggaccttggtgctgggatcttgagatcctttaccatggagctgcatcttcttgagatgtttacacagagaacagattaacagcaaaaaacatagcagggtcagagtgaagggcactaagtttcctagcgtggttacagtcgcatctgaaaggtacactgcactcctcaatttgatcttccaagtcaagtttccttcatattcttttgtccgtacaatctctttcatgtttatcacaaaaagttgacaagccaaaaatagtaaaggccccaacagcatcaccagaatgacactcttaactctcctctttaagtgaagaaaaataaggttggagaaattggcaatcttgagcaaataaaatatgctgaggctagtagcaagccagttgctgaaatggccggttactgcccagacattataagcagtagttcttacttctacactataaaaagctggattaaacacagttgaataccaatttaataataatacccagagcaaaccaactctggagaccgccagagcagtgagaatctggtcagcaaaagagatcttttgtctcttgacccgctcaatggaatttaccaatgctatgaagccattagcaaaatttccaataacaaatagaaccactaccacactggaaaaaatgatgggtataaaagttgtcatgtctgaacagacaaaaaaaaattgttttaatgctggtgttgtgtccggagttggttcctgcaggtgggttcgtggtctccctgacttcaaaaatggagccaccgaccttcacggtgagtgttgctgctcttaaagatggcatggacccaaagagtgagcaacagcaaggtttattgagaagagagaaaggacaaagcttccaccgggaggaaggcgacccaggcaggttgctgctgctggctgaagccatgagcttttattcccttatttgtcccctcccattttcctttttttgtcctatcagagtgcccttttttcaatcctccctgccattggctacttttaggatcctgttgcttggtgtattttagagcgattggtgcattttacaatcctcttgctagctacagagcgctgattgctgtggttttacagtgcactgtttggtgcattttacaatccccttgctagctacagaaacgttctccaagtccccactcgattcagaaagtatagctcgcttcatctctcaatgtaatataactgggtgtgattgcttgaatatcctgaccttaaattctatatgcacctgatttgtgaatgtgctgtgacattctttttacttttaattgttgtgaccagtgtcaagccagaaataaccatggcatgttaactgatgagttcaatgatctctttatggaaaacattcttattttcaaacaactcaaattaactcattcattcactgtctgttcttgttataggctggaattattcacactgaaattgacgtgaaacctgaatcctcatttgctagtacgcaaatagggacatattcactttcagtgtttgcaatttttccttgtgtaacctctccatcatttatctttagtgacttcagttgttagggaagttttgtaactcaatatatatatcatatagtaaatatctaaattctcaaagggagcttggtcataactaagatcatcaccaatgcggacttttttaaatcacagatttaaatacacagaatcctaactgcttttatcaaaggcatctcagattttcttgagaaccacaggcaggccactactccataagatctggttgctgctaacactttcgtataacttcattattcacaaactcataaatatgcacacaaatatacacatgtgcacaccacttatgaatggaacaaattattttcttgtaatttccaaaataaaaaatgagtttccaagaggctgtgcagatgaaattagtcctattttcccactcagggttttcagcccatgaataatatttatttatcaaaaacattatctctaattcttaggacttggtaaagtttctctcaagtctaatgtttaaatattattataaaaaatatttagcaattttataagaattcctcagtaccagaccctttgatatataatcctgcagtatcctatcacaggaagactgactaccttgcccctgaacttggagttcaatcatttcacttactttgataaacagaaaattactacagtttgcatagagatttgagatggcttccatactggggattcttcttctttccatttaccataagagtatggcctatctagtacactgttcccagaagaagaatgagaaactaatgacgtgagattgctgccacctgatccagattaaattggcaaaactctaacgtcctccaagatgtagaatttggcccatctcaaatcaccacagccatccaccaaacccagcttagaaaaataaaatccaggcccagcgcaggcgaggttgaggaaggcagattacgaggtcaagagatggagaccatcctggccaacatggtgaaaccccatctctactaaaaatacaaaaattagcagggcatggtggtgtgcacctgtattcccagctactcgggaggctgaggcaggagaatggcatgaacccgggaggcggaggttgcagtgaactgagattatgccactgcactccagcctgggcgacacagcaagactctgtcaaaaaacaaaacaaaacaaaacaaaacaaaacaaaacaaaaaac

SEQ ID NO: 916950 - DNA, 4001 bp, Homo sapiens
taaacttctataattttagttctattacataacatggtagaaacattggtttctgcctctctgaaaatgcatattgcatgtcctagaatttagcaaaattagcatgtgcctagaaacatcaaaatgtttattatttggggttttaaattgacatcagcattaaatcatgtgtttccagtttccatttaaagataatttattttatttcacactacaaatcttctccttttctcacataatcgtcgtatttccttgttatcaacaagacttctaataacaaaaaaaaaccactttttttcatttaaaaaaaatgcttggggctgggcacagtgtctcatgcctgtaatcccagcactttgggaggccaaggcgggtggatcacctgaggtcaggagttcgagaacagcctgaccaatatggtgaaaccccatctctattaaaaatacaaaaattagccatgtgtggtggtgtgtgcctgtagtcccagctactcgggagactgagataggagagttgtttgaacccaggaggtggaggtggcagtgagccaagatcacaccactgcactccagcctgggcgacagagtgagatgccattaaaaaaaaaaaaaaaaaaaaaaaagtttagctttgaagctatgaggctatatttttcctgctgtgactttagtttttaattagattttctatccacattgtatatatcttttacccattcaagtttgtaatctatcttgcttttaaagacacacacctttttctccacaagttgcaattacctatcgtttgcatataaaattaaataatttagattttttgaaataatatgtgaggttaaaatattgcttgccaatgctccaaacaaaaatgattacttttaaaatggtatcgaccggcaatgtgtgaattaccatcaaaagcaacctggtaggatttcatttatgttccaaaatacttagagaaacccagtagaaaaaaaaaaaaaaaacagtggaagtgatccccaaatgctccttgttgagttattctcttagaaaagcttctgtaaagtctgtctacaaaggtaaagggtttggtgtttttgtatagttcctaagatgccacagtagcctcacagctgtctgttgcagcttgctgtttcccagaatgagaataaatgagtggcacgagggaaaggcatttaaggctaacatgacaaactttatgcacttgttgttccacaacataaaaaatatccaattggccacttgtaaggaaaaaaaatgaactatgaagaggaaaaggaaagacatcaccattttcatggccctcctatgggcctctgtgctggagtctctagagcccaaggaactgagcttcaaatttctagtatgtctcaccaaggacagaaataaaaaaagcaaggaggtcaggaacagagaaaaggggataaaactggtcaagctgagaagagtttttaaaatagagagtttatcatagagagttttactttcatctaaatataaagtcagattacttttatctattatattgagtgagatatcaataaatatttctagcactaaactgtcaaaaatcagtaagaacaaagacaatataagaagcataacaatcattccgttcatcctccacctcagccagaggaaaagggagtgggggaagtgggctatcttaaagaaatagaaaatgcttaggcaggtggcaagccaggttgtcaagtgattagtcatgtgccaaagcataataacagtttttcctagtctatatgtggtatataaatgtgaagcaagtcccactagaaatgaatcaaacagtatcaccaacagttgtccaattgtggagatagccaagcaggtgaggatgaagtcagctgagaagaccttttggttcttgatcccttcagagcagtttaccagtccaatgaacacattccccagcatgctgatgatgaattctgctattgccagaatcagaaagattttgtccaattcggtggccatctccagagacaaaaaaatccaagtttttaatactttgtatcattaataaatttacaatcaaaccattgcagaagagcattcatatctgatacttatcttcattgcttttattgcacttccagtcttgatcagaaccttctgctgttggatagagtctcatatacttaaggaagtctttgcctatttttactataattctgatcttaatcccaaaagatctactaagggatgcagtctcacataccttcacgggagtgttttcatttctttgaaagagctgctgaattctaaaccaaacagtttctgtgtccatttatcattgtcatgggctgaaactttccacttgtggtaatgattaaaaggataaagtcaagtatattaatatgcaaatatagactggattccccccctttctctgatttgtacatttctgctcacctgaaaaactacaccacttggatccaaatatctttattgtttttcagaggaagctgcagatataatctaataattttgttattattcaacgaatatattttataagtgcctgctgtgtttctgatcttatgcaaatgcaatatatttaccacaaaaaaaagcattaagaagtctataaaatagtgaaaacaggaaaaaaacaatgagacagaatcaagaataaaatgtgctattaaagcagaaaagggaactacaaacactactgttggggagaaaaggggggtgacatttgctttggatctggaaaatacttagaatttcatgaggaaactcaagtcatattttgaactcattgaataatatccgaaagataccgaaacccaaactacttttttgaaattaaagtcctactgatatttcagtctaaatgttcctcaggtatcttatagtaacttgttcaaaattaaacatggttttgctctttaccttggttttatatatgttctattttttttttggcaagagatatattgctaccaatttagccttaatagacaggtagaaaattgttttagatgaaataaggaaagaggaaacaaaagtatttgttctacattctaggaacaattattttgacaaaaacccccaatgcaccataattgaactcagagttacagattatgtgtcttggtttatggtcagcaaacagatattctattactagaaattagtgttcaagtgttgccagacaaaaattaacccaaaaaatgaatgaaatcatttttaaaacttggacctttttaatgttgctgtcatactcctcaattaaattctattaattaacatttaaaagtgtatattttaagaatgatgttgtataaagaactactggtaagttatttcctatgaacaaaaatattttcatttaggacagatatttaaaattatagtaagacaggaggagaaaaagagtaagcaagaaaggaaggaaagaaagaaaagagggagggaaggaagagaatgagaaagaggaaaggaagagagagacaaagaaagaaaaaggagggagcttctgagacaaaggctgaatgaaaatgaagaaatgtagcaatatcataggaaggagaatgatggcttcggccaaattagtgtctagagatggaaagaaatatatggctatgagaaacaattaagggaaagaatcaatagtctgtgtgatggatttggaggctagaaaaaggaggaggagtctgcaatgaaatgcatttaggctctcctttcactgctggatgcatgtggtactgtgatctgagggaatcactggaggaagaataggcttagaagccaaaaagtaggagaaagaagaaaagtttgaagatgagttctgttttgaacgttttggagtatctgtaaagtcatcgaagtggaaggttggagtaggcactttgatatttgtgactgcagctcagaaaagaaatttggaccacatggggaggtttggagaacatcaacacatatttgattttattagaggtgaggcgctccaagggccctgaggaacac

SEQ ID NO: 916951 - DNA, 4001 bp, Homo sapiens
tttttcaaaaagagaggatttgagttctcttatctgaagtttagaaggaattttacaaacggaaggtaaggatataattagcaaatcaggggcttaaaagtgctttagaaagaatactaaaataatttacatgagatctcaacttcaaaaacagattttctttaattcaaaagcggaagaaatgacgtttctaactgcatatgcataactgatgataccaatcaagatcatgatcatgatgtttcatccctttattagagaaggaattttttcctaagctattcacatatgaaatctaatattcctcagtaccgcttatggtagacatacattaaatttactctgcatatgcttctcactcaaattctattgtgtgcattgttttctaacaataattctcattgctttttactaaacataaaatagaaattcataatggaataaaacaccgaggatacatcctcattattgatttagaattgaatgaccttaccatccaataaatttgaggttcaagcaatgaattctaagcacaatgtggtatattcctgtggttcaaataacaatagaaaagagcaatatttttccggggataagctcttacttcttaataattataaatagacattgcaaattctacaaatgaaataaaaaatacatgaatgaaataaacatggcttcaaaattctaagaagtttttgtcatattttgtataatttggcagtttgtatgaaaaaacagaaaagagcatgttgttgtcaatgttaagttttcatacacaaatacacacacacacacacacatatatatatatatatatatatatatattttctagactgccattgggtcaaagacttttctaggtatacgtttggaaattattcatacacatacagtatagaaaaaccagtaagaaatataaaatgtttcatacaccaccagtttgtttcctgctagaagatacacaatgcccctctcgtgaatctatggagatgaagtcttctctcctttcacccagtacctcatttgccaaaaaactgaaagaaaagtctgctttagcttcttgtttccccaaatcaggatgaatgggtggattgaaggatagctgaatctaatagctttgcagaacatgaagacaggtttgttttccagacttccaaaactccaaactgatatcattatggacagaaagtaaatggcacataacaagaggaaggagatcacagtttgcaaagcttttatgtggaccttggtgctgggatcttgagatcctttaccatggagctgcatcttcttgagatgtttacacaaagaacagattaacagcataaaagatagtagggtcagagtgaagggtactaagtttgctaccatggttacagtcatatttgaaaagtacattgcactcttcaatttgatcttccaagtcatgtttccttcaaattcttttgtccgcacaatctcattcatgtttatcacaaaaagatgacaagccaaaaatagcaaaggccccaacaacatcaccagaatgacactcttaactctcctctttaagtgaagaaaaataaagttggagaaattggcaatcttgagcaaataaaatatgctgagggtagtagcaagccagttgctgaaatggttgatcactgcccagatattataagcagtagttcttacttctacactattaaaagctggattcaacacagttgaataccagtttaataataatacccagagcaaaccaactctggagaccgccagagcagtgagaatttggtcagcaaaggagatcttttgtctcttgaaccactcaatggaatttaccagtgctatgaagccattagcaaaatttccaataacaaatgtaaccactaccagactggaaaaaatgatgggtagaaaagttatcatgtctgaacagacaaaaaaaatttttttaaatgctggtgttgtgtccggaattggttcctgcaggtgggttcgtggtctcgctgacttcaaaagggagccactgaccttcacggtgagtgttgctgctcttaaagatggtgtggacccaaagagtgagcaacagcaaggtttattgagaagagagaaaggacaaagcttccacagagtgaaaggcaacccaggtaggttgccgcggctggctgaagccatgagcttttattcccttatttgtcccctcccattttccttttttgtcctatcagagtgcccttttatcaatcctccctccgactggctacttttaggatcctgttgattggtgcattttagagcgattggtgcattttacaatcctcttgctagctacagagcgctgattgctgtggttttacagtgcgctgattggtgcattttacaatccccttgctagcttcagaaacgttctccaagtccccacaagattcaggaagtatagctggcttcatctctcaatctaataaaactgggtgtgattgcttgaatatcctgaccttaaattctatatgcacctgatttgtgaatgtgctgtgacattctttttacttttaattgttgtgaccagtgtcaagccagaaataaccatggcatgttaactgatgagttcaatgatctctttatggaaaacattcctattttcaaacaactcaaattaactcattcattcactgtctgttcttgttataggctggaattattcacactgaaattgacgtgagacctgaatcctcatttgctagtatgcaaatagggacatattcactttcagtgtttgcaatttttccttgtgtaaactctccatcatttatctttagtgacttcagttgttagggaagttttgtaacttaatatatatatcatccagtaaatgtctaaattctcaaagggagcttggtcataactaagatcatcaccaatgcggacttttttaaatcacagatttaaatacacagaatcctaactgcttttatcaaaggcatctcagattttcttgagaaccacaggcaggccaatcctccataagatctggttgctgctaatactttcgtataacttcattattcacaaactcataaatatgcacacaaatacacacgtgcacaccacttatgaatggaacaaattattttcttgtaatttccaaaataaaaaatgagtttccaagaggctgtgcagatgaaattagtcctattttcccgggttttcagcccatgaataatatttatttatcaaacatatctctaattcttaggacttggtaaagttcgtctcaagtctaatgtttaaatatttattattatacaaaatatttagcaattttataacaattcctgagtaccagaccctttgatatagaatcctgcagtatcctcctatcacaggaagactgactaccttacccctgaacttggaattcaatcatttcacttattttgataaacaaaaaattactacagtttgcatagagatttgagatggcttccatactggggattcttcctctttccatagagatttgagatggcttccatactggggattcttcctctttccatttaccatgagaatatcgcctggctagtacactgttcccagaagaagaatgagaaactattgaagtcagattgccgccacctgatccagactaaattggcaaaactctaacgtcctccaagatgcagaatttggcccatctcaaatcacgacagccatccaccaaacctggcttagaaaaataaaatccaggtccagtgcaggcaaggctgaggaaggcagattatgaggtcaagagatggagaccatcctggccaacatggtgaaaccccgtctctactaaaaatacaaaaattagcagggcatggtggtgtgggcctgtagccccagctactcaggaggctgaggcaggagaatggcgtgaaccccggaggcggaggttgcagtaaactgagatcacgccactgcaccccagcctgagtgacagaccaagactctgtcaaaaaaaaaaaaaaa

SEQ ID NO: 916952 - DNA, 4001 bp, Homo sapiens
agatttcatagatgccattttaacatttacaaaaatttcattgatttattttccataatttctatactatttttacattgatagtttttttttagaataaggaagatttgggttctgttacctgaagtttagaaggaattttataaatggaaggtaagggtataattaacaattcaggggcttaaaagtgctttagaaaaaaatactaaaatagtttacatcacctctcaacttcaaaaaaaaagcttttctttaatccaaaagctggaagaaatgacttttctaactacatatggaaactgataatagcaatcaagatcacaatcatgatttttcatccctattatagaagagattgttttctaagctattcacatgcttgtattaaatctaatattcctcagaactgtttatggtagacatagttgaaacttactctacatatgcttgtcactcaaattttattgtgtgcattgttttctatcaataattctgattgctttttactaaacataaaataggaattcataatggaataaaacctcaaagacacatccttattattgatttagaattgaatgaccttaccatccaaaaagttacaggttcaaacaatgaattcgaagcacactgtggtatatttgtgtggttcaaataacaatagaaaacagcaatgtctttcctgagataagctgatagttcttaataattataaatatagatcataaattattcaaatgaaatataaaatacataaatgaaataggtatggattcataattcttaagaatttttgtcatattttgtataatttggcagtttgtgtgaaaaaacaaaaaagagtatgtcactgtcaatgttcttttgtttttcatacaaacatacacacaaaaatacatatatatacatacgcacttttttagactaacgttaggtaaaagacttttctaggtacatgcttgaaagttattcatatacatacattacagaaaacacagtaagaaatataaaatgcttcatataacacgtttgttttctgctagaagatacacaatgctgctcttgtgaatctatgaagatgaaggcttctctcctttcacccagtacctcacatgccacaaaactgaaagaaaagtctgctttagcttcttgtttccccaaatcaggatgaatgggtgggttgaaggatagctgaatgcaatagcttcgcagaacatgaagacaggtttgttttccagactctcaaaactccaaactgacatgattatggacagaaagtaaatggcacataacaagaggaaggaggtcacagtttgcaaagcttttatgtggaccttcatgctgggatcttgagatcctttgccatggagctgcatctttttgagatgtttacacagagaacagattaacagcagaaaagatatcagggtcagagtgaagggaactaagtttgctaggatggttaccgttgtatttgaaaggtacattgcactcctcagtttgatcttccaagtcatgtttccttcatattcttttgtccatataatctgattcatgtttatcacaaaaagatgacaaaccaaaaatagcaaaggccccaatagtatcaccagaacaacactcttaactctcctctttaagtgaagaaaaataaggttggagaaattggcaatcttgagcaaataaaatatgctgaggctagtagcaagccagttgctgaaatggttgattactgcccagacattgtaagcagtaattcttacttctatactgttaaaagctggattcaactcagttgcataccaatttaatactaatacccagagtaaaccaactctggagactgccagagcagtgagaatttggtcagcaaaagagatcttttgtctcttgaaccactcaatggaatttaccaatgctatgaagccattagcaaaatttccaatcacaaatgtaaccactattagaatggaaaaaatgatgggcagaaaagttatcatgtctgaacagacaaaaagaaatttttaaaatgctggtgtaatatcactggttgtgattgcttgaatatcctgaccttaaattctatatgcacctgatttgtgtatgtgctgtgacattctttttacttttaattgctgtgaccagtgtcaagccagaaatcaccatggcatgctaatgggtaagttcaacgctctctttatggaaaatattcttattttcaaaacaactcaaattaacccattcattcactgtctgtccttgttataggctggaattattcatactgaagttgacatgaaacctgaattctcatttgctagtatgcaaacaaggacatattcactttcagtgtttgcaatttttccttgtgtaacctctccatcatttgtctttagtgacttcagttgttagggaagttttataacccaatacagagatcatatagtaaatgtctaaattcttaaaaggagcttggtcataattaagttcatcacctatatggacttttttaaatgacagatttaaatacacagaatccaaactgcttttatcaaaaatatctaagattttctggagaacctcagaatctggttgctgctaatacgtttgtataacttcattattcacaagctcataaatacacacacaaacacacacatgtgcacaccactcacgaatggaacaaattattttctcatcagttccaaaataaaaaaaggagtttccaggaggttgtctaggtgaagttagtcctattttcccactcagggctttcagctcatgaataatatttatttatcaaacatatctctaattcttaggcctttggtaaagtttctctcaagactaatgtttaaatatttattactatacaaaacatttagcaattgtataagaattcctgagtacccaaccctttgatatatagtcttgcagtatcctgccatcactgagaaggctgactaccttgcccctgaacttggagtacaaccatttaacttgctttgataaacagaaaattactacactttgcatagagatttcagatggcttccataatggggattcttcctctttccatttaccatgagaatatcacctggctagtacactgttcccagaaggagagtgagaaactaatgaagtcagattgcccccacctgatccagaccaaattggccaaactctaactactaccaagattcagaatttggtccatttcaaataaacagagccatccaccaaacccagcttaaaaaaaatgaaatccaacaacatgtgagatataaacatctaatgtagtttggagggtttttctcttgcagaaaaacataactgataaatcaactctgctaaaccaagagtgtgggaaatatgtacaaccttgttgtgtcaggaattcaggagccaaaagcaaaaacagatgggaaattgcaaaggtttgttcttgtgaggtcgataattaaggctagaagaaatccattggaaagttctggggttggaggataacatcatctcaaatttcctcacgttgcaactaaataagaaagtgctcacttcaactcccttagagttgtataacaatgtatacaaatagtttattattgccatcagtatataatgagatgaataataataatttctatgagacatatctcctaattaaacattttacattaaaattataatgcacacttagaaatgaaccaaaacaaaaatgggaaataccgcagtgtatcataaacattcaagtaaccatgatgcaggcaagacaaggaacaccaaacacaacctaggtccacctccatgccactttccaagtccctaaacatttcttcatacctcctgagataagcaatatccaaaatttatggtgattatttccttaattttctttacactttaccaactaggtatgcaaccctaaactccatcgcttggtctggcctgctttgcactgcgtgtaggtgcaatcctacatgttcttcttgtttgtggct

SEQ ID NO: 916953 - DNA, 4001 bp, Homo sapiens
agtttaattcaaatgatttttataatttctatactatttttacatagagtatttttctaaggtagggaagactcaagttcttttatgtgaagtttaaaaagaatttcaagtatggaagatagaggagatcattggcaattcagggactctgaggtggtttagaaaaaaaaacctgaaatacttgacatcagatctcaacttcaaaaaaggttttctttaactcaaaaactggaagaaatgacttttctaactgcatgttgagacttatgacaacataagtcatcacggtgtttctttcttcatccttattatagaaatgacttttttctcaaatgttcacatatttgtattaagtctattattcctcagtactgtttatggtagacatatacaaaatgtgttctaaatatatttgtcatccttgaatattattctgtgcatctttttctgaaaataattatgctggctataaactaaacataaaattagaattcatgatgaaataaaaactaccccaaagatgaaacctcattattgatttagaattgagtgtgcttactatcaaaaaatttagatgtttaagcacactgtggtacatatgtgtggtaaaaatcagtggaaaagagcaaagattttgagataatgtgtcacttcttaacaattataagtaaagatcacacagttttcaagtgaaacatgataatatgaaatgtatatgtgaaatatacatgggttcatgattctgaaaaacttcttaccatattttctataatttggcatcttgtgaaaatatgattaacattatgttattgtcaatgtcttttaagtctttcatatacagatgcacacacatagatacacttttagactaactttaggtaaaagacttttctaggtatgctttcagaaaatactcaaaaacatacactacagaaaaaacagtaaaaagtataaaatgttccagacactatcagtttgttttctcctagaatacacacacaatgtcccacttgtgaatctagagagttgagagtttcaggtcttttactcagcacctaatctgacacaaaatcaaaagaaaggtgtgttttagcttcttggttctccaaattaggatgaatgagtcgaatgcaagatatatgtttccaacagccttgctaaccatgacaaccgggtcattccgcagcctcctaggactccaaaccgaaacgattaggaatagaaagaaaatggcacataacaagaggaaggagatcagagtttgcaaagcttttatgtggaccttggtgctgagatcttgcgatccttctccatggagctgcatcttcttgagatgtttacacagagaacagattagcatcagaaaagatatcagggacagagtaaagggtatgaagctccatagggtagttacagtcaaatatgaaagatgtactgtattcctcaatttcatcttcccagtcatgtttccttcatattcttctgcccacatactctcatccatgtttgccacaagaagatgacaaaccaaaaatatcaaagtccccaacagtatcaccagaatgacactcctaactctcctctttaaatgaagaaaaagaaggttggagaaattggcaatcttgagcaaataaaatatgctgaggttagcagcaagccacatgctgaaatggttggttacaacccaggcattataagaagtaattcttaattctacactataaaaagctggattcaacacagttaaataccaatttaataataatgcccagagcaaaccaattctggagaccgccagagcagtgagaatttggtcagctgaggagatcttttttctcttcacccagtcaatgaaatttaccagtgctatgaagccattggcaaagtttccgagaacaaataaaaccattattagaattgaaaaaaaaatgtatagaaaagttatcatatctgagcagaaaaaaagaaagaaaatgcaagcctaatatcactggttgtgatttctttaatactctgaccttaaattttatgtgcatctgatttctgaatgtgcagtaacattctttttacttttaaacactgtgaccagtgtcaaacaagaaagtaccagcttatgctaatggatgagtttgatgtcatctttacggaaaacattcttattttcaaaacagctcaaattaactcattcattcaatgtccgttcttgtgatgggcttgaattattcataatgaagttgaagtgaaacctaaattttcatttaccagcatgcaaataaagacatattctctttcaatattttgcaatgttttccttgtttaaccgatacgtaatttgtgttcagcaacttcagctgttagatagggaaattttacccccgagtccatcgttcatacagtaaatgtctaagttctttaaaagaccttagtcataactaggatcaccaccataacggatttactatttatgctacatttaaacagacagaatccaaacttttaaatcaaaatcatccaaggttttcttgggaaccataagaagaccaaaacaccttaaaatctggttgctgctaacccaatacttttgtgtgaatttattgttaccatgttcataaatagatacaaacacagaaagagagagagagagagagagagagactgtgacacccctaagagatggaaggaattattttcttatactttccaaaatgggaagtaagtctcctggaggccatccacgtgaaattagtcctattttcccagtgaaaactgagggttttcagaccccccccaaaaaaatgtatcaaacatcaaacatatctttcatgcttaagcatttggtaaacttactctcaagtctatttaatgtttaagtatttattatttaattaaaatgttcaacaattttgtaaatattcctgagtaccacaccctatgacacataattttgcagtatcctcccaccataagcaggttgattatctgtcccctggactcggagctcactcacacaactttctttgatgaacagaaaattggtagatttcacaccgaggtttgagatggcttccatattggggtttcttgctcttttccattgatcatgagattatcacctggctagtacactgttttcagaatgagaatgaaaactaatggagtcagtttgcctgcacttgatccatcctaaattggccaaagtctaactagctccaagatgcagaacttggcccatctcaagtcaccagagctatccaccaaacccagcttagaaaacctgaatccaaagatatatgagataaaaatatctaacgtagttttggagggtttctctagtagaaaaacctaactggtacagctactatgctacaccaagagtgtggggaaatatatttgcccctgttttgtcaggaattcaggagccaaaagaaaaatagatggggagtggcaaagttttgtcatgtgaggtagataattaaaggtaataaaaaaatgtttgaaaggatttgtgtgctgcaggtagcatcatctgaaatttccatatgttgcagctaaaataaagttcctacttcaactctctaagagttgtataaaaatgtgtataaatggtgaattttttgcaaggtatacaatgagcagaataattaatattctttatggagcatttttccagttaataatttttaaatacaattataatgcacacttagaaatgggtgaaaactaagatggtaaacatagcaatgtgtcataaacactcatgcaaccatcaagcagggcaaaacatgtcacattgcaaatagcctaggtccacctccatgccactctccaagcccctacacctttcttcacataccctgaggagagcaatagccataatttagaatgatcatttccttgattttctttttttttgagacagagtctcgctctatcacccaggcaggagtgcagtggcgcgatctcagctcactgcaacctccacctcccgggttcaagcaatt

SEQ ID NO: 916954 - DNA, 4001 bp, Homo sapiens
aatgtattctatattcttacagatgttctgttgttcaacaaattactgaaatagaatcattgaaccctttaaaaaaagatgtcttatatacaatccaaacaatatttctctgggatgtagagatgatctacattgaggcaatatatcctttgagagttttgacattttagcataaccatgtattagcttttgattgaatgtcttgtcacagcatcttgataatcattgcctggtgcagtccgtggacatacgtcttttgtggagaaattttcttcaataaataattaatagttcaatttaggcttcttattttatagacattttctacataatttttctcacttttacttatagattgtccttcattcattgatctgcaattctcaaataatctttgaacttactgtgacaatatatttagccataatatataccttttctgtgattataagattattcatagaattccacagcatttattaagaactgtcactttattgagtctttcccaaaagtagagctttgttggatgatccaagaggaaccatctaacgcggactatgagaaggaactagttgcttttcataaagatgcaaataacagcaagatgctgttacagttgttttgaattagtcacacaactttgcatctggaaacacggtttagaactatgaaaatgccctctactcttgatagttgatattaggatattaatttctatttgctctgaaacatgttttaaaaaacagcaactctaaagaaaggaagagttacagaagagagaaacagggatacacagacagagtcagaaacagagacagagataaagagatccagccagctgtacataagattccctacattacaattacagatacactaattaagttttaggagtaattaatcacataaaacattaatgcaagaactgaagttaatttagaaacatcttatctttgtttgtcctagaaaagcatagtttctcttcagatttgtttatgttgttggaattttcttccttttagaatagacattactttccaaatcacctttagagatgcatgtcttaatttattgttccccagtattaggataaatgaatgacttgaggggtagattagagctatggactcaccaaaaatcacagctaattccgtctctggcataaagtagctggaggtggcaatgagaaaggacaaatagtaggcaataaagaggagaaggaaggaaatgacagctttcagggctctcacatgggcttctgtgctggggtctctgcaccctgtggcactgagctgcattcgcctgatatgtctccgcagggagaggatcaagaggaaaaaggacattaggcacacacaaaaggggagcagcgttgccaggttgagaaataacttggtagaagcatgttgagttttatttactctgcaactccaagttaagtttgttttcctctttgccttcacacaaaacctgaaatcagcgttcaaattctcagtggctggaaggctaataaacacagagagaaccacgcaccccagtagaatccaggaaatcaccctgtcaattctccacttcatccagaggaaaagtgggtgaaagaaattacctatcttgaagaaatagtaaatgctgaggcaggttgcaaaccagatacttaaatgattggttagtgtccagaagaagtcaatgattctcatttctttaccagtggcatagacatctggatatagcaccaatataaaacaatctaatagtattacgcacaatagacaaattctggatatggccagacttgtgaggattaaatcaatggaggcaattttcctcttcttgacccagtccatgcagtttaccaatccaatgaatgcattccctaagatccccactgaaaactctccaactgctaagaacaataaagtagtctgcactttatctgccatgtttaaatatgcaattagtttctagttgacctgatggagtttgacatccacacctgcttcttagattttgatgtagttttctttacctctttgttgtagtctgttttgtgatggagactggaatgataaatgaagactggagctatcttcattaaatcctaattagtcttgacaaacaatgtgtttggcgatccttggcctggccactgtatgcccatttacctactcagcaggttgtaattttccacatacggttaatttaggctgagctactgtttactaagatgcaaattgggccaattccctttcatggtcctgcattgtctttctgaggctaaggtgtacgcattttggattcattaatttgtgatgtatgctagtaacctcaatagggttgctagatttagcgactaaaaattcaggacactcagttaaacttgaattacaggtaaaaaaatcaataattttttagtgtatgtccctgattacttaagatcagtgctttcaggaagtactgaagttcaaattagattgagtgttccattctggcaacctgaacatcaagaatttggtagcaagtataaaactggtaaaattggaaagttcttgaagaatttttattttgctgaatgttaatattgataattagtaaagaatccaaagtttggttccatagtgagagttatatattttcaggaactttaaaaagttaacactaaatgtaggttatttgattccaaagaaactttaggtcattattttggctgttcagatgaacaattacatggcatagtgtctcttaatacaacacattgtcttactgactaaatgacttttaatggttatttagcaatgttatatataataaggtagaggacctgtaataaaaaaagactattgattaccttaaatttttcattttcacttaaaatgttctcaaggaaactttgagaggtattagatatgtccattaccttgtttgtggtgaagatatcatgggtgtttgaaattttatacattaaatatatgcggttctttttataccaattatactttcataaagatttcaaaaatttaaaaaatgttctcaagggtagttgtatgcatgagagaggagatagtaaaattctgtatttcattctctccactgtcctccatacaaattgcatgagtatctagatcctcaacccttctagcaggagactgaagattaaactttccacatctctagagatgaatttttagtttgaaatagcttctctaatttagagttactgagaagcgctttactacatggggttccatagaatagttcttgggtattcacaccttcctgggaatgcatgtcttctcttatccttccttaaaggacaaaccatcattccggagatgtagccttaacttttggacaatctgtatgattatgtagccatgttcacaggcaactggaacatcacctatgataggacgatcttggatatgatccctgacctagacttatcatttcttttgttttttttttgagatggaatttcgttcttgttgctcaggctggagtgctattttggctcaccgcaacctccatctcccaggttcaagtgattctcctgcctgagcctgccaagtagctgggattacaggcaggtgcaaccatgcctggctaattttgtatttttagtagattccgggtttctccatgttggtcaggctggtcttgaactcccgacctcaggcgatccgtgtgccttggcctcccaaagttctgggattacaggtgtgagccactgtgcctggcctagactcatcatttttaccctacagtttatcctggtaaatgaagtgctcatgggaactatgatgatgtattttctcaaataatttttagacttgtttttgtttagttttggaaataaatgtagattttatgaataccaatgttgtatagcgtgaagttatgtgaatatatagttaaaaaaaaagttctatgagagagcattttgtcaaaagcttactactttgaaccccagtcactgtggtcactagagatgcttgaaacat

SEQ ID NO: 916955 - DNA, 4001 bp, Homo sapiens
agttataataaaaggaaattagtagattgaaatacatcagaattaaacagaaagtaatgggagtaaaagcaataatgtacagccatattagtacatacacaacctgagatatgccagaccaaacgtttcaataatattatagtgaggatggatttcatgttcacagaaaaattaaaaattttagtgacttattttccttttttttttaataaaaatttatctgtattttttgtaaacattcgtttcttcttccagggacagtatgtgcttattccatggtatacgctattttcttcccaatttatttcttttgttaagtcctgagtgaaaacctttgcagggtctggttagagaaaagaacctgattgagcagtctgactaatatttgttatccccattcttttatccagattgtgaagagggcttaggaacaccccttggtgggtggcacttgaatgggttcgattcccacctaggtgctgcatgaaaagcaagttgtttgagaggaaatttaattccaaggaaaatcaatagaaatcatcagaataaggtcaaccagaaaatattacctaggagaccatggaaatcatcattcgggaaaaccaaagacagaccagagaacatctgagttcctaatcaataagccaaatgggggtgactcagcagagccatgaaaggagcacaattaaggagcggcaataaaaatgtatgacaaagaaaaatgagaaaccagttactgtagctcaggtccactttaccatgagccaaagtaaaatctaaaaagactttaactaggcaatacaggcctaacacttgcgttgaggagacaagaagagaagcatgagctctgaaattcttcgaggaaagggagtgtaaagatgagcatttctgagttgtaaagggatagaaaagatgtattcagtagtttgctactaggtcctaataatatttaaagatatgcatccaaaataaatgagataactggggaaaaatgagaatagactattaagaaaactatattttttgttagagaagatttggttttaaattccatttatacagctaagatttcatatcatgcaggcaatttttctacatgtcagcattctgacaaatgtctgcctcagtttattatttaaaacaattaaaataagtgagtgacccaaggggtagagaattgctgcaatctctccaaactccacagctaacttgtattttgtcataagatagctaaaggtcatcaaaatagaagaaatatagtataggaaaaaaaagaagataaatgaagtcatagttttaatggctctcacatgaacttctgtgctggggtctctactgccggtagcatagagttttatttgcttggtatgtctccataaagatcttactaaaaggaaaaatgatatcagtgacacaataaatgggacaattgcaaacaggttaaagagagtcaagggttcaaagtatggtattttactcacatggaacatttcagtaatgtttcttttatgtttggcaattgcatgaaacctataatcacaactcagtactattgctgctataaggctgaccaacaaggaaatggcaaagcatcccagcaggatccagtgcaccaccatatcaattttccacttcagccagagaaaaagtggatgagaggaactggctatcttcagaaaatagaagacattaaggcaggtggtaatccacatatttaagtagttggcaaatgtccagaaggtaaaaatgactatctgttgtttattttttgtataaacatctgggttcagtactattacaatgccatttacaaccattacactgatcaaacaaattctggcgataactaaattggtaaggatgtagtcaactgtggaaatctttttcttcttaatccagtcaatccagttgactagtgcaatgtatccattccccaatattcctagtatgaattctccagttattaggattataaagatgttatctgcaggactgaacatgtttgtagagagaacaatctgatttcaaatatcactgtagatgagctaatttacaggtgacctgttaaagcatgatagatcaattcttcgaatcatgcaataatgttttcatctgctgttatttcgacgttgttattcttccggaagtgttcagctctcctctgaaataggattgtctctacactcctgaagatgaaaccaactaatgagcagcttgactagttatttatagcctggaaaaattataattattatcctttagtgagtgatacctgaaatgtttggctgaaattgctcccatgcaaattcaaagagattttatatcatgaatttgcaacaggcttcttgctgtagctctatatttggatcttcaaattgagttttgaatagggagtcataaaaaaagagataaatgtttaataaaaacccaactgtgtaaataaaacttcattttcatcatgtaagttataaataagccacaaatcagttctcccagatgcaaagaaattttcactttggaagtaattagtacaattagattgtagatatttaacatttagtcagaggataataattcttgtcttcatttaaacggctaattagggaaggatataatacaaatctaattagaaatgacttttttttaggcaggcacatgataatatttactaagaatttgctttcttttcaattgttcctcagaagtgaaatatgccaggtaaagatttgttatctttagtttttttttaatgtgacaaatacccttgaagacaattcatttcctgaatcactgtctcttgtataataagcattgtaatctaaaattaagaaaatttaaattttacattattctagttccaatcaactccttttataagatttgtaatctcacagtgcatattatagtcatatttctagatagggcaaacacataaaaaagtaactacttgggagactgaggcagggggatcatttgaaccgggaggcagaggttgcagtgagccaagatcgtgccactgcactccaacctgggcgatacagtgagactctgtctcaaaataataataataattttttttttttacataccagtatttccaaggaataggactaattctactattaaattagatttatttgttttggggtaagggaaagtacaacttagcccaaaatacatttgaatgtaggtaatacaaatcacaataccctagggcttcttgtatttaaatagttctacaatgtatacaacacatgcaggattttttctatttcttacatgtgtgtaatgtgtaacaggaaagcataaacttaataacttaaagaaacctagttatctataaactactgctggaaacaaaatagaaaagaaaatgatgcagagggaaaaaaatatgtcagagatttctgagttagaaggctagagagaacattccagggaatctttgggaaatgacttctaaaattgccatcaccagctagagtactcatgaacacgctgactactgggaccctcaaccttctttctcaaggtggttctgctatacataactgtgcctcctctctctgtcaaactttcattcttgagattatactccttttcccacatcatatatcatcttagatagaatctcattaaagattgtttttctcccttcttgatcaagacaaacccttccagaaatggagaggaaagggcggtgaagataaggaccggccttcatttcaaagtagagagttgttttgcatgattgattttatagcaagggttgatgagttctaaaatcttttccccaaagcctgtttgcctgacattcttctactcattgagttcaaggcctttgccagtatttgtcagaaaagaagtagaacctctttgtatttagtcaatgacataaaatgatgaaatgttagtgtgggatttagatgcattttttttttctgcaacgacaaagaatatacggtgcaatgataacattagattatccattaaacaagaca

SEQ ID NO: 916956 - DNA, 4001 bp, Homo sapiens
aggtaatacaaatcacaataccctagggcttcttgtatttaaatagttctacaatgtatacaacacatgcaggattttttctatttcttacatgtgtgtaatgtgtaacaggaaagcataaacttaataacttaaagaaacctagttatctataaactactgctggaaacaaaatagaaaagaaaatgatgcagagggaaaaaaatatgtcagagatttctgagttagaaggctagagagaacattccagggaatctttgggaaatgacttctaaaattgccatcaccagctagagtactcatgaacacgctgactactgggaccctcaaccttctttctcaaggtggttctgctatacataactgtgcctcctctctctgtcaaactttcattcttgagattatactccttttcccacatcatatatcatcttagatagaatctcattaaagattgtttttctcccttcttgatcaagacaaacccttccagaaatggagaggaaagggcggtgaagataaggaccggccttcatttcaaagtagagagttgttttgcatgattgattttatagcaagggttgatgagttctaaaatcttttccccaaagcctgtttgcctgacattcttctactcattgagttcaaggcctttgccagtatttgtcagaaaagaagtagaacctctttgtatttagtcaatgacataaaatgatgaaatgttagtgtgggatttagatgcattttttttttctgcaacgacaaagaatatacggtgcaatgataacattagattatccattaaacaagacaaaagtgtgaaggaacacaaaacaaatcttcagaatcatgacagatattaatgacttccaatagcatataagagaaaatgaatgcaaacaagagaagggagaatgccttttgttgatttctttcatccttgtagtcaggatactctttaggggtctctatggaacaaaaggctttcttcttctaaggaaacacttcacaaatcttaacatcttcagaaaagcttccctcaacttgctatttcccataattagaatgaatgaatggcttgatgggaaaatgacagttactatgtcaccaatcatcaacactaattttccctgaggaatcagagcgctagaggtcataacaagaaagactgggtagtacacgatgaggaggagcagaaagatgatcactgcctttatggccctcatgtgggcctctgtactggggtctctgaaccctgtagcatgcagtcgaatctgcttggtgtgtctaactagggagaaaagtaacaagaaaaatgagatcaggcaaaggataaagggaaccatcacccccaggttcagggttaactgtttgaaagtacctggaattttactcactttgaatttccaagtaatgttttcttcatgactgactttgaaaaggtgataccacatatcatcattctttggaacactaataattaaagagataagaaaggaccccagaagaatcgcaagcatgaccttgttgatctttagcttcagccagaagaaaaatgggtgcgatatattggctatcttgagtaaatagaagatactgaggcaagaagtaaaccagagacttgaattattggcaaatgtccagacaacattcacaatgcttactagcacgctattgccatatgtacctggaaagagcagcataaagaagccatctaatgatattacacacagcagacagattctggagatggccaagctgatcaggatgatgtcaatcaaggaaatatctcttcttttgagccagtcaatgcagttaactagtacaatgaatccatttccccaaatccctatggtcaattcaccagcaattaaaataatatatattgcctctattgcacttggcatgccagcaaagacttgtgatttttgaatatcactgatgatgaattgactttcagctgaccagtgaagaacaatgtatctgtctgcctcttagaccatgatatagttgtctttatctctcctttttgttagctgtgatgcagatgaagaagatagccagtcctgctctgggctagagctgcctaaagacttcaatgattggggccagtaatttcctttggtgcagtgatgactgaaagcctctaggatgcaaatgggaatggatctgatttcttaaatttgcacactctttcttattttaagctctgtatattttggatttatcaatctgagctgttgaccaggaacttcaagaaggtatcaattacttggaaaatatggctagaatttaatttgctggatgactatccatccttgttagtatattgacatagttattgctattacagattctaggtttactgtgttagcttgtgtggccagtttgcttgcttggttgactaaagctttaaacaaattattattaacattaaatgaggcttaaatggcataactggtggaatgtagaggaaagaatctaaaggtgtaggaagataggagtattaaggtgaatttatcatatgcgaacttcaccttctccccattatatgacttaagagggccaaaaggacactccattcactagggcattgagaaatacattaattaggtaattcccaatatcctcaaaaagctctgcagtgtttgtcttctcaactgaagatacaatgagggaaataaacatgacattgtagtgttgtcagcaaatgagacacggaaaattctggtttagatgttagggtttcttagagtgttcttgctttgtacctgaatgtagcttccatacatagaaaaaatagtcaaaatactggtcacttatctttagaatggaaacagatcagcctgaacagtgaggaggacaaagagcaagaaagtgatatttttggaactaaaaagcgtgatagatatacaagactcttcagtctgaactgagtgataagaatacatgctctgaattttcttagctctattttttggcagcaggtgtattataaatattagtatgctaattatacacacattggaaacacactgtttcattgggacatattgaaacatgtcattgggcatagtagaacatatttgaaataatagaaaaaggcacacagcaatacacagttcccagaaatattattttgaaactaatattaaattttaaggcaatattaaatattgcttatcaaacaaacacaacaatacaaagtatttaatgagataatgtgtcatatgttcagggttttagacaaaataaagagataaaaattaatcttgcagatttttatgagaaagtaaatagctattgttattctattcagtgaaatttggggtttctttcatgcttctctgtgaattttgtttctgaagaaatatcagattatacaactcaaaaatacacactgtgcttgtcatgaccaaagccataaaacaggtaatattctgagaaggacttcactagagtaaagaaattgatttgcatgcaactgacagacaaggtcgcaccatgttcacatctcagggaatgcaatatttcattattttaattaaactttttgaaagataaaattttgtggaggggaataaagtaggttcaaggttattatttggaaatggaactactctgggatcaatttgtaatgtccagaaaagatgaagatgaaaatatatcatgtaggagggtgattaataactgacatattaaaaattcctggtaaatccagatatagaatccaagcttgccttctgaatcatggtctttcccactacctcacttcttttccttagccgtgtggaatactgatcaatttaagaaagttatgcctatattcaaatgtaaacgaaaatatgctataggatatgaccagagttacctaagggcctatacttactaaaatgccaccctcttttatctttccttgctataaataaaacccaaatgatctcaatttatttgacaccgttgaatatgttttttttgtgtgtattgtgtgtgtgtgtgag

SEQ ID NO: 916957 - DNA, 4001 bp, Homo sapiens
gaaatcaagaatagaagcagactaaaagcctgaactatgcgctgatagtaaagaagatgcagtaaatttaagaaacctcttaaggtaaaactggtaggacatggttattgattagagagtgttataggaatgaatgcctccaagtatgtttaacatgcaaccaggtgaaagatgatgccattaaaccagatctgaacttactgagagaagaacaagtgggttttgttggtcatgatagtattacttgggagaggagcagcttttggcatggaaaactagtttcagtggagtgatggcaatagatgtgaatttgcagtgaatgagaataaatgaggttatgaagcagaattactaaatataagtctcactttaagaagtcagactatgaaaggtagtggctgcaaagagtgaaaaatgtttttcatttcacaactctgcttcattgcctcaaggattctttcaaaatcaatccaaacctgaaagagggagatgtttaaacggaagggatcccctcttgaaaagtcccagcctggatcagtttagatggaaaatcaaacaggataatcttcaaatacgcagtaagtcaagcagtatatcagcatccaccctgaatataaaaagaaaaaaactgacaagacaaccaaggagcacgaataatccaaaaaaggatgcccacctatcctttaaaagagccagtaggtacaagtgtgtaattttatgtttttttaaaaaaaaatttatataaccctaacaactccaatacaagaaataatgattggcatctcctccattctacagataaagaacgcgaaaagacaaaagtcacaattgcccaattttccaaggtcatacttcagattaacagcaaaaccaagcccatatttgtcattcagccgcctagtctaatactccaaacaccaaaccacaaacgctgtcaaataattcaaaatggggtagggaaagcaacagggagacatgagtgaaactcaaggaacagaggacgctatctgcaatgagtaaacaaccattagtgttcgatgagtcacttcagttgattccagctgtttatgaaatactcctgcactgggaaatactatcggtggcatatcataaagctgatagccctaactatgcataagatgtgccctcggaacgcgaataggcactattcgacgaaatctccgcacgtaattctagtttccaacgaaattaggcgtgtcactgaccacctccgtaaaccagcatgaccaatactcctactgaaatgcctaggaaataaatatttggacgccttcctagacaagcacaggatggtgtaaatctccatttctctcaggaaacacgtcctgctgctcacaaccaccaaccaactcagcagcttggtaaaaacagacccaatacactcgtttcttctaagcgcacagctagctgcctagcatctattcagctcctcccgaaggaagcataaacatcttcaccaaactgtagcaaagaagacagaggcaagtcgggttaacgcttcaaagagagaaaagacgctggagtcagaagagtagacataaagaactagagtcaagaaacagtgaatcgggggaaaaaaggaactagagagccacctgtcccttagtaaaggtaatacgaataaaagcctctctgctctggggcagaagagcgccgaggcctagctggccttggagcagtagccggctctataactccgcggctgaactggcattctcgggaaaccagctggtaccacccagtcttctcctacagacgccacgggttgtccggacacagaaagtccctcgtgtccctcccccaaccagctgccagggagcaaaagcatccccgtcccagagaaaagccgaggtcttcctggaggccgttacctaccttcccgctcacaacacccgccgccgccatgtttcctgcgcgtgcctggtaatgacgtagcagaacctcacgtgtctctcggacatacaacaacatccggcaaaactagaataacatccgggcgggaaaagggcggggagtggcgggaagggagtggaggaaaggagccgggcggaaaaaagccgcctgacgcgtgcgtgctgaactgggctcagagacggctggggtggagtctcaggcctaacgctacgcttgtgcttgccccacgtcctccccaaggaagactgctaaaataatgtgtaccttacttgtattggagtttgtcgagactctgaagctagcgcaggccacgccagtttggtgagatgaaacgaataccatactggaagccagcaagatttgtcctggttttttgttgttgttgtagaaaaggagtctcgctctgtcgctcaggctggagtgcagtggcgcgatctcggctcattgcagcctccgccactcggttcaagcgattctcaagcctcagcctcccgggtagctgggattacaggcgcgcgtcaaacgcccagctaatttttaaatttttattagagacgagatttcgccaatgttgcccaggctggtctcgaactcctgacttcaggtgatccgtccgcttcagcctttgcccagagagctgggattacaggcttgagccaccgcgcccagcccattagcctggttttgtggcagtaggcaaatcaccagtgcactcgaaacctcagtttcttatagtaaaatcaagatagtggcgttgcggtgaagatccaagaaagagcagcactaacatggagatatcccaggcactatacatggagacttttcccctctgtatatgaggtttctctatttgtctggtcactgccactcacacatgacctccagcaaggtatttcgataggaactgtgataataccacgccctcatagctgcagagcccaaggcacatagtttatagcacctacacattacttattagctctgtgacttaaagcaggtttctaaatttatcagagcttcaggatgtaaactgggaattactcctgcatggagtggttgtagggatttcatacgacaatacatgtgtggtaaaatgatttgtaaagatactaaggtaagaattttacttgttctcagtgctgtaaaagaatgcagagaatgattatatactacccccttgataactctggcacagatctgggatttccctagctccggggcagaataaaaagtccctttcaccaaaaacacttgtgtccattgaggtacttccgtcttcacacagtggagaggggttagaggcttttgagtttggttgaggtaggtggcaactagctgaacgacagaaaaggagagttgccggttatgtgactaccaggaacctaataggtgaggaaagtggtggaaccttaggtgggaatgaatgcgtagcatattagggagattgcgtgctaggtatctgagattccaaccatgaccaagacccttatgcccaagcttggcagggaatcaagaaagcagctcacctacaagggatgaatgaggtgggaaaatgagaatattagcagtaatcagcattgagtgaagactagagggccttttccaaatgtactggactgagactaagacccctagaaccttcatataatcttgggtgtggagtggaaaatcctactgatgacccaaattacattttccaccagctcagagcattgggatgtggttagagaaaaattttaatgtgacatcacatttcttacaccctgtgttttagagaaaatttgaagcccttagcacagtgccaggaataaaaggctcaataaatgtagttattacttatattttaaaatataagtttgagaactacaggcttctcattgaaaagcatcattggcatctcaggttcatctgctacttcttgaccttcttaaatttcatcctacaagtgtgccttaaataatggcgctacccatgggctggccttgggcctctcttcctttttctccaaacactattcctgggccgttatcctcatattctggcatcaaaatctcctatgtactgat

SEQ ID NO: 916958 - DNA, 4001 bp, Homo sapiens
ttccagcccagcgcacgctttaaggcacgctgaaaacaagtgaggttgctgtccggacgcgaggtgctgaatggaggagcgtataatcatgacgtttgcttgataacaaagaccaggaaattcggtcccgcgctgacttattcttgccacactacaaggattccctgtatgtctgaccaatatgctcttctgacttttccggggcacctgctgggcatcatgccgattgccttctcatagtgaaacccagcaggggttagttggccaaaaccacaactatcctctcatgatcaaaaatgagcaagaggatttaactgaaattgattcgccgcctgcatgcaaaagcttaaaccaggtcactttcaccccacttttcttttcttctaacagaatacgggcagagagaaggtttatgtttcatctgataatcacagctattccggattcagaaatacaaaacacttacttttaacgtgggaaggagatttaaaagaaaaaaaaaagaggtaaaggaagatggtgaataaatactacagcctctgcaactagacacttcctaggggagaacaacaaagaaaccacgaggttgggaaaggcagtgccgcatcccaccctttgggactctgcagctcgattctcctgcggctctacagcaggtccccaaggcgctggcgctggggggcgggggccggggaccgtgaacccgcctggaacgcagccggtgccactccagggaacaggtgagcgccaagcaccagtgagagtacagccaactccctctgcagccactccttgccagaaacctccgtgcccaggagcccgcgctagggccaggctcttaaaatcccggggagggatgccgggtgatggagccgacacggagttatgcagtctggagaagcagggatgggtaaacacaggctgacagtgggaagggccttgcctagcacgaccaggctcgttcctggacctcacctatgaaaaggatctcctgctgctccccactcgcactcacaaattacaggctccagttcgagctgaccccggcactcacgctgaagggactcttgggaaaataacacccgattttgcctttgcagccactgtcttcctcctccgacctgcagtgtcaaacctgtgccactctccgcccccacacacctctcgcaaggtctggcttcctgcgagcctggaacacaataggtggtgcggcctctgagggcccgggcagccacccgcacttccccgccacgcggagaaagccgagcacacaggccgcagggtgggggtccgcggggagagggtggaagcagcgggttctccgcgcctggggtggccgctgccccacccaggcccccgtctgccctctacccttccagaccaatcgctccctgcaggtgccaacgcggtgccccgcaccaggtggcacgcggactttccccagagctccccggcctagacggagtcaggctaaggcagaagcgcgggcagccccggcgctactttacagcgccccatctgcagccctggggtcctcacccggctccagggtgcacagcagccggggcgcggtccgggaaatgcagctgcgcttcttgagcacattgctcaggatggtgcccacgccgccgccctgccgcttcaggcatctccccccgcgcctcagagacccggtcagcttgtcctgccgcatccgagagcgccccgggctctggcacggctaccgtccgtctcggtccccgctaccccactcgctgagcggctgagctcgcggagctgggtgagtgtctgcggctgaccggcccgtgggagcagggagcgcacagccggctggtgctggagggtcacggggacttacggggcaccgcgggagccgccgagcgcagggaagccagcaggcatctgcagtgcggagcctgcaaggctgaggcaggagatcgctcgaggcggggagggcgggagcgagcgagcgagcgagcgcgtgggagacggaggcggcgtgcccgcccccaatcccggcaccgccgtgcgcaggcggggccgccccagctcccccgtgcccagaagcgccagagacagggagccagtgggcgcgtaactgcgttcggggaccaaaagcagaaacagagatgtccgtgcttctcccaagatctgggagggaacagagggagcaccaaggggcgccagtctcaggggcagaacacccgtaagggcaagcatcctctcccacttccgagcagtctcagaaggggccatgacccaaccgcaggcggcgaggcacacgcttcagcccgaattgcgttgaattatttcctggcagattagagaggcgcggagaaaatgaaggaaaaaaaaattattgtttcttttagaaaaatgggcttccagaaaaaaagtgttctcttttcaagcagtattaaaaagtaatgttcctcatctctccagccagacttcagtagttctgaactattgcccatcattatggtttaaaaaaaaaaaagtcattctcaaacggcaatattcaccaatagactatttaccattaaaatggatgaaagaaagggtgtgggggggggatataaagatacttgtgtttgctaatatttataaaaagaaacactaaatggataaaccaaaaacaaattagaaaacttgtataggagaaggaacatcgtggaggagacaagaatggaaaactgagtcctctcttgatgtgcctcctgtagttttggctctggaataacactatattaataatattaacaaattaaatttttaaaaaaccaggatgatggaacagcatgcctatagtcccagctacttggcaggctgaggtgggaaaattgcttagccccaagagtttgaggccagcttgggcaacatagcgagaccccatctcttaaaaagacataaaaataaaaataaaatttgaaaatacataaaatagtctgggcacggtggctcacacctgtattcctagcactttgggaagtcaaggcaggaggatgtcttgaaactaggagttcaaagctgcagtgagctatgattgcacccctgcattctagcctgagcaacagacctagtccctgactataaatgaataaattatttttaaattgtaaaagaaaaccctaacaattgaaaattaatggaaacaaatcaacctaatggactatcccacttatagcataagaacacagaaaaaaataattctctcttaagttgacatagaacacaatattatgactgtacatcaacagttgtacatattcccagagcaaataaaactgcaaagaaaccttacatttcattcagtagtattattgttattaataatattcatatttcttaaattcttatatccactacaggataaagcaaataaataagtatgctaacatcaaatggagccaagatgttttcagtgtaatagaaaatatgtgtataaccaaagtaattaagttttctttaaaatattacaattatatatttatatgggaaacactagtatgaactcatttttttttcttttcaaaaaaatacatacattcattgaataggtttagaagtaaggacaactcagcagcaatgaacacccacagcacccaggttatggtctctaaaaaccattccccactcaaaggaactaaggctcctttgaggagtgactgattccaggtttgggacagaaaaagtacaagatgaccctgaaacattttgatgagctcaaaaagaaaggaaatgtttcacaattaatggggtcaagtcaaaaagacacaagagtcacataaataggctccttcctattggccaaagatgaaacaatttgaacttgaaaaacaatggctgagcctggacaacatggcaaacccccatctctacaaaaaaaaaaaaaaagctacaaaaattagctgggcatgatggcacacacctgtaggcccagctactcaggaggctgaggtgggaggatcacctgaggccagggaggtcaaggctgcaat

SEQ ID NO: 916959 - DNA, 4001 bp, Homo sapiens
agaaacactaatgaagacaaatgttgtcactgcataatattcccataagctaaaattttatctacacaatctacacagaacctgacaaacataaaggaaaggtgcaaaaattattattcctgaaaagttacgaactcttctggaattaatttaaggatagtttctccaacctccaagtataaatatataaacgtaccaagtagcctgtattatcaagtctttaatactgaaaagctatggatctatcaaggtatacaaagtatccaagctccacactggactaaaattgatgtatgctaacataacataaacactagtcccaccatgcccccttaaacctgctgtattgtcattaaaacatggattttaatatccctccacagtaagttaaagcaaaaagtagtatgctagactaggtattctgtgatgaattaatgaccaccaatatccccaagctgggttaggaaaatgcagaatggtcaggggtctcaattttaccaatcactgatatagtaggatatttttatataattttactacccatctaatttagataaactttatatacgactataggaaataagcaataaaaataagattcccttttcacaaataaggaatacacatttgccagtcattacatttcactcacgatacaataacaaacgtctcaactatctaacgaaaaaccttccctaatcaatgtaactgtaaatggcaaatagtaccattaggtacctatatgtatgtaccttcaggataataagaaaaatatttatcagctaagatatctgttctctatgcaaatacaaaactatggtttctatttaacagtaatcacaatagtggtcaggggaaatgtcttttgaaattatcttccaataactccacaataacatgttaaaacatgactcagcacacccacaacgtgcttgccatataaatcttcccaaatttttgacaagcatataagcagacactcaacaactatgttgctgatgatgccgtcttcagcctacttccttacaccgtccaaaacgaaagttactatttgttgagggatgaaaacaggtttgacgacatggcctatggacaaagttccaggatttctaaactctgcccctatgtgattcatacactggggtttcagagtggaaaagaccagtctttggttatacatttggcaattacttgggagttgttttgaggccacctactaagaatacttgggatagagattacaaattaaacccataagccaggtagacgaggagcaaggaaatgtctgggaattcgtatttcatcggcatatatttaaaacatcttatgcttctaatttccggtgtgagtcaacctctgcggactgaacatcactaaaactctaaggaaacgtctctttttaatcctctgaaaaatcaatacatttaaaaactgcccgttgtgtcgacgctcggaaagagggtagaaaacagcgagtctaagggaaagaggtgcccctgcctccccaggcagccagggcccaggcccggtaacggagtcgtcctctttatgcccaaagccgccggacgggatgcaggtcgaggaccggccgcgcggcgcggagcggggatgcaggtaacagggcccgcgcgaccattccaccggctacggccacccgacacacaccccagaggcagtgtccacgcagccggggtcctggatggcttggcctcgggtcgtccggggcttctcggtgcgcccgcccccgcccccgctctgactcagcatcccagcctcccacagggggcgggagcgctccccgccgggcggcgcaggcctgaccgaccgcgccccgcgccgccttggcccctcagcccgcggccgtctcacttacccagccgggtctccgccgcgccaccgccggcgggctcccgcggcctcctcgagactcaggacacttccggcttcgcaagccctggccggaggccacgtgaccgacggccggcgcgccggtgcgggtgcgcgtgcgcacgcctatggcccgtctggtagtcaccacagccgcggcggcaactgccgagtcggcttccgcggccacggtaatgagggggatgtctggagacaccccgtccactgttgccctcgccctttactctaaaggggaatgaggagccctgagcagcgaacacagtaattgggattcccgcaactgcaaatcccgccccttccccgagcgctggccgacagtagggcggaccgacgctgagcaagggattacatcccaagatttacaggtgtgcagaacgtgggacacgtggggggcaggcacagacggccggcagagctgggagggatggattctatgttttaagggcccactttggctgcagtggagccagattatcgtctcgcagtaattcagactttacattgtttttttcattttcccatcacccagaaatacattaaattcttaatgtaaaaatgttcatttaattccctctcggtattttggaaaacggccgtattggagtatctaactctaaacttaagaatttaagaactaaaacttaaatactaaaattaggtcctgcaatattcgtgcagtcaaaatctcaagccgctattcccaataaggaatagctttctgaaggggtcccttctgcccacggacagcacaacaggcctttctcaacatgagggagcagagaccgctgctaatctagggctaaatttctgagtggaggggaagaggaagatggtgtttcccagagtagcagcagcaaacacgaatgaatgggaagtcatgcggagtggctcagaggcttttgaatgtaacagacctagggttgctgtctcggctgccaattactgacttaaaagctaatctcttacctctctaagcctcagttttatcaaatgcacaatggagataacaaaagtccactctaatgaattcttacaaagcaagttactttattagcattttaaacaatgtataagtgatggaatcattctaacaacacatctattcactgcttacaattccaactaatttcagttctttgatatctaatgacaagagcgaagacctgttaaagttccttccaccagtaaaactcacagctcaaagttgtgggagtgattaactgagccacaggccttcattcacatgtttaccacattaaaataccacacagtgttttcttataaggtcaaccaactgggaagcaattaacattagcattaagatttaaactgttaggcacagggctaaatcaggcattatatgaaaacttgtggttccctagtcaagtcaaacaaatccccaaatatttcagcttgtaacagttttgtccttcctctcttgagacaattatttgagtacttgcttttggaaataaggtaattcatgatggaagcttcctagctgtgatggtgctctaggcaacttcagagaatgaagatagaagttatgcatgattatataacatgaagagtttaatttttattacacactcaatttccatgccctgatttctcttagctctataaacacatgtaaatcttctgcagagctttaaagagctctgaaagggaaaacacctttccatatatggaattgatagcatagtaaggccgtgtgcagtggcttatacctgtaatcccaacattgtgaggccagtgggaggattgcttgaggccgggagtttgagaccagactgggtaacatagtgagaccctgtctctaccaaaaaaaaatgtagctgggtgtggtggtgcacacctgtaatcacagctagtctggatgctgaggcaggaggattggtagagtatgggagaagttacagtgagctatgatgtcaccactgcactccagcctgggtgatagactgatctctattcaaaaaaaaaaaagaaaaaaaaagtatagtgatacactattaattccatatatgctaatatgagatagcatccatataaactactatcaagtctttatgtgccagctactgtaataa

SEQ ID NO: 916960 - DNA, 4001 bp, Homo sapiens
gtgtgtctcctcactggctccttaagtctgcaaacataatcttaaattatgcaaaattgcctgctgaactcgcccttgggttacagacacgtgaagtagtgtgggcaaacaaaccaaaatgcccttcgatttctctctgaccagggcagcagcaggcccctttagacccagaggctagactggagggcagaaagggccggggaatggtgtcaggcctcccaatacccacacaaaaggaaagggctttaagtttttctctctgagaacaaaataaaacagacaacacaacatcaacaaagaaataaggatgttccaggagggtttgaagagtgagtttcttgcagtagagtgccttttttttttttctttcctgctccctgcagggatgtctgtgctccactgaaaaattctgtctgttcgggagggaacccaggatgcagaccaaatgcaagacccatgcagatgcccaggtaagctgaaatttcctgccaccggggcagggcctggaagtctgtgcatacatttctaggggaactaacttttcgtccaagccgtaataaccgaccaaccgactgttctgggagcagagaaataaagggaggaaaaaactctccaacagcttaggggaggaggcccccactgcttaccttcccgacttggtaatgaccatctcggtgccccgcttgtgaaactgatcccaaagttctttagcctccaggtgcaccttggggtcgtcctccacctcttcttcgggctccatggtcttcaaaggcctcagatgcgcctggggccccagggaggagaacgggatgccggtctcggccgcccccaccaattgatccatgatcggcttggccagggcgcccggcagcgagagcgccgccgcgccgttgggaggcagcgtcagcgcggggaagaacggcggctggtgacccagcaccgcgctcatggcgaagtccggcgcccggtgaggtaggaacggatggtaggccatgcttgtcccaggaatgaccggatctctcatggagaggctcatccactccaggcggggcgctgggctccagccggggacaagtccgcagctgctgtgttttgttgtttttttgttgttgtttaacagcagcacataattcaaaaggggggaaaaagcaaaacaaaaaagaaagaaaaaagaaaaggaggcagaaatcacaactaatgcacttcaaagggaggaggggaagtgtcttttggagaatgggaggccgcttttaaagagggcaaggcgaaaaatcagcaaacatagtcgcgcgggtgaccgtccttgtgccttgcgtttttaaaaagccgctcctgaacgtcggtttcagaagcgagaggagcgagcagggtctcgactcgcgcccgagccctgccgctgagctcgaaatagacactccagccctgcgtcccaggaatctctctccagcccctaggtcttttgttgcaaatgtgaaaggttctcctagaagactttttacctttctttttcttcttcccccgccccctatctgtcttcctctccctctttctcgctggtggcgtctgcagctgtgctagacccggctttaacagggagcgagagagcggaaaaagtctctctcctttaaaaaaaaaaaaatctgatttaaacccccttctaccagcgctatcaaaacttgaattgcaaactggcttccgttcgccgccctcctcctccttcctctgctccgagcctccggagggtgtctcggtttcaatccaaatcttgctgggctcttctcccgtgcctctctctcttccttgtcctaaaacgtgagcgaattcgcttcctaaatctgtgtccaggcgcgcagggcagggaggatttagagggggaaaaaatggaacagagggaaagagagggaggggagagagagagagagagagagagacggagtcggagagggagggagcgagagaaagcgagagctcctcgccaccctccgccgcctctagaattcaccgggcgtctgctcggcggctctagaaggtcgggctgcgctgtgggctgcggggagccggaggcctcttgattggctctttgacgctttcggaccaattgtgttgctgcataggcgtggttttcacaggtcgagtgctgggggatagagctgagttataaaaagaaggtgtcggaaactgtaacgtcgcagcgccgcatcggtactactgcctgtcctgtgaatatgtcaacatgatcagagggcgggcgggagccactggggagcgcgcgcgcacagagtcgcctctaggtggcttatcgagagatcgctgcagcccctgagctcgctcgctcgctctggttcagcccacgtctgaaatgcctcagtcatccagccggggatcgagggaggaggcagggccaaggaggaagggggagggagagagggagggagccagcgagcaggcgagccgggcggggaaggcggagagcgcgcccgggcgccgggcaggggcgctcgcctctcttgcactccgctcgcctctccgaccgccgcggccggttctctctccagctctccttcttctccccgccccgggcgagccgggcgggtggccgagcctccccgcgagctgccatccggccactcggttctacaaaagccggcggcagccgagaagcgagcgccgagactccaggcttgcgtgctctccagccccacgtggagccaagctccgcccggccgccgctgaagggctcccgagctcgggtgtctcggtgctggtctcccctgcgtctgggctgggggagcacaaggatgcggccatatctcagcacacgcatgtgtgggcttcctctccactgcgccccacccgcagccatgtgcgggtacccaaacacccccggtgtatctgtactcgaacacgcgccaacacactgggactgaaacacacaccgaaaaacacgtacacacaaacacgtacacagcctgcgcggctggccctgcctgagctcctggggaagatggatttgggatttttatgaaatgcatttaccagcccttttggatctcgtctttcatttgcatgcgggcccccatattccacctggatgtgggtgtgggtgtagagaagagaatggaggatctggacaaagcgagcacagcgagagactgggttctgagcctgtcccctccaagccgctgccctcacctcgaggcccggctgggtgcacagcacagggtaaggggtgggcgattgggttgggggaggcgcgccagcctggtatcttctctaggcatcgcacttatctctcggtgcctcagttctttctccaccccggggacttaatctggccagaagtcggggagggagggtgaatttgtaaaacaaaccgtgaaacgcccccacctcagaggcgagttgactgtttttagtacgggtagggtgggggcctcctcttaggcggacgggagggaaacgaccggatcttaccaatcgccgaattaccaactctgttaccgcagcgcccggtcggggtcagaggattcgcctaagcccacagttcttgattctgggggccaatgtcttggaccatccttgcttagatggagggaaatcttgaaaacaatgttcttttatctttcctgagatgaaagcttcttcgatggaaagggaacggagaaagggctgatctgggggcttaggggtttaagagactcagggctttggatgtgtgtgtctctgtaggccagcacaggcctctctcgcattttgccttgtgcacccgcgcaacccccagcaaccccgaaaccccaacgtggcaccaagggaagggtgaaaatgaagtgctcttgtgggccaaccacgctgagataggggaggatcttttgaggcgacaggcttctccagcctcgcatttttgacgcacatggttaagagagcttggcgccagcgttgagaattccctgaagtcaccagagagaatagtgtggttctgcgaactccgtctggctcgccat

SEQ ID NO: 916961 - DNA, 4001 bp, Homo sapiens
agagaaccgagtctggacgcacacacacaaacacaccgcgggcctccgcagccttgcagacattctctccaacgctgacctcgagaaggagagctgcctgaccccgcctggccggcgctcgccttcctgacatctcccctccaccccctactcatcacccctactctcaacgactctggggtgaaggcagggtgaaggtgcattgggatgggggccgagatcaaagatgctaagaaatcgctgcgggccctcaccccccacccagtggggccaccagacgtcccctgctccaggtgtacacaaggcagtgcccagttttattaaaataatcaaacagtcactggggactggctagggttttcatctccactggtctcctctccttgccctttccctctctgagatgtattttttttttttagggtgagttgaagaggtcaataaaagcacaaacacagtcagtaggtctcagtctgagcagacccagattgggacaccgaatattggtgcttggagtaaatgtcaggagtcctgttctgtttcccatccttacctcctgtacccccatcatactgatttttctagggttctgataagagacttgggcctgcaagtcaaggtctggagaaagggatggagggaggagaaatgccccgaggtcagcagctgtgtaaccctctgtgactgctctgctaaaatcccaggccaggccattgctgcaaaatgccaaagtggagaatctccaaccctgaatgtggggcaaccggggagaaagccagccctcctttgctatggtgctcactccaccttccaggtttgtttgcaaacagatattttccctttgcccaggcgatgtatttatttgtgaaaacaccctcaccctccaagtcagcttggaggcctttaggcttgctggcaaggcgaccctaggccgaagacacgaaaaacaaacatggcatcggaagaaggctgaaccgctacatctccagtagagggaaagggaaatccagaaagaccttcccaatccctttaagttctcagagatttggggataaaattaattcccataaataatcttcaggcccctccagagaggaaaaatctggactctcccaggtaatagcccagccagatttgcttagctcattgagcacagatggtctgggccaccaagcaaaatagggattttcaaacctttcgagagaatccattcttgccaggtgacacacgaagccattcttatttcgttcatgagaagtagcagcacagcaagagaagattcagcaagactaagacggggtgaaaagccaaggagggccaagtgcaaagagaaacctatttcccccctcagtcctccagggtgaaactcacctccaactatcccacctcttctttggagcgcaaaagccaggagtgcgcctcgctggagagcagggctcaggtgaagactttgaaaaggaccaccaaaagagacctctttaggccaggtcttcttccaacgtctgtcaagaagagcacgtacctcccagctcaaggttggtttgtggtctccgacaaattaaatattactgtttattaccaggcataccccagtaaaataaagaggcaaccaggcgatagcgactatctcaccagccgctgcacctataggacttggagacgtcacgagtcacgcaaccggcccgcgcgctgtcacgtttggctggggggcagcggcgggaggtaaatttctctccgtcttcgcctatcagtgccgggtctgcgcagccacaggttccggacgtcttggccccgggaataaataaagacataaaccaacccggctttctccggaggaatgagggtgatgaacataagacacaaatagagccaagatcgactttcttaggaagggggagaggagggaactcttcacgaagggaggtgggagtccacctcagacctctattggaaggaaatcgagttgttccgggggactgaggtctcttgcataaggcatgggatccttattattattattattatttttaaatcccccgcggaggagctctgggcaaatgaataccgaggcgccgctctagctggttaggcttgggatgcgataactcagtgccctcttgcagacttgcatagaaataattactgggttgtcgtggaggggacacgagacagagggagttctccgtaatgtgccttgcggagagaaaggtccaagaatgcaattcgtcccagagtggcccggcaggggcggggtgcgagtgggtggtggagtaggggtgggagtggagagaggtggtttctgtagagaataattattgtaccagggcccgccgaggcacgaggcactctattttgttttgtaatcacgacgactattatttttagtctgatcaatgggcacaatttctaagcagcgcagtggtggatgctcgcaaacttttgcgcaccgctggaaacccactaggttgagttgcaaaacgtaccgcgtagacgcccctggtggcgccgagagaagagctaggcctgcccagcacagagccggagagcgtcgggccttccggaagggtaagttctccgccaaggggtcccgagggagctggacgtctgaatctggacttgcccccagcttcggggttcgattctgggttttgcgcgtccccaacccccagggctttccgaagcatggcctggctccaggcccggtcctgtaaggactggaacggcagcaaaatgtgcagggaggcagtcggccggcagagctgcggcgggagccaaggtcaggcccgcggggagagcgggcagcttccagcgccggccacaagctcccaggccagctgggccgcagacccctttgcttccagagagcacaacccgcgtcctttctctcagccaggctgcagtggctgccccgagcttcgctttcgtttcccaagctgttaataacgatatgtccccaaatccgaggctcgtgtttgctcccagatgccaagaacgcaacccgaaatccttctcccaaaccctaggtcgacgagatgagttcctacttgacctctgagccgaggtgggccggaaaccgaggcctaggccccgccggggctgcaaggaaaaggggaaactccgagcgtagcgtcttttccttgtggttcctttctccggcatcccggactgcgggccctgcagccacctggaccggcattcaaaggattctgcaagtccagcttcacagactggctttcccagacgctccgaagcccgcaccacgaacagaataaaggagagacgagagatcgcaactagatttgagaatcctcgttcttttccccaatcgttcgggcagtaaactccggagccggctacagcgcgcatcctcccttcctcctttcggagaactgtcgctttcccgaagctgctcccagctgggttttctcccgaagtttatttttctcattttgcaaaattcctgccctgattttaatactgcaacaggacagcagaggttcctctttaaaaagtcaaaacccaaaccaaaggggcccattgctgttgataatttttttcttcaccttctccttccgtttttaagaaagacacttccaaaactacccattgttttcctctcaaaagagaactcgctttaaaatgcatccctttctatttctctccggatatgtccccacctgacccggtggcaacttgtggggcgtgggggtagtgaaaaatagaagtgtggacggggctgggaaaatgaataagaattataacaatagaaatgatgacaaaactaaactttgaccaattcaatttgcaaaagaaagggttggtctgagggtgagacattccctggtttctcaagggggtcactttccctctcaccgagttaaatctggctctgttatattttttccaggaacacagtatgtctcttcccaatgttttattcggtttctggtttccccacttttgaccggaagtatgtgggaagaatactggctgttattatt

SEQ ID NO: 916962 - DNA, 4001 bp, Homo sapiens
tgcaaaagacccgcgtcagacccggagaaggtgaggcccgcatctcccctgcgcaggctctccgtgataagcaagctgcccgtcaaatttgtctggacttctggaagagccaataaagataaggcgtgggtatttttggaagccactgggtaggaaccaaaaacaaaacaaaacaaaaacccagtgtcctttagagaatttctttcttcgccaaattacaagatgccgtcgaaactctttttattaaacctcacaagaggaatagttttctgcagcaggcagaaatgtgtgaaataacccgcctcttgcaaaaagaaaaacacagaaggggaaggttgtgcagattgagactaggttcaaaagagaattcatatacaccttttaccagttacaggccttaacattaaaagtcctttaaaattaaacatccttttctttatcccaaccttaagtaagattcgttaaaagataaaaagtagccaaacagaagactagatgaagaaagtcaccgtgcagccgttccgaggaaggctcgtcactgggtgcccgccaccagcgctctgatgccgggcgggggatggcgggcattttgtggagtgaccaggccgaaaggggtttctctgaacttcagccaggcctggcctgctaaaactgcaggctcaggctcaggattggcgaggacaaaatcattctcggataagtcctaggctggagacattgaatctgcagcccgggtccccgcaatgcatagaacggcccgggtttgcaggcgtatgagcttagaacacacaaaataactgccgcagagctgttcaagcccgatgagcctgtctcctgctctctgatctccttccaatctcttctatacgcaagtaggaattccccctagaacgggaagactttgggaagcgggcacaagcgatggtcccccaaaacctcagcagctgcttaagcaagcggccagatcccaccctgacctgctgtggccagagatctagaaatggggccgaggagaaggacagcttctgaggcctgacttgcaagcagctttcttcgcctcgttctcggggcttcagggaggcggcgactggagccccgctgcctactcacaacaaaagaaagcagggctggcgcccctacacgcgctcccattcactgccggccgcggggagaatcctaccccgcgccctcgccagggtcccggggagctctgggctggcggaggcgaacaagatgcggtttgacagaaccaggccgtgcttctgcaaacctcaatgccgctccgccagccgcggcggcctcccagactccatttgccggggagctccgagccgcgcaaaatctctgcaagctgtgctctgcagaatgcaaagccgggctggaatccgccattcccgccgccccagccgactcggccgacgagctccctcctgagcctcccgggccatctgccgggacggttacctcgttcggtgaagccggtgcattcaccacatcctctgctgctcctagcagggaagccggcggtgaggcgggggagcaggcatggtggctccggggtttatgcggggtttactgcttacccagaatagcggctactgctgcctactagggcgcacctaccgctggagcctccgcggcgactgcccacctccaacacacacctcctctgctgtgcgcttgctctccctaaatacttcccagttggcaagcgccaaagaacacaaaatagcctccaagagcaccggcaaccatataatctcagtgccccgctcctcctttacacccccagggagggaaagttggaagcccagtgaatggtcgaagtcctttctgagcgcagctttcaggattaaagttcccggattcgaggtaagagtcagtctctctcactctctctccctctctctctctctctgaaatacaagccaactcagctgagcacagtgacgttgggttgcctcgatgctcacaaagtactgaaatcgcctatccaactagctcccactgcactctgtcgccctcccccttctctctccctcccaccctcccgtcctcccttccccccaccccaaatttccactagatttcccgaacactcaaatcacaatacgactctcaacacagacctgcaataactccctcctctctacccctttcccaacctccatccatctctgcttctctgagcaagcggtggctgcaaaaactcctgcacaaatcatttcaaacgcggtcggcttctaatcgggaagtaatctcagtgacgctggcggtgcagagaaccgagtctggacgcacacacacaaacacaccgcgggcctccgcagccttgcagacattctctccaacgctgacctcgagaaggagagctgcctgaccccgcctggccggcgctcgccttcctgacatctcccctccaccccctactcatcacccctactctcaacgactctggggtgaaggcagggtgaaggtgcattgggatgggggccgagatcaaagatgctaagaaatcgctgcgggccctcaccccccacccagtggggccaccagacgtcccctgctccaggtgtacacaaggcagtgcccagttttattaaaataatcaaacagtcactggggactggctagggttttcatctccactggtctcctctccttgccctttccctctctgagatgtattttttttttttagggtgagttgaagaggtcaataaaagcacaaacacagtcagtaggtctcagtctgagcagacccagattgggacaccgaatattggtgcttggagtaaatgtcaggagtcctgttctgtttcccatccttacctcctgtacccccatcatactgatttttctagggttctgataagagacttgggcctgcaagtcaaggtctggagaaagggatggagggaggagaaatgccccgaggtcagcagctgtgtaaccctctgtgactgctctgctaaaatcccaggccaggccattgctgcaaaatgccaaagtggagaatctccaaccctgaatgtggggcaaccggggagaaagccagccctcctttgctatggtgctcactccaccttccaggtttgtttgcaaacagatattttccctttgcccaggcgatgtatttatttgtgaaaacaccctcaccctccaagtcagcttggaggcctttaggcttgctggcaaggcgaccctaggccgaagacacgaaaaacaaacatggcatcggaagaaggctgaaccgctacatctccagtagagggaaagggaaatccagaaagaccttcccaatccctttaagttctcagagatttggggataaaattaattcccataaataatcttcaggcccctccagagaggaaaaatctggactctcccaggtaatagcccagccagatttgcttagctcattgagcacagatggtctgggccaccaagcaaaatagggattttcaaacctttcgagagaatccattcttgccaggtgacacacgaagccattcttatttcgttcatgagaagtagcagcacagcaagagaagattcagcaagactaagacggggtgaaaagccaaggagggccaagtgcaaagagaaacctatttcccccctcagtcctccagggtgaaactcacctccaactatcccacctcttctttggagcgcaaaagccaggagtgcgcctcgctggagagcagggctcaggtgaagactttgaaaaggaccaccaaaagagacctctttaggccaggtcttcttccaacgtctgtcaagaagagcacgtacctcccagctcaaggttggtttgtggtctccgacaaattaaatattactgtttattaccaggcataccccagtaaaataaagaggcaaccaggcgatagcgactatctcaccagccgctgcacctataggacttggagacgtcacgagtcacgcaaccggcccgcgcgctgtcacgtttggctggggggcagcggcgggag

SEQ ID NO: 916963 - DNA, 4001 bp, Homo sapiens
tgcttgagcccaggaggtcacggctgtagcgagccatgatagcgccactgcactcagcctgggtgacagtgagactctgtctcaaaaaaacaaaaacataaaaaattctggactgcgtgcacccagctgtgggccagccatcaccaggaacacaacagacagacacagggattgtcctaagattgctagactaggcacatcgggggcatttatgctgtgcttaaacagagacaataatgtaaggaacacatgtatgtgccaagcactcaatacatatgactttttttcattcttacaatcacctcgctatttggcaggtaaggaaacttacgttgaagaggtaaagttgttgtacccgagcgagttagagaaacgccacagtttgagacgaaattaagagtcctttatttagccagtgcccaagagacggctaataaattctcttggcccgaggaaggggcttgattttcctttatactttggtttaggaaggggaggggagctcagatgcaacaattctacataagtaaaaacatgcaaaaattaaaaggacaaagagtcacagagaaacaattaaaagacaaatggttacagagaaacaacagttccaggtgcaggggctctaaatctttcataaaatgttagatatgggtgctctgcccgacaccaactcaaggttttatggtgttatcttttgagcaaaatcctgggaacttcgtacattgcttgtttcagtaccttatcagttaattggactctttgatatgttgagattctgcttacacaagttaactccttgaggaaaggggtgggtaaggagtccttgatgtcttgtaaatgagggaaccagatggagttcatccggctttctcaactaagggagagctaattcatgtggaaacaaggctaggtgattaaggggaaaaaaagagtctaaaagcaaggttagtaaaaacaaggtaaggcattaaaaaacaaggttagtaaaaacaacgttaagcattacaaagtgatttgctcaggatcacagagccaggaagtaaaggagataaacaagctgggttcctaattcatgtccgtctgagaccagagcccaggctctctctgctgcaaggggctgcctgttgggaccaacctgccctggctctggcagtccccggggaggggactgataataacactcggaagtatgttgggctaccatggaggacagacctttcatcttgcagatgaagaagctgagacctagagagaggaattgcctgagcaatgtagggatacagctggagccttgaaagcagagagcagtctcactccaggcaccaattcccctgacccaaaagctgtcctcaagtgtagggtcgatgcagtgcctgggtaggaacgccggctgaatgagcgaaaaggcctggtgcacgccaagaatctcattctggaggtcctccagttttgggggcaaacactctgcgtctatggtccaaatgtagccggcaggctgctaacgtgtgacctcggtctcgagaccgtggcaagcttcacatacttttttcccgctcccgtaaagccgccagtggatcagtctttgcaccaagagttaaaagtttaagattcccgtcccggattggccacccacaaggtgggctgctccccgaacacgtcgcatccctctctcgacctgaacatgcacgtgcaacaaatggggtcacagcgcgtggggagcgcagtgaggaccccggaggcgccctgagctcgcgcccgctgactgccgccccggttcccgcccgcgcgggccgcctgcgggcccccgccctaacgccggatccggcctagtccaaccctccgactcacatttctctgaggctcggagtttccgaagagtcccccggcccgacttcccgcaggcacgaagcgggccggccagtcccccggtgtaattcccagacgcgctacagcaacgccggctgtttcctccctgtttgcaccggcaacgagcccgacgacggagcgtcgcaagggccaagcctccttcagcgcgtagggagcctgtgtttttctctggtgccccgtcgtggccagcgggagataaatagcaaacgtcgctgctccttgaaatagggaagcatggaggcaaagaatccgtccatgcactacacgtatttcaggatggtggttaccatcacgtgaaggtgaaggtggaaaccagggggaagagaatgtaagtcagtggtcctcaaacctggctgcgcgtgagaatcaccagataccagcctgggcaacacagagggactcctgtctctaaaaaattttttaaacttaaccgggcatggtgggacttgtggtcccagctactcgggagactgaggcgggaggatcagttgagcccaggagatcgaggctgccgtgagccatgactgtgccactgcactccagcctgggtgacagagccagacactgtctcaaaaaaaagaagaaaaaatccagatacctttaaaaaatccagatgcccaaaccaaaccccaaatcccatctgagagtatcagtgttttccaaaattccccaggtgtgttcaatgtacaacttgggcagaggcctgctggcataagtagatggaagttattggtaacttttttatttttttgagacagagtcttgctctgtcgccaggctggagtgcagtggcgtgatctcgattcactgcaacctccgccttacgggttcaagcgattaccctgcctcagcctaccgagtagctgagactacaggcgcacgccaccacgcccagctaattttttgtattttagtagagatggggtttcaccatattggtcaggatggtctcgatctcctgacctcgtgatgcgcctgcctcaggctcccaaagtgctaggattacaggagtgagccactgcacccggccgataactttctattatagtcttatattggtggtgagttcaaaagtgttcattctattagtatgttttataactcgtgtgctacaagtattacatgccaactattccattaaaaagaaaatgaagaaaaatacttgtttgttctcttttctttcattttcccattctttcatttcttcttcccttcatttctccattctttattcatctctgtttttcctggatgcagcatcatggcctcagctgggttcagtggcttacgcctgtaatcccagcactttgggaggcccaggagggtggattacctgaggtcaggagttgaagaccagcctggccaacatgatgaaaccccgtctctgctaaaaatacaaaaattagccgggcatgatggcagatgcttatactcccagctactcgggaggctgaggcaggagaatcgcttgaacctgggaggcagaggttgcagtgagccaagattgcgctgctgcactccagcctgggtgacaaagtgagactccacctccaaattaaataaataaatgaatacataaataaataaataaaattagcaggctgtggtggtgcacacctatagtcctagcaacttgggaggctgaggtgggaggatcacttgagctcaggacaaggaggctgcagtgagccgtgatcacaccattgcactccagcctgagtgacagagtgagaccctgtctcaaaacatggtctctacagtcagaacgcccaggtttcaagctataccatgctggtgtagtcttgggcaggtcacttcatctgtctgtgcctcagcttcctagtccatggaatgagagtaaaaatagagcaactttcaggccgggcctggtggctcatgcctgtaatcccagcactttgggaggccaaggctggcggatctcttgaggtcaggagcttcagaccagcctggccacatggtgaaacccccgtctctactaaaaatataaaaattagctgggcgtggtggcaggcacctgtagtcccagctactcgggaggccgaggcaggagaatcgcctcaaccgaggagacgggggttgcagtgagccaagat

SEQ ID NO: 916964 - DNA, 4001 bp, Homo sapiens
ctaggcgacagtgcaagactccatctcaaaacacaacaaaacaaaacaaataaaccttagccagacacagtggctcatgcctgtaatcccaacactttgggtggctgaggcaggaggatcacttgaggccgggagttggagaccagccacatcatgagactcatctctataaaaaatcaaaaattagccaggagtggtggtgcgcctgtagtcccagctactcaggaggctgaggcaggaggattgcttgagcccaggaggtcacggctgtagcgagccatgatagcgccactgcactcagcctgggtgacagtgagactctgtctcaaaaaaacaaaaacataaaaaattctggactgcgtgcacccagctgtgggccagccatcaccaggaacacaacagacagacacagggattgtcctaagattgctagactaggcacatcgggggcatttatgctgtgcttaaacagagacaataatgtaaggaacacatgtatgtgccaagcactcaatacatatgactttttttcattcttacaatcacctcgctatttggcaggtaaggaaacttacgttgaagaggtaaagttgttgtacccgagcgagttagagaaacgccacagtttgagacgaaattaagagtcctttatttagccagtgcccaagagacggctaataaattctcttggcccgaggaaggggcttgattttcctttatactttggtttaggaaggggaggggagctcagatgcaacaattctacataagtaaaaacatgcaaaaattaaaaggacaaagagtcacagagaaacaattaaaagacaaatggttacagagaaacaacagttccaggtgcaggggctctaaatctttcataaaatgttagatatgggtgctctgcccgacaccaactcaaggttttatggtgttatcttttgagcaaaatcctgggaacttcgtacattgcttgtttcagtaccttatcagttaattggactctttgatatgttgagattctgcttacacaagttaactccttgaggaaaggggtgggtaaggagtccttgatgtcttgtaaatgagggaaccagatggagttcatccggctttctcaactaagggagagctaattcatgtggaaacaaggctaggtgattaaggggaaaaaaagagtctaaaagcaaggttagtaaaaacaaggtaaggcattaaaaaacaaggttagtaaaaacaacgttaagcattacaaagtgatttgctcaggatcacagagccaggaagtaaaggagataaacaagctgggttcctaattcatgtccgtctgagaccagagcccaggctctctctgctgcaaggggctgcctgttgggaccaacctgccctggctctggcagtccccggggaggggactgataataacactcggaagtatgttgggctaccatggaggacagacctttcatcttgcagatgaagaagctgagacctagagagaggaattgcctgagcaatgtagggatacagctggagccttgaaagcagagagcagtctcactccaggcaccaattcccctgacccaaaagctgtcctcaagtgtagggtcgatgcagtgcctgggtaggaacgccggctgaatgagcgaaaaggcctggtgcacgccaagaatctcattctggaggtcctccagttttgggggcaaacactctgcgtctatggtccaaatgtagccggcaggctgctaacgtgtgacctcggtctcgagaccgtggcaagcttcacatacttttttcccgctcccgtaaagccgccagtggatcagtctttgcaccaagagttaaaagtttaagattcccgtcccggattggccacccacaaggtgggctgctccccgaacacgtcgcatccctctctcgacctgaacatgcacgtgcaacaaatggggtcacagcgcgtggggagcgcagtgaggaccccggaggcgccctgagctcgcgcccgctgactgccgccccggttcccgcccgcgcgggccgcctgcgggcccccgccctaacgccggatccggcctagtccaaccctccgactcacatttctctgaggctcggagtttccgaagagtcccccggcccgacttcccgcaggcacgaagcgggccggccagtcccccggtgtaattcccagacgcgctacagcaacgccggctgtttcctccctgtttgcaccggcaacgagcccgacgacggagcgtcgcaagggccaagcctccttcagcgcgtagggagcctgtgtttttctctggtgccccgtcgtggccagcgggagataaatagcaaacgtcgctgctccttgaaatagggaagcatggaggcaaagaatccgtccatgcactacacgtatttcaggatggtggttaccatcacgtgaaggtgaaggtggaaaccagggggaagagaatgtaagtcagtggtcctcaaacctggctgcgcgtgagaatcaccagataccagcctgggcaacacagagggactcctgtctctaaaaaattttttaaacttaaccgggcatggtgggacttgtggtcccagctactcgggagactgaggcgggaggatcagttgagcccaggagatcgaggctgccgtgagccatgactgtgccactgcactccagcctgggtgacagagccagacactgtctcaaaaaaaagaagaaaaaatccagatacctttaaaaaatccagatgcccaaaccaaaccccaaatcccatctgagagtatcagtgttttccaaaattccccaggtgtgttcaatgtacaacttgggcagaggcctgctggcataagtagatggaagttattggtaacttttttatttttttgagacagagtcttgctctgtcgccaggctggagtgcagtggcgtgatctcgattcactgcaacctccgccttacgggttcaagcgattaccctgcctcagcctaccgagtagctgagactacaggcgcacgccaccacgcccagctaattttttgtattttagtagagatggggtttcaccatattggtcaggatggtctcgatctcctgacctcgtgatgcgcctgcctcaggctcccaaagtgctaggattacaggagtgagccactgcacccggccgataactttctattatagtcttatattggtggtgagttcaaaagtgttcattctattagtatgttttataactcgtgtgctacaagtattacatgccaactattccattaaaaagaaaatgaagaaaaatacttgtttgttctcttttctttcattttcccattctttcatttcttcttcccttcatttctccattctttattcatctctgtttttcctggatgcagcatcatggcctcagctgggttcagtggcttacgcctgtaatcccagcactttgggaggcccaggagggtggattacctgaggtcaggagttgaagaccagcctggccaacatgatgaaaccccgtctctgctaaaaatacaaaaattagccgggcatgatggcagatgcttatactcccagctactcgggaggctgaggcaggagaatcgcttgaacctgggaggcagaggttgcagtgagccaagattgcgctgctgcactccagcctgggtgacaaagtgagactccacctccaaattaaataaataaatgaatacataaataaataaataaaattagcaggctgtggtggtgcacacctatagtcctagcaacttgggaggctgaggtgggaggatcacttgagctcaggacaaggaggctgcagtgagccgtgatcacaccattgcactccagcctgagtgacagagtgagaccctgtctcaaaacatggtctctacagtcagaacgcccaggtttcaagctataccatgctggtgtagtcttgggcaggtcacttcatctgtctgtgcctcagcttcctagtccatggaatgagagtaaaaatagagc

SEQ ID NO: 916965 - DNA, 4001 bp, Homo sapiens
actgcttacagtcataaacattttggagtgaaatattcagattacccagcagggccttgaggaattgaacccatccagttaaggttagctcacgcaaaaaagaaatttcaagaaacttctagtgtgtaccatccttcaacactagatcgaggtcagctgcaaggacaagccttcacatatgtgtagtaaagggaagggagtcagaggactaagtctgggctctaaagaaaaaaattgcagatgatgtgaaaaatttccatcttctgcaaaatgctgctttagaatcagtcttaaatagcagcactaaagttattcatccacagcaaagcaaaaaccatagagcagagggataggggcccataccattcatctagacaatactggtcttcatcaagttagaaccaacaaagagctagataaaagccaacaagccagtcactgtccacaaagcagatgttcacgttacacgtggcattacagcatcagggagaaggattcctggcacttttcacatttgaaagcactcctcccacacttgctggtctgttttgttttaatacctgtgcttccccctctggggccctcaacctctcacaaaatggcattgaagctgcttccacacatgactgggtatcttcggccctgggcctcttcaaatcaggcaacttccactggctgtcagggtgatgcatgaaatccctagagaagagaggaaaaggaccacggcagggagcctcctcaagtgggaaccactgagattaactcattatccgttggcaggtaagaagagcaaagtccctgactgggctggtgaccatgggtgctgagacacccactggggacaaggacaacttgtccagtttcttcacagttaaggtagcaggacaaccatctaagatttcccaaacttaagtcgtttgagtgccactcttcatgactatttctacgtctccctccttacctttactataatttagtaaccgcgtctctatcttgactagatttttgcatttaaatatatttattttaaaaggaaactctatcattgtgaaactgcttacttaatggaacagattttcttaatagtaacgaaaacaagtaactatgttcatccatatgccacctcaaatcattgctattacccccagtggtgccacctacagtagcagctttgggaagcacaagcaacacctgagggttcagcgttcgagcccaggcccaatcggcttttctccacctcttccccttaaccaaaggtcccggcaaggggacgcagcagcagtctgcacgacctcacccacgtcctctggccgcccctcccctccagcagcaccaggtttcctgtcaaaacaaacccttgggggaggggacggcggaggcagagctgagtgccggggaaaccacggcaacaaatcccaaacacacgctgccgggcccgccctgcctctaccctggctcagttccctactccagcccggccgaggagtgtgggggaagggggtgccctgggcccctgatggcgggatgccgctggtacctgtccagcaggatttaaacagcggcgaagcggcctccgaggcccgaagtccgtgtccaccccgacacgcggggcggccactcggtgccccgctccccgctcccacgcgggacggcagttcgaggtcaaacaaggggacgcggagtgggaagacatgaactaggagccgagcttgatggcccctgaccccgccttcccaggatggagttccgagatagggcaggggagccttcgggctgcagcggtgtcccctccgttggacctggccggtcacctccgagccggcaacgcctcccccgtgatggatacgcaccgggtccagcacgtagacaagaggagaacggcgacggagtgaccccgggtcagggctctctgggcgtcccctcaccgagcacagcacagtcacctcgaaaactcaccagcccaacaaacccccccagccccagtgtcccccccaacgcggtatttaaagggccctgagggactctagggaggcagccacggcgcggccatcacaaaaccggatagcggggggacgacggcgcgacggggcaaggggatccagggcccttcagtctccgaaagccgagcgctcacagactgaacctattagagaaacagtcttcgtcagtttgaaccagagaggccgagaacagctcggatgggagggtgtttcggatgcgagagggcacggttcccccgcgcggcgagtggtgcggtccgggctgccgggggcggggtgagaagtgtttacggaactgaggccgccgagccgacgggagcgcccggcgttgggggcggggcctgccagggcactgggggcggggccgagtgggggagcgggggctgagcgggggctgagcgggggctgagcgggggctgagcgggggctgagcgggggctgagcgggggctgagcgggggctgagcggggggagcgggggctgagcggggctctggggaggtgggcgaagccgcgggccaagcctccagtggagtgccggacagatcccctgggcttccaggcgcactggcgtggaccacactgcgagctcccggccgcgcgtggaacattgagtgcccgcacacccctgtctagacggggcaatcggaactgggtgcccaccaacacactgtccacacttacagagacaacccaaccaacaacgctgctggtgggctttcccacgcacgtcagccactaaccgggtcatctccagttgcgtctacacctccacataaacacgggtctagatttgcacctgcacgggacgattagctccttggagtcacacccatccaggccctctgaagacttggcgtgcgtgcaaaagataaagcgtcttacttcctctagggttcttggcagcacctatctccgggagaagtttccaccttggttaatgtaaataaccagtcccaggagggctctgtgccgtctggcctgctgctcagctcctgctgtgggcgtgcttgagggtgtagagaaacaagcttcccccaactgttcacatcaaaactatgccttctgccaggtgtaaatcggtgctgtattacttgggaaatagtttcatgcaggaactacttacatgaagtttgtatagactaaagtatttctgtttagtgccgaaattatgtctggattgtggaggcagattggccaccaccgttcaaaaacaacaacaacaaacaacaggcaacattttaaagcagggtagaaagtcagttgttcagtggttacaacacagactcctctatggttccagtcctggctctgacattcactatccatgagatcttggtctctggggataacaatgatagctatttccttgggttattttgaggataaagtgaaataaagcatgtgaagtgcttagcagggtgcacagtaagcactctaagtattagttattgaaattctttggcaaaccactgtggccaaacttagctggtgatctgtataaatttgtatctgtgcctccttttgccactttcctctcttctcctaaaatatacaacctaataatacaggttaagagattaaatagaaggtgctgtccccacctgagttcttccctacaaacatgctcttatttgtgtcattcgttggataagtaatcagaatgacagaagcctccaatttcaattcctgccaaatgacaaccaccacacaactgccatcaccaccctaaaaactccacaatagaaagatgaacacccaaatcccccaaacttctggtaattctgtgacaatgacacatggcaacattacttcctttgttagctttgtaaggatttaagtattgttttgagctatgacataagttggagcaggtgaccatgagtcagggtagttgtcctttatactggagtgaccagctgcctgatcctaggcatgacacttcttttaaagttcagatatgtagctctcaaagccaccaggaaagcagcttttgtcaaag

SEQ ID NO: 916966 - DNA, 4001 bp, Homo sapiens
ctaattcatcaaatcaacaatttaaatataaaacagagctctgtttatatattaaaatagcaaatatatttctctgtactttttctttcagattactcgtaattcagaaaggagagcttttggagaaataaaggttcagtaaccgcagttaagtcctagagttcaagatctcagctgatgacttttttacttactaatactgagccttaatcaatttgagaaaagatcttcttaagaagggataggctgggcacagttgtttacacctgtaatcccagcactttggaaggccaaggtgggaggatcacttgagcccaggagtttgagatcagcctgaacaacatagcgagatctcatctctactaaaaataaaaaaataaaaaaagcaagctgggggagcacgcctgtggttccagctactctggaggctgaggcagaaggatcccttgagcccagcagattgagacttaagtgagatataatcacgccactgcactccagcctgggtaacagagcgagaccttgtctcaaaaacaaaaaaagaataaaaaaagattaaaagtactgcatatctattggggttactctcaattcacacaatcggaaaattttaaaaactttttttgagatcatgaaccactttaagaatcggctgctatgaactctcatctcaggaaaaggcatattcacaaagttttgcactcaatcttagcgggtcacagtcattcagtgaagtcatccatgtcaatttttttttttgagacagtcttgctctgtcgcccagtctggagtgcagtggtaattactgcaacctctgcctcctgggttcaagcgagtctcctgcctcagcctcccgagtagctaggattacaccatgcccggctattttttctatttttagtagagactgggtttcgccattttgaccagactgatcttgaactcctacctcaagcaatccacccgagttgacctcccaaagtgctgggattacaggcgtgagccacggcgccagccaaacgtcaaattagattataaaatatttccactaaatgtgtaattctagaattaatcattttctgaaaaaaatgttaattatccctacatatgactcctaagaagtgagcataacccctccctcaatagctttccacctccaattcaacacaggaggaatcctgggtttttagaattcaggtcaacagagaagggtcttaacatagtcacatttagtaagatagacctttggcctctctttaagtgaaagttcagtgcagccaaggcactaatttccaccattgtctcgacttaatttcgtcttgggctgcaagaattcattattgctctttgcatcactgttgtctgggaccacttcaagtattttcaaaggtttgataccgttccacttaaactctgagacccggttttctcatttacctgacagtgatagtaacagctacttctcagggttattgtttagagaatggacgtttatggaacactcagcagtgtctgcacacagtaagtgctcaataagagttagctatcattattacgtcctcaccggggctgtccccttgaggttggatcactgtggactccaggagctggcacatggtacccaccgtccgtgactggggtaggcctggggccggaggagggccctggagccctgggagtcccggggggcctggtcgacgggaaagttccgaaggtggccagggctgcctcggtggagttgaggccctctgtcgtcaccgccggggtggcatcggtctgggcgctcacggaggcccagcagcccaggagcaccaccaggagcggcgggagacctcgcggcctcatctcccagggagtcccagcgaggcccgcgacatggacagcgcgttgcccggcaaccgcgacagccaggcgcggggcatcacgggaaggggcttgcgaagccgcgagaagctgccggagactgactggggcgaagcctggatgaggcagggggcggatcccggatgaggccggagggcggcgcctgggtgaggcagcgatggcaggcacaggggcgagcactagtgagcgggtgtgaagctggcgtaaacgaggggcgtgtaaatcccggctgtggtttccaaccggtccgcggcgcttgcttaaaaaatgcagattttctgtagttccagctactcgggaggctgaggcagaagaatcgcttgaacccgggaggtgaaggctacagagagccgtgagcgtgccactgcactccagcctgggcgacagtgtgacactctgtctcaaccaaaaaaaaaaaaaaaaaaaaaaaagacggatttccaggtaccacctcaggagatcctgagtcagttagtctagggcaggacccaggaatcagtttttgggggattttttttgagacagggtctcactctgtcgcccaggctggagtgcagtagcgcgatctcggctcactgcagcctcgacctctgggactcaagcaatcctcccacttcagcctcctgagtagctgggaactcaggcgcgcgccaccatacccagctaatttttgtatttttttttttttttttttttttttgtaaagacgaggtctccctccgtcgcccggactggtatcgaactcctggttcaagtgatccacctgctccagcctcctgagtcctgagtagttgggattacaggcgtgagccaccactcccagccaggaataaatatttttaacaaatgtccggacgcaagcagatgagttggacggaaatttaggaagcgccgtcccaacgccactaacgtgggtgtttggaaggagcacagggatctgtgagatcactgtctctgaattttctctatcccagactctgtcaacactggcttcacctttttattttagctgcatctcacaaggttgccagataacttctgtctgctgtattgtgataaaggggacaaatgaacacttaataccttttattattttttgtagagagggggtctcactatgttgatcaggctagtcacaaactcctggcctcaagtgatcctcccgcctcagcctcccaaagagctaggattacaggcatgagccaccacgccaggcctaagaacctatttaaagacaaaaatcttttacaaaaattaagtaaaataatttagacatcttaaaggggaaaacaaagcaaatccactgtaatgctacaaaacgacctggagaccctacgatttaggaaaccctctccattctgaatgggcttatttaggaggtacccaagcccaagaatgttggctgcacctttgacacttaatctccatacagttcagaagtagatgtcgaagtacttagacgtggccaggcacagtggctcacacctgtactcccagccctttgggaggatcgcttgagtccaggagttgagaccagcctgggcaacatggtgaaaccacatctctacaaaaaatacaaaaattagccaggtatggtggcacattcctgtagtcccagctactcaggaggctgaggtggaaggatcgcctcagtctggagagcttgaggctgcagtaagccatgatagtgccactgcactccaaaacaaaaaaaccttaaacataacacagtatttattcaagaaatgtatataccaattcaaaaggatgtcaaacagtatatatatctagtttattaaatgtatttagcaaaactaaatcatcaaagtgatatctttagcaccttcctgtggcattccagagacagtgtataaaaatataattgaatcactcaaatgtgtaagacagatacttctttttttctgcaaaggattgctttagcatctgactgaaattctggactgcttttaataactgattaaatgcttccccttttaaaaaaaataaccaaaagtaggccgggcatggtggctcacgcctgtaatcccagcactttgggaggctgaggcgggtggatcacgaggtcaagagatcaagaccaccctggccaacatggt

SEQ ID NO: 916967 - DNA, 4001 bp, Homo sapiens
cagtccaaaaactttagagtttcaggcattgaatacttggctttcttctgtcccagtttatcactgatttaacttccctactaattcatcaaatcaacaatttaaatataaaacagagctctgtttatatattaaaatagcaaatatatttctctgtactttttctttcagattactcgtaattcagaaaggagagcttttggagaaataaaggttcagtaaccgcagttaagtcctagagttcaagatctcagctgatgacttttttacttactaatactgagccttaatcaatttgagaaaagatcttcttaagaagggataggctgggcacagttgtttacacctgtaatcccagcactttggaaggccaaggtgggaggatcacttgagcccaggagtttgagatcagcctgaacaacatagcgagatctcatctctactaaaaataaaaaaataaaaaaagcaagctgggggagcacgcctgtggttccagctactctggaggctgaggcagaaggatcccttgagcccagcagattgagacttaagtgagatataatcacgccactgcactccagcctgggtaacagagcgagaccttgtctcaaaaacaaaaaaagaataaaaaaagattaaaagtactgcatatctattggggttactctcaattcacacaatcggaaaattttaaaaactttttttgagatcatgaaccactttaagaatcggctgctatgaactctcatctcaggaaaaggcatattcacaaagttttgcactcaatcttagcgggtcacagtcattcagtgaagtcatccatgtcaatttttttttttgagacagtcttgctctgtcgcccagtctggagtgcagtggtaattactgcaacctctgcctcctgggttcaagcgagtctcctgcctcagcctcccgagtagctaggattacaccatgcccggctattttttctatttttagtagagactgggtttcgccattttgaccagactgatcttgaactcctacctcaagcaatccacccgagttgacctcccaaagtgctgggattacaggcgtgagccacggcgccagccaaacgtcaaattagattataaaatatttccactaaatgtgtaattctagaattaatcattttctgaaaaaaatgttaattatccctacatatgactcctaagaagtgagcataacccctccctcaatagctttccacctccaattcaacacaggaggaatcctgggtttttagaattcaggtcaacagagaagggtcttaacatagtcacatttagtaagatagacctttggcctctctttaagtgaaagttcagtgcagccaaggcactaatttccaccattgtctcgacttaatttcgtcttgggctgcaagaattcattattgctctttgcatcactgttgtctgggaccacttcaagtattttcaaaggtttgataccgttccacttaaactctgagacccggttttctcatttacctgacagtgatagtaacagctacttctcagggttattgtttagagaatggacgtttatggaacactcagcagtgtctgcacacagtaagtgctcaataagagttagctatcattattacgtcctcaccggggctgtccccttgaggttggatcactgtggactccaggagctggcacatggtacccaccgtccgtgactggggtaggcctggggccggaggagggccctggagccctgggagtcccggggggcctggtcgacgggaaagttccgaaggtggccagggctgcctcggtggagttgaggccctctgtcgtcaccgccggggtggcatcggtctgggcgctcacggaggcccagcagcccaggagcaccaccaggagcggcgggagacctcgcggcctcatctcccagggagtcccagcgaggcccgcgacatggacagcgcgttgcccggcaaccgcgacagccaggcgcggggcatcacgggaaggggcttgcgaagccgcgagaagctgccggagactgactggggcgaagcctggatgaggcagggggcggatcccggatgaggccggagggcggcgcctgggtgaggcagcgatggcaggcacaggggcgagcactagtgagcgggtgtgaagctggcgtaaacgaggggcgtgtaaatcccggctgtggtttccaaccggtccgcggcgcttgcttaaaaaatgcagattttctgtagttccagctactcgggaggctgaggcagaagaatcgcttgaacccgggaggtgaaggctacagagagccgtgagcgtgccactgcactccagcctgggcgacagtgtgacactctgtctcaaccaaaaaaaaaaaaaaaaaaaaaaaagacggatttccaggtaccacctcaggagatcctgagtcagttagtctagggcaggacccaggaatcagtttttgggggattttttttgagacagggtctcactctgtcgcccaggctggagtgcagtagcgcgatctcggctcactgcagcctcgacctctgggactcaagcaatcctcccacttcagcctcctgagtagctgggaactcaggcgcgcgccaccatacccagctaatttttgtatttttttttttttttttttttttttgtaaagacgaggtctccctccgtcgcccggactggtatcgaactcctggttcaagtgatccacctgctccagcctcctgagtcctgagtagttgggattacaggcgtgagccaccactcccagccaggaataaatatttttaacaaatgtccggacgcaagcagatgagttggacggaaatttaggaagcgccgtcccaacgccactaacgtgggtgtttggaaggagcacagggatctgtgagatcactgtctctgaattttctctatcccagactctgtcaacactggcttcacctttttattttagctgcatctcacaaggttgccagataacttctgtctgctgtattgtgataaaggggacaaatgaacacttaataccttttattattttttgtagagagggggtctcactatgttgatcaggctagtcacaaactcctggcctcaagtgatcctcccgcctcagcctcccaaagagctaggattacaggcatgagccaccacgccaggcctaagaacctatttaaagacaaaaatcttttacaaaaattaagtaaaataatttagacatcttaaaggggaaaacaaagcaaatccactgtaatgctacaaaacgacctggagaccctacgatttaggaaaccctctccattctgaatgggcttatttaggaggtacccaagcccaagaatgttggctgcacctttgacacttaatctccatacagttcagaagtagatgtcgaagtacttagacgtggccaggcacagtggctcacacctgtactcccagccctttgggaggatcgcttgagtccaggagttgagaccagcctgggcaacatggtgaaaccacatctctacaaaaaatacaaaaattagccaggtatggtggcacattcctgtagtcccagctactcaggaggctgaggtggaaggatcgcctcagtctggagagcttgaggctgcagtaagccatgatagtgccactgcactccaaaacaaaaaaaccttaaacataacacagtatttattcaagaaatgtatataccaattcaaaaggatgtcaaacagtatatatatctagtttattaaatgtatttagcaaaactaaatcatcaaagtgatatctttagcaccttcctgtggcattccagagacagtgtataaaaatataattgaatcactcaaatgtgtaagacagatacttctttttttctgcaaaggattgctttagcatctgactgaaattctggactgcttttaataactgattaaatgcttccccttttaaaaaaaataaccaaaagtaggccgggcatggtggctcacg

SEQ ID NO: 916968 - DNA, 4001 bp, Homo sapiens
tttgagtatccttacacataagctcagagttgggcaagatcagtggttatgaagcttttttttttgagacggagtctcgctcatcacccaagctggagtgcagtggcgtgatctcggctcactgcaatctctgcctcccgggttcaagtgattctcctgcctcagcctccaaagtagctgagattacaggcacccgccatcacgcccagctaatttttgtatttttagtagagatgggtttcaccatgttggccagactggtcttgaactcctgacctcagatgatccgccctcctcggcctcccaaagtgctaggattacaggcgtgagccaccgcgcctgaccagctttttctttttttttaagagacagggtcttgctctgttgcccaggctggatgaagtgcagtggtgcgatcatagctctctgcagccctgaactcctgggctcaaataatcctcttgcctcagctaccccacccccctccaagtatctgggactgtaggtgtacgccacccacctaattttttttttaattgttttgtagagacgaggtctcgctatgttacaggctggtctggaactcctgggctcaagcaatcctcccgcctcaatctcccaaagcgctatgagtacaggcgtgagccacgatgcctggcataaagcttttttgaatcactgacccatttgatgatctaaaggaaactggtgaccctctcatcagaaaaatgcacatacacacagaactttacatacaatttcatagagttcacagacccactgaaatacatccaaggactcctaaccccagggtaaggaacccgtgggctggataagtgtctaccagatccaacagcccacaatttcatgattgttgagagcatggagaaagccatgccttgttaaataaagagagcactgcagaaaccctagctgggggcctcttcacaggctacagagaaggtttacttctggccttaccgcaccggggatcacagtcacgctccagtcttccgtctcattgttcagcactccacacgtcggaattggcaatattcctaaagaaagaagaccagcatgcaaaggcagcaaggtccagcagctcagggggtgcattgagtcagactgcctaggatggactcacattacagcctaagattgggccctttacaagctgcttgacactgggacagtgacaacctctctgaacttgtttcttccttggtcaaaggggatgaaaagatattactgttcttactaggaaaatgggatgatgcacgatgttagctcaatgaatgctaaccattattatttcaggctttcttcgaacctgtccgtctgtcctctttggcctacagcagccgcccgatccttttctccccatgcgactttgcagagaacagaggcagggggccccaaggatgccacctctccaggctccttgggaggtctggatccagtccaacccccaccctccccaaaagagggccggactttacccgcctcgtcctgcagcactgccagggacacggtcacaccctcggtgtctccgaccagggacgcgctgaccgcagggccggacattcggataaaaggagggatgaaagctaggcgggaaggaaaggggacaaggaggggttagcagtggaagaatcaccgcctaaggtgtgtgtggcggcttgctttggcgttgtcgactcccgaagctcccgggggagtccaagtctggcccttttaacgcccagtcccctcagccccggcccaccgaggtcactgccgcgccgtacacacccaggtccccccacagaagcctcaggatgccctgcagaaggaaaagcctcaaaagaagagcggccggaggctggaagcccatgccttagacctcgcgggccgggcacagcagaaccgcgccctcattagaacccaggaaggactcagacacgaaaacgcagcagccactgccccgccgccgccatcttgcaagcgaacgcccggagctatggcaaccaccaatcggcggccggccaggaggaacgccgcgctgtgattggaccagtggcaagagcgggcaccccggccccgcccacaaggcctagcatttttgctgcttgactctggtggggagagtgagggctgaaaaactacctatccggtgctccacttagtacctgggtgacgaaacaatctgtgcacccaacccccgtgacacgcaatttacctatatagcaacctgtacatggacccctgggcctaaaagttgaaaacatcaaaattaaaaaggtcctgaaaagcaggagtgcgtgtccggctcaaaaactggagttttcccctaccctggaattaatccaacaatagccaagagcgatcctatagacactggcttctaaataaaaagggtgggacttgctccttaataaacttgatttttatacggatttgttttaggggtgagtagaaaaaggggatggggctgccgcgctgtgtttattatctttactatcgtttatgatgtattatttatattttatatttttataaaataaatatatatttacaaaatagatatactttgttttatatatatatatcagatatacatacttgatatatataaaatacatataggccgggtctggcggctcatgcctgtaatcccagcaatttgggaggccgaggcgggcggatcacaatgtcaggagtctgagaccagcctgatcaacatggtgaaaccccgtctctactaaaaatacaaaaaattagccaggcgtggtggcaggcgcctattatcccagctactcaggaggctgaggcaggagaattgtatgaatctgggaggcggaggttgcagtgagccgcgattgcaccactgcactcaaacctgggcgacagagccagactccgtctcaaaaatatatttatttatttatttatcttataaaatatatatgtatttatattttatcttatatatatttatcttttatataagtatatattttgtaaattttatacttatatgttataattttataaaatttatatttttataattcttatcattatcatttattatcactattgcttttattatcattctcctaggtttttgaaggattttctcccctgcacagagctctcagcactctgaaagcagatccaatcacagaacacacaagaggttttgcccagcaataggacagatgtgaaagaatcaaaattctgtctggaaaaaaattgttttttcttatatcagtagcctcagaacatttcaaatattgtcacggcttggggactgagagtgcagggtctgaggtcaggctgcctggcatgggatttcgccttccctccacagatattctcagctgttaagtgactttgggcaagtcaacctctctaagtttcagcttcctcatctataaaaaagggatgataataatccttccttggggattgtgtgaggatgaaatgaggtaacatatctaatgaggttaaaccaatggctggcatacagtaagcactcagttaatgatcagttacttgttaactatcagagaggtggtgtatcctttagctgagacaatcatggtgttcagcattgtggctgactgacggtaaatgccaagtaaatgtttgccattattagtcttttttttttttctttttgagacagggtctcactctgtcacccaggctggaatggtgcagtggcacaatcatagctcactgcatcctcaaacttctgggctcagctgatcctcccacctcagcctcccaagtaactggcaatacaccaccacacccggctaatttttgtattttttatagagacggggtttcaccatgtggcccaggctggtctcaaactcctgggctcaagtgatcctcctgccttggcctctaaaagtgctgggattacaggtatgggccaccgtacccagccccattattactcttaatgttcagttatatattcattgatcagcaaatctaacattgtgaaa

SEQ ID NO: 916969 - DNA, 4001 bp, Homo sapiens
tattcatggaatttgaattttcttctttgaatatctgaaattagtcttctaaaaaagtcggctgggcccggtggctcacatttgtaatcctagcactttgggaggccgaggcaggtggatcacttgagggcaagagttcaagaccagcctggccaacatggtgaaaccctgtctctactaaaaatacaaaaattagccaggcctggtggcaggtgcctgtaatcccagctacttgggaggctgcagcgggagaatcgcttgaacccgggtgatggaggttgcagtgagccaagatccgccactgcactccagcctgggcaacagagcaaggctctgtctcaaaaaaaaaaaaaaaaaaagtaaatttattttttttcacatcccacattacatttcttgattagcacagtcaagggtgacagagaactactctcttaaggattacctggggtctgagtcatttcagaagattacacagaattttccacagttcctgaaggtgaaagcttttcaaggcaaaataaaatctggtctatagccttttggatgaagtcaggccgacatatcacagctttgagctaaacagtgtattgaagtcctactattttgctgtaagaccctgaataaagtcttacaatgtgtaatttattcttggcccaagtttcaattctgctcttaagtgaggttatgagagagagatttccacaaattctggtgaattctcttatttgtaaagttcttctgggaaagaagtggagtaatttattccaggacttgatccacaaagtcaagataaagtccacactttgtctacatatatctcttttcctaagctctaatttattttggttagtgtgccctttcatgtaacaccaattctcggcatgtcagaatcagattccagacatgccaactttacagacatgaacaggcccatataagtcccttgtattgcctaaattcagctcccattagccactgagagtcaggataattcttcattaggcataggtttttttccttttaatttcaatgtaaatcatcactctttatcttttaaaaaactgtcaccatatccattttttaaaaatttagtcttccgccaggagttcaagtccctaaatctcctgcttttgcaaatttttctcttgactcccccaaaggactttttaaaaacggattcttaagatcgtccccaaggccactggaaaactcaaaggtcatttttagattgactactcgagagtgtatacatatgcccacaacaaaattatctaacccgtgacccttaaagttgctttcagtaggcctttggggtggggggaagccgcaacaaatcaaccaactttaaaatgaaaactcctggagctggaaatgttcgacactcatctttacagctctctgcgtggtaatggagggtgacggaaaacccttctagccaagaatggcatccagaaagacacattaaccaaagactgctgaatgcttactaatatattttatagtcaactggttatcgcggggaaccaaagaagggtccaggtgcaccaggtaaccctcagagcagccccgacctccaccaccaccgccgcagccagggaaggaaaggccgaccaggccacagtgcgcacgcgcggccccggcctttgtattccggccgggatttaaaagacccctgcgtgcgcgcgcgcgcgccagccagcctgcccagcagtgaggggcgcaagggaggggcggcgctggccccggtattacctgcccgcgttctccgcttccattccccgaggccgctgatgcgggcggctccacctgccgggcacacgggcagccggtctctgtagtaccgcgtggtactcactgcggtaagacaaccccagagacctgggcccgatggctggcagtacccagacagtggctggactcaagctcctcctccaggcttctaccgtcccccacggaccccctttctgtgctgcacttccgcctcctcggagccaaatcccacgcgtactggccgtcacgtgatgtaggacagcccaatcacgctcacccccttctcgttggcgccccagctccgccgcttggcctttcgggaagggtggaggaccagaagacggggactaggagcgctctgccgacgtcagcttttgtctccagtattttcgggggctggtggacgcgtgggcgatagggtgctgtccttggggtgctgtgtatatgggatgatgacgcttatcagcattatctagtcctttccaccccgaaattcgccccgattaaagactgtgttgcattatcaggtaatgagatgtgagggagggtctttgaaagtggaaaacctgggcgtcgaggccactgtgccatcttgggcctcagtttccttatctgtgaaatgagggtgaatgtaaagctgctatgtaaaatgtaaagctctacataaaccactctccgcattactttggatatatgagaatattaacgtttgacgtctacgagactagatcccattcgagcatcacctcccataaccttacagactaacccctcttttaaatctcagtggttcgtaatcttacagactaacccctcttttatgtctcagtggttcttgcagctggcttttgtttcattagttctcaatttctgtcactggtgtttgtactttattaaggaactcttaatggaataggcttttgggtttttctagtttgcaggatgatgaaaaacatggctgctgtatttgttggctttcctgagtttattcatatagtaacaggtaactccaaaccttcagtggtttacagccacagaagtttatttctcactcacgtgatctgtgagctgggagatggctgtggctctgtgctccatgtattttcttcattctaggatccaggctttcgtgagtaaatacagaaagatttttgtaatatatcaactgtttaaagtttgagtgaaacgtttaaaacagtacagaacttttatgaataccctgtccattagtagacactactcagaacctggcacatggtaaatattcaatgaatatatgttgagtgaatgaaaaaagcccatcctctctgattttgccaatggctcaggaccatcgtctagaaaagtcttacagcaggtggcttgcctcagttatttcagggcatccagaaagacacattaaccaaagactgctgaatgctttgggagagaattctggtgactgaaaatgtgtgtgaagagagtaaacttttctcaggatgtctgcactcggggaattacccttggcagcaagggcttctctcactgtgggttgctgtgctgggtcctgccagctccattcataacctcaagagaccagggtcctctgcccaatcttgcatggcaaaagaaagttaacgtgaggaggccgggcgtggtggctcatgcctgtaatcccagcactttgggaggccgaggcgggtggatcacctgaggtcaggagttggagacccacctggccaacatgtcgaaaccccatctctgtcacctgtagtcccagctactcgggaggctgaggtgggagaatcgcttgaaccagggaggcagaggttgcagtgagctgagatcgaaccactgccctccagcctgggctacagagtgagactccgtctcaaaaaaaaaaaaaaaaaaaaaaaaaaaaaaaaaaaaaaagcttatgggaggagttgtcggtgaggacactgaacctaaaaatggtgaagcagttgcagcaaactggcttttatcccatcagtgtctctctctcaacatcctgcatctgagtctggaagacaaactttttctgcttgtgaacctggcccaccagagcttttagcaatctggaaacagaactgggaacttccttgtaaacttcctgaagattgataaatgacatctataaaaaaaaaaacaatttgtctttgttcattgctctggtgctggtttatgtagaaaatcctgtggaacctacaaaaaacctagtacagcta

SEQ ID NO: 916970 - DNA, 4001 bp, Homo sapiens
aaaggaagtgctgagtgtctggcaagttggaaagaatgagggattcttctactgggttacctggtcagctccgaggagagttaaaccaggaaaagtagttcaggctggtatacctccctgtttgtccttgagggcaacttaaaagcactatttacacaagtctccagattcaaaactgtctccttttcccggggatccaccccgacaaaccttcccaaatctcacccgcccatcccatcccccaaaggcaaagatctcaacttccttcagcctcctaccagctttttgacctattccaggcaagcacaagaccctcgccctgagaaagtcagcctcctggctccaagaggcaggtggagccagcttccttccagctctgcccggtccaggggaaacggagcctggaggccacacactccaaaaccacagtcaaattatccctgcactcaggcaaccagagacactgactcttgcccacggctatgtagggaggaagaacagtcctagccagaaccaacatcctcgaagagaaacacatactcaagagacgtggcatcacacacctactcagagatactcactttcagacagccccttctcacgcagacatatacacacactctgtcactcacgttcaacacaaacaaatacgcccactggaagccaaggtgagccacacgtgaacagacatcacccacacagagactcaaagcgagggggactcgcagtcaggtgtcacacagactcagcacagacgcagtcagtccgcggggcctcaagtgcctcagcacaacgggggaaatgttcactttggggtttgaaagttctgctccctggatcgatccactagtccccatcaggaaacacagcagcttcccaagccctgaggtgtaggaccttttgcaggggtcccccgactttcgcatcgcctttgcacttaaaacaggcagtccgcttacctccaggtctctcccttccaggctcgaaaagggcccagcagaaaagaggcatgggtgctgggtctcttctgttgccgatgctctcggttctgcctctccggtcctttccacaccggcctccctttcccccaaagtcccgagtgtccaccccccttacccgcccctggagccgcttcgcctccagcagcctcagtcgcgccgcctccacgtgcctcgctcttcccagtctcgtcccgggagggagctccgcacgcaccgcgcagactcctgccctccggcaaagtcctaccaagtccccgcgccccagccttaccggtcccagggtgcgggaaggtgggatgggtgcgctaagccagttccaaggagtccgccccgagcgccaactcttccggccgcggcgatcgttctgcggggacgacagggcgtcagcgcgcagagccgggctccggccggggccgacgggcggcgcagtgaaggcggggccgcggggccaagcccaccccgcgccgaccggccccggtgcgcccagcggagcggagcggagcgcgcggagggaggagttttcccagaatgggactgacgggaaaacacggggatccctattcctggaggagtgagtcaaccgggagcgaggaggggagcgcggggcggacaggagggaagcgggagaggggcagcgagcagcgccggagcgcggagggaagccagaggtcgggacggagcgcgtcggagcgcagaggtccaaggcgggaacgcgggcggcggaaagaaaagagcagccgagcacgcggcgcgagcggtcggctgcggcggcgtggggcgcgcggcccgtgagggcgccggcgggtgcggcgggcgcgggcgcctctcacctggcgggacgcggcggcgccggagctgcggccctcccgccccctggcctcgagtgtgcgaggaggacgctggaatgcgcggaatgagggctggaatgagatgcgcgccgcggcgggagggagggagccggagggagtggcggcggggccaccggcacctcggggaggagactgcgccgcgcgcgggcgggcgaggggccgggccgccggggcggggcggggccgggccgggccggggcgggcggcgggggagggggccgagggacggcggggacccctccacccgggcctcggctgcggcccccacgcccactagcccttcgatctctccgctccgactgtttggctgctcgttgcgcgccccgcgccctcccctcctggcggggtcccgactccctttcccaggagccgagagccttcctcttcgccggggtggggctgtcccgggggcgggggggtggacggggcccagactcccgccccgccacccggcgtccctccgcacgagtccctgggaggccggggaaggggcgggctcccggcgcgcaggaagggctgctcccttcctgcggctcccaccaaaggacacttgctccggggaaccaggaagcaggaactcgcgggctccattcccagatccgctgccagtgccccctcgcttgccctccccggctttagctctttccgtttttctctcctgccccttgggcatctgtaaaaccgccactacgagtaaaccacatgggagaaagggcactcggtttgaagtccatgtggcatgccatgggacgccttctgggctcagtgactcaatgaatattcatctaagatgtgtgatgagtccagatactgtgaagatcaggatcagccgtcagcacctgccctcaaagagctcagagtttagctggggaggcctcggtgtatactgccatcggtgagagtctggacttcagacacacatgcccaggagtctcttattggggcaggaggtgctggaaacacgctgggctccttgtttggagacgcttaggacaaacgggcttaaagcagtgtgctggcaggtagcgccatcatctacctggccaggagactgaaaccaaaggacttttggctttttccaaaaatcaaatccaaccttttctggggcattatcacttagccttgtgttgggtggttgtctagatcttatctcccttgccaaacagaaacttccttgaagacagagtaatgtctgatttatcttatctttcacacagatccagcctggtgcctgggatagggaagtgcatgataaatgctgcataaatgaaaaacaattgctaccgtggaagatattgaaaggaaagtgctatcgatgccaaagttgtttccaagagaggtattccaaaagtgtttcaagcaatgactgagctaagcatccagtcctgcaaggtgaaggcgttgaagacgcagccctcatttgaatagatgaattgtggtattcttgttaaataatgaatcatatcaaggcttggtcacacctcatgcacatgaaaagaccaaaacgcaaggcagcatatcagcgccacgtgaagtacacactaagcaccaactatttaattcagcaatcatggggggcccggtggctcacgcctgtcatcttagcaatttgggaggccgaggcaggtggatcgcttgagcccaggagttcgagatcagcctgggcatcatggtggcctgcacctgtagtcccagctactcaggaggctgaggtgggaggatagtttgaccccagaaagttgaggctgcagtgagccgtgaatgcaccactacacaccagcctggatgacagagcgaaaccctgtctcaaagtaattaataataattatattaattcagcaatcattggagtgtttgttgactttgacaccgcactaagggaaggagtaggtccctttcctcaagtagttccagtctaggtgagaagacagacaattatgcaaagttcaatgggaacccaagggaaggaacagtgaaatccaattacagtgcatttgatctagctcttgaggataaatgagggtttgccaaactgagactggaaaccccatttaagacacatggaatagcacctacaaaggtgaggcagccagtctgctggtgtgtttagcgaagctatgtaaactggtgt

SEQ ID NO: 916971 - DNA, 4001 bp, Homo sapiens
actcaggatttgtaccctggtctgcctgaccccaaacctgtgccctttccactccatcagtgctgcttttagaccagtcgcacaccaggccgaagaggtgagagggtgaggtgtttcccacaagaacatccacatcctcaggatggatggaggagcaaggacgagaacccccaacccccgagacagtttctggctccttccttccaagaagccctacacatgatatccacgttgaagccctcatgcaacaagctactcattcctcttctcaaaggaagtgctgagtgtctggcaagttggaaagaatgagggattcttctactgggttacctggtcagctccgaggagagttaaaccaggaaaagtagttcaggctggtatacctccctgtttgtccttgagggcaacttaaaagcactatttacacaagtctccagattcaaaactgtctccttttcccggggatccaccccgacaaaccttcccaaatctcacccgcccatcccatcccccaaaggcaaagatctcaacttccttcagcctcctaccagctttttgacctattccaggcaagcacaagaccctcgccctgagaaagtcagcctcctggctccaagaggcaggtggagccagcttccttccagctctgcccggtccaggggaaacggagcctggaggccacacactccaaaaccacagtcaaattatccctgcactcaggcaaccagagacactgactcttgcccacggctatgtagggaggaagaacagtcctagccagaaccaacatcctcgaagagaaacacatactcaagagacgtggcatcacacacctactcagagatactcactttcagacagccccttctcacgcagacatatacacacactctgtcactcacgttcaacacaaacaaatacgcccactggaagccaaggtgagccacacgtgaacagacatcacccacacagagactcaaagcgagggggactcgcagtcaggtgtcacacagactcagcacagacgcagtcagtccgcggggcctcaagtgcctcagcacaacgggggaaatgttcactttggggtttgaaagttctgctccctggatcgatccactagtccccatcaggaaacacagcagcttcccaagccctgaggtgtaggaccttttgcaggggtcccccgactttcgcatcgcctttgcacttaaaacaggcagtccgcttacctccaggtctctcccttccaggctcgaaaagggcccagcagaaaagaggcatgggtgctgggtctcttctgttgccgatgctctcggttctgcctctccggtcctttccacaccggcctccctttcccccaaagtcccgagtgtccaccccccttacccgcccctggagccgcttcgcctccagcagcctcagtcgcgccgcctccacgtgcctcgctcttcccagtctcgtcccgggagggagctccgcacgcaccgcgcagactcctgccctccggcaaagtcctaccaagtccccgcgccccagccttaccggtcccagggtgcgggaaggtgggatgggtgcgctaagccagttccaaggagtccgccccgagcgccaactcttccggccgcggcgatcgttctgcggggacgacagggcgtcagcgcgcagagccgggctccggccggggccgacgggcggcgcagtgaaggcggggccgcggggccaagcccaccccgcgccgaccggccccggtgcgcccagcggagcggagcggagcgcgcggagggaggagttttcccagaatgggactgacgggaaaacacggggatccctattcctggaggagtgagtcaaccgggagcgaggaggggagcgcggggcggacaggagggaagcgggagaggggcagcgagcagcgccggagcgcggagggaagccagaggtcgggacggagcgcgtcggagcgcagaggtccaaggcgggaacgcgggcggcggaaagaaaagagcagccgagcacgcggcgcgagcggtcggctgcggcggcgtggggcgcgcggcccgtgagggcgccggcgggtgcggcgggcgcgggcgcctctcacctggcgggacgcggcggcgccggagctgcggccctcccgccccctggcctcgagtgtgcgaggaggacgctggaatgcgcggaatgagggctggaatgagatgcgcgccgcggcgggagggagggagccggagggagtggcggcggggccaccggcacctcggggaggagactgcgccgcgcgcgggcgggcgaggggccgggccgccggggcggggcggggccgggccgggccggggcgggcggcgggggagggggccgagggacggcggggacccctccacccgggcctcggctgcggcccccacgcccactagcccttcgatctctccgctccgactgtttggctgctcgttgcgcgccccgcgccctcccctcctggcggggtcccgactccctttcccaggagccgagagccttcctcttcgccggggtggggctgtcccgggggcgggggggtggacggggcccagactcccgccccgccacccggcgtccctccgcacgagtccctgggaggccggggaaggggcgggctcccggcgcgcaggaagggctgctcccttcctgcggctcccaccaaaggacacttgctccggggaaccaggaagcaggaactcgcgggctccattcccagatccgctgccagtgccccctcgcttgccctccccggctttagctctttccgtttttctctcctgccccttgggcatctgtaaaaccgccactacgagtaaaccacatgggagaaagggcactcggtttgaagtccatgtggcatgccatgggacgccttctgggctcagtgactcaatgaatattcatctaagatgtgtgatgagtccagatactgtgaagatcaggatcagccgtcagcacctgccctcaaagagctcagagtttagctggggaggcctcggtgtatactgccatcggtgagagtctggacttcagacacacatgcccaggagtctcttattggggcaggaggtgctggaaacacgctgggctccttgtttggagacgcttaggacaaacgggcttaaagcagtgtgctggcaggtagcgccatcatctacctggccaggagactgaaaccaaaggacttttggctttttccaaaaatcaaatccaaccttttctggggcattatcacttagccttgtgttgggtggttgtctagatcttatctcccttgccaaacagaaacttccttgaagacagagtaatgtctgatttatcttatctttcacacagatccagcctggtgcctgggatagggaagtgcatgataaatgctgcataaatgaaaaacaattgctaccgtggaagatattgaaaggaaagtgctatcgatgccaaagttgtttccaagagaggtattccaaaagtgtttcaagcaatgactgagctaagcatccagtcctgcaaggtgaaggcgttgaagacgcagccctcatttgaatagatgaattgtggtattcttgttaaataatgaatcatatcaaggcttggtcacacctcatgcacatgaaaagaccaaaacgcaaggcagcatatcagcgccacgtgaagtacacactaagcaccaactatttaattcagcaatcatggggggcccggtggctcacgcctgtcatcttagcaatttgggaggccgaggcaggtggatcgcttgagcccaggagttcgagatcagcctgggcatcatggtggcctgcacctgtagtcccagctactcaggaggctgaggtgggaggatagtttgaccccagaaagttgaggctgcagtgagccgtgaatgcaccactacacaccagcctggatgacagagcgaaaccctgtctcaaagtaattaataataattatattaattcagcaatcattggagtgtttgttga

SEQ ID NO: 916972 - DNA, 4001 bp, Homo sapiens
cctctggagttcagactcctgctgtcctcctcccggggacccatcacagtagtatctcaggttgtcctgagctgctgcttttggggcaaggctgggaagttgggaaagggagtgatggggatgtgggcagcacctctggtttcttgactgtccctgcaactcttctgggctggatcaactttgtgggacccactaagacacttgggagcatgttggcattagcagcagatatggatgttgtcagtggaaagcaaacctccagttccaaagcactcctgactccctctcctctctctttttccaccctgccaccccatttccctcaaacttccctgggccagggaaggggcctgatgatctctgagcctgctggaggatacctggatagcgcatggcaaagtcctgcagtgaggcacctggggcttatgttggggggccaggacctcctggggttggcccaggctagagcagggaaggtgagaggagccaaaacagacagcaggacctactctaacccaaacatcccctcacactacagccctggccactccggaggggatgctgggccagggaagaaggctgaggaagctgaaattgggaagaaggcctggcctgattcctggtcccctcccccactgcccgcacctccacccctgcccctcttttgcccagctggtgggcactcctaccctgcttgcggcccggctgctgtccctcctccccagggctctgagcagcctctccacagggccgctggacttcatggtgttcggctggctggggtgctggccccagggcctgaacaatgctggggcctggcccggggcttcctggaagcggcctggcggaggcagccgcttcccctgggcggagggtaggctgtctggctggtgtgaggagaagcccggccctggaagtggagggaagtgcaggcgggaagggggcaggtcgctgctccaggaagtggaggggggaggatgtgggggaggccaggagatcagattcccaggatctaccctgctgggagtgtcagcctgtgatcttttgctccccctactcccccaactctggagttgtcccacacctgggacaccacactctccagggatctgcagggatccatggtcttgagattctgcccccacccccggtggggccgggtgagaattctggtctcggggcagggctaaagggcaagtggggaacagtgtgtcccagccaggctccagcctgaactctcaagctctcgagggacttccgctggggagggagtggagctgggaactactaccagcaggcaggcccaggatcccgagtgtgtcctgagagtcaggtaaaaatgggactgggggcccccttcctgtctcagtttcactcgttatgaagtaggaaaaggaaagcatgcaccgcccacctttaccctcaatacaccttgcaaggccaagttccagccacaagactgctttgctcaggtttggggagtaatccattctcctgccacagcctaaggcatatgaggcccttctcctgaaagcccccaggtttctgctcctgacacagtgccccccactcacccattccctggctttgtttcagacatgatctcacagatccctagccctctttccagccctgcaacttgggctctctacccaagggctgcaccctccccccgcggcaaccccgaagcctgagtactaccttcatggctctcctgggtctgctctccttcctcagcagctgtcccagggcctgaggactggacaggaggtcccccctcccaacacatactccacccccatccatgggcctccggcctccctcctgggaacatggccaacttcccgtcctgggagtcaagggagggaggtggatggggccttgaaaaagggggagtaatcttcctaaaagctaaggggttaatggcctgggagtcttcagccccaagctgtggacagcagcccctgggacaggctatagctgtcacttgaaagaatgtgcaaatgtgcccctctcatttgcatggtatttattgaatgtcccagtactcaggcaactcccccagccctggcttctcccacggagtcccttctacttgcttcctgctccttcatatccaccaggatgggttccctgggatgaagaatcctgcattctctggggtgaggcctgctgtgggtgcccacttgagacccttgcgaggacctgactggattgggcctagcctgacacctctccctggaagctccaattttccaggccaagaaatgtgtccccaggatatcctggccagaaggtggcatctgtgtggcaggcctgggctccctgcctgtaactggagaggagcacgggctctgtgacccacccccatcctgccagcctggctgtgtcccagcacattccaggcccccggccagtgtgggcaaccgggcctggccttgtcgagcccccagccctgcttgggggagatggggcagtgtgacaaggtgggcagtgggggtggcttttttctgtccagtcccagcttctgctcctatggcacatggccctgaccaggactcctctacatgcttcactctcctgctgcctccataggggctgaaagtcccctcacctggaacaggtccccagacatcctctcaccttcactggtctcacactccccacccagacccagcaaggaggtgcccaagcagtgagctcggtgaggggtggggtggtcaggatccactgtggctgtgagtccctcccatcctgtggcactcgcacctcggaagggaagcagggatgggatccctatgagccagtcccgaggggaaaagtagctcacttgaggagggctgggaaggcatcactagaccctcttggaccctcaccctcctcccgcctgtaacattccagagcctgtcaacctctcccccagccgggccccctctctctccgaagtcttgggtttgtttggagaaacccctccacccacacccccctttctggaaatagctgtggttggaagggaggctgggagcccggccgccgcggaggaggggtaaggcccagggaaggagcgagggagggcggcggctctgggggtgttcccagaagggtctggaggatgggggcagactggagggggccgcagagcggggctggcgagtcgaatcagcctcatctgtgcccgcttacggcctctgtcccacatgtgaagcaggaaaggaaaacgttcgcccgcaccctgccaggccggggcccgagcgccgctgccagctgctgccgggtcccgggcctgcgtgtgtggcacggcgtgcggccccgtgcgccccgggtgctggaaggcgtggcggcctgatcgagtagggccgcggccgcgccccgccccctagtcactgtcccggcctcccgctgctcccagctctccgcggccagccagagcccccggccccagccctgggccgcgccccgcgccccgcgccctctcgacctccggcggccccgcgccccctggcgcccgcccctggcactgcccgcgcggccgtgacgcagagaccgccgcccgcccagcgcggcgcggccactcacctgcggggggcgcccggccgggcgggggcgcggcggggcggggcagcagcagggggagccgccgggccagcccatcccgcccgtgcccgcgccgagcggacgcggaggaggaggcggtggcagtggcgggagcgggcggccgggctcggctgggctccctcccgcccccgccgcgccccgcgcccgcgcccgcgcccgtggcagcccgctcctcctcctcctccctcccggctccaatccccacgttccgccagctccccacccctcggcctcctctcctccccaccttctcccgcgaacccacactcacaaagagccgaggggagagagggtgcgcagacggccagccgggccgcgccagggacatactggagacaggaagtggctgagagggggagagagttggagagagacggccgcggagg

SEQ ID NO: 916973 - DNA, 4001 bp, Homo sapiens
ttgagattgtgtgagctggcctgctggagttgtgcaacacagtggtactgggtggagggtctcagagtcacaggacagagagcctcacctctgcacgaaacgcctgtcccatcgatggtcaccttacatactgcacagactggaggtttcttccggaaaaccttctcccggaagctatgaggctcagctttcctaggctgaaggtggagggacaaacagaggtgtgagttcccagtgggcccatctccatctccgggactgggcaggagccttgccttagcactgcactggttttctccgtccagatcaagccctcaaacttgtaggacgcacttggccacagctgcttcagggcggtcatggggcctgtcctcaactgtgcatggaatctgaccccttgcgtcacctttgctgggtcagctcctccccaggggatcacttgggcccctcacatggccctggtgtgtgatgcccttgtggaaaagcctccatgctcaggctttccccctggtgtggtaagggtactccctgactcttcccatcttgtcctccccgcatggagacctgtgtgcagagtgagcagggaggttccaaacatatgtgttgtatgtcagtcctgcagcaccagactgagccggcaggagtggcctcagccagtcctgctcctttagctcctgctgtccccacgctccaggcagctgacatgccctcctcccccacggtcagaacaacatgtttactcattgtgcactgaggcagcagacagcaattgtgtaatgggggtggtcatgctggagggaaacagatagaagcctgtcactggggagagatgtttagctggctttggatgctgtgagttctcccccgaccccctgcaccctggcacttgggattcacgcattgaatgagaaaggagtggaccagattccctgttcagcccctcctgacccagagatgcagtgaggcaggagcctgggatgcccccttatggcccaggcctatctcagtcccttcccctcccactgtgggttctctcctcccatcctctgtctggggacagcttgtctccttgccatctctctgttttacccatattccccctcctctggagttcagactcctgctgtcctcctcccggggacccatcacagtagtatctcaggttgtcctgagctgctgcttttggggcaaggctgggaagttgggaaagggagtgatggggatgtgggcagcacctctggtttcttgactgtccctgcaactcttctgggctggatcaactttgtgggacccactaagacacttgggagcatgttggcattagcagcagatatggatgttgtcagtggaaagcaaacctccagttccaaagcactcctgactccctctcctctctctttttccaccctgccaccccatttccctcaaacttccctgggccagggaaggggcctgatgatctctgagcctgctggaggatacctggatagcgcatggcaaagtcctgcagtgaggcacctggggcttatgttggggggccaggacctcctggggttggcccaggctagagcagggaaggtgagaggagccaaaacagacagcaggacctactctaacccaaacatcccctcacactacagccctggccactccggaggggatgctgggccagggaagaaggctgaggaagctgaaattgggaagaaggcctggcctgattcctggtcccctcccccactgcccgcacctccacccctgcccctcttttgcccagctggtgggcactcctaccctgcttgcggcccggctgctgtccctcctccccagggctctgagcagcctctccacagggccgctggacttcatggtgttcggctggctggggtgctggccccagggcctgaacaatgctggggcctggcccggggcttcctggaagcggcctggcggaggcagccgcttcccctgggcggagggtaggctgtctggctggtgtgaggagaagcccggccctggaagtggagggaagtgcaggcgggaagggggcaggtcgctgctccaggaagtggaggggggaggatgtgggggaggccaggagatcagattcccaggatctaccctgctgggagtgtcagcctgtgatcttttgctccccctactcccccaactctggagttgtcccacacctgggacaccacactctccagggatctgcagggatccatggtcttgagattctgcccccacccccggtggggccgggtgagaattctggtctcggggcagggctaaagggcaagtggggaacagtgtgtcccagccaggctccagcctgaactctcaagctctcgagggacttccgctggggagggagtggagctgggaactactaccagcaggcaggcccaggatcccgagtgtgtcctgagagtcaggtaaaaatgggactgggggcccccttcctgtctcagtttcactcgttatgaagtaggaaaaggaaagcatgcaccgcccacctttaccctcaatacaccttgcaaggccaagttccagccacaagactgctttgctcaggtttggggagtaatccattctcctgccacagcctaaggcatatgaggcccttctcctgaaagcccccaggtttctgctcctgacacagtgccccccactcacccattccctggctttgtttcagacatgatctcacagatccctagccctctttccagccctgcaacttgggctctctacccaagggctgcaccctccccccgcggcaaccccgaagcctgagtactaccttcatggctctcctgggtctgctctccttcctcagcagctgtcccagggcctgaggactggacaggaggtcccccctcccaacacatactccacccccatccatgggcctccggcctccctcctgggaacatggccaacttcccgtcctgggagtcaagggagggaggtggatggggccttgaaaaagggggagtaatcttcctaaaagctaaggggttaatggcctgggagtcttcagccccaagctgtggacagcagcccctgggacaggctatagctgtcacttgaaagaatgtgcaaatgtgcccctctcatttgcatggtatttattgaatgtcccagtactcaggcaactcccccagccctggcttctcccacggagtcccttctacttgcttcctgctccttcatatccaccaggatgggttccctgggatgaagaatcctgcattctctggggtgaggcctgctgtgggtgcccacttgagacccttgcgaggacctgactggattgggcctagcctgacacctctccctggaagctccaattttccaggccaagaaatgtgtccccaggatatcctggccagaaggtggcatctgtgtggcaggcctgggctccctgcctgtaactggagaggagcacgggctctgtgacccacccccatcctgccagcctggctgtgtcccagcacattccaggcccccggccagtgtgggcaaccgggcctggccttgtcgagcccccagccctgcttgggggagatggggcagtgtgacaaggtgggcagtgggggtggcttttttctgtccagtcccagcttctgctcctatggcacatggccctgaccaggactcctctacatgcttcactctcctgctgcctccataggggctgaaagtcccctcacctggaacaggtccccagacatcctctcaccttcactggtctcacactccccacccagacccagcaaggaggtgcccaagcagtgagctcggtgaggggtggggtggtcaggatccactgtggctgtgagtccctcccatcctgtggcactcgcacctcggaagggaagcagggatgggatccctatgagccagtcccgaggggaaaagtagctcacttgaggagggctgggaaggcatcactagaccctcttggaccctcaccctcctcccgcctgtaacattcc

SEQ ID NO: 916974 - DNA, 4001 bp, Homo sapiens
tggcctgggagtcttcagccccaagctgtggacagcagcccctgggacaggctatagctgtcacttgaaagaatgtgcaaatgtgcccctctcatttgcatggtatttattgaatgtcccagtactcaggcaactcccccagccctggcttctcccacggagtcccttctacttgcttcctgctccttcatatccaccaggatgggttccctgggatgaagaatcctgcattctctggggtgaggcctgctgtgggtgcccacttgagacccttgcgaggacctgactggattgggcctagcctgacacctctccctggaagctccaattttccaggccaagaaatgtgtccccaggatatcctggccagaaggtggcatctgtgtggcaggcctgggctccctgcctgtaactggagaggagcacgggctctgtgacccacccccatcctgccagcctggctgtgtcccagcacattccaggcccccggccagtgtgggcaaccgggcctggccttgtcgagcccccagccctgcttgggggagatggggcagtgtgacaaggtgggcagtgggggtggcttttttctgtccagtcccagcttctgctcctatggcacatggccctgaccaggactcctctacatgcttcactctcctgctgcctccataggggctgaaagtcccctcacctggaacaggtccccagacatcctctcaccttcactggtctcacactccccacccagacccagcaaggaggtgcccaagcagtgagctcggtgaggggtggggtggtcaggatccactgtggctgtgagtccctcccatcctgtggcactcgcacctcggaagggaagcagggatgggatccctatgagccagtcccgaggggaaaagtagctcacttgaggagggctgggaaggcatcactagaccctcttggaccctcaccctcctcccgcctgtaacattccagagcctgtcaacctctcccccagccgggccccctctctctccgaagtcttgggtttgtttggagaaacccctccacccacacccccctttctggaaatagctgtggttggaagggaggctgggagcccggccgccgcggaggaggggtaaggcccagggaaggagcgagggagggcggcggctctgggggtgttcccagaagggtctggaggatgggggcagactggagggggccgcagagcggggctggcgagtcgaatcagcctcatctgtgcccgcttacggcctctgtcccacatgtgaagcaggaaaggaaaacgttcgcccgcaccctgccaggccggggcccgagcgccgctgccagctgctgccgggtcccgggcctgcgtgtgtggcacggcgtgcggccccgtgcgccccgggtgctggaaggcgtggcggcctgatcgagtagggccgcggccgcgccccgccccctagtcactgtcccggcctcccgctgctcccagctctccgcggccagccagagcccccggccccagccctgggccgcgccccgcgccccgcgccctctcgacctccggcggccccgcgccccctggcgcccgcccctggcactgcccgcgcggccgtgacgcagagaccgccgcccgcccagcgcggcgcggccactcacctgcggggggcgcccggccgggcgggggcgcggcggggcggggcagcagcagggggagccgccgggccagcccatcccgcccgtgcccgcgccgagcggacgcggaggaggaggcggtggcagtggcgggagcgggcggccgggctcggctgggctccctcccgcccccgccgcgccccgcgcccgcgcccgcgcccgtggcagcccgctcctcctcctcctccctcccggctccaatccccacgttccgccagctccccacccctcggcctcctctcctccccaccttctcccgcgaacccacactcacaaagagccgaggggagagagggtgcgcagacggccagccgggccgcgccagggacatactggagacaggaagtggctgagagggggagagagttggagagagacggccgcggaggacacggggacgggaaagtctgagagacggggagagcctgacccggcgggacacaggcagaaagaaacacgcgagccagacagacgcagaagaaacggtgggcgtaggtctagaagggactaggaacaaggggacagggaactgccgcgcagcgtcagcctcttaccctccccacaggagtgtgcctgggcttgggcctgacctgagaggaccacccgtggcttagcctggtggtgctagcgtcccctacccaggcgggcgcctgaatcaggtgaagacacctggtgttacttttggcccaagtcattggacacccttccctggtcctctgccccacaggagacttctcctgggctagtattctcaaaggattcacagctggggacctttccgtcaggctcaagcccccatctccacccgcaagcagctccagccatcccatccactgccctgctttattcattgagacgggagtctgtctctgtcgcccaggctggagtgcagtggcgccatctcggctcactgcaacctctgcctcccaggctcaagcgatcctcccacctcagcctcccgagtagctgggactacaagatgggcgccgccacgcccagctaattttttgtagagatgggttttcgccatgttgcccaggctggtctccaattcttgagctcaagcgatttccccttcttggcctcccaaagtgctgggattacagacgtgagccaccgtgcccggcccattgccctattttaaagagctggaccgtcattcccagttcgcaggagacctctgagaaggtcttccttacatttaacttgagtccagcctttccaaatggagatggaagttctttctatggtctgacctcattcccttcttttgcagtgcctggtactggataggaacttcatggaatggagctaatgggccgtagggcaggtttgagtcgtgccaccctggagcagaaggtggagggtagggataaggtaggggacatcttcctagaagttctgaacctgttgccattcctacattcccccaacgtcctttagcagtgagcacttcctgaaactttctccctccttcaccctccctgctggattttccatgatgaaaaggggcggggggaaggaaggttggaattctgagaacccagtgcccagggctcaatgcccagtgcttgcccaaagtagccagtaccactggctctaaggccttctttccctccccgtctcatctcaactgggtcccttgtctttggcaaaggctgagaagtctggttctcatttccagggggtggagcacctgattccaatcttgccacagggaagaagagtctgtgaagaagtgcgtgatgactgtgtgtccccccccacccagaaattggcatttgggaggggtggatatggttgggactggggagccttgatcttactgctcttggttgagttggtgtccaatagacagtttcagaggttagagcagtgggagtcactggggactggggacaggagaggtgggggtgggggaagccaggcgggaatgagtagggaggcactgggaggaggggagaggcaagagttaggggaataccgaggaaagtggcagggattggaggctcctggagaaagggcaaggctgaaggttgtcccatgtattttggccagatttgattatgtaatcgagaatcatgagataattaagtgtgttcatgtctctggagccttcaaccagctcttttaacatcttgctcttcccagcattccttagggtctttggctgggctctgggatggatgccatgggagtacctttacttaagctctaaagttaccaatggagagactgggactcaaagaggaacttgattggaccccagagaggtgaggggtaagggctagaacctcacacatgctggtttt

SEQ ID NO: 916975 - DNA, 4001 bp, Homo sapiens
gtgggctgccggagagcccacccttccaacggggatcccagccacagagaatgcccatcgacacccatccagattcaaagcagtgggaggcgaggagagggcacatgagaaataataaaagcagaggagacccaagcaagtaagagctagaggaatccctcctttctctctcatattagtcttcggattgaagtgcataaaactttttgagtaagtaaaatatccaacatagttcaaaatgaacatataaaaacgtttacggagaaaaagctcactctcccttcatcccttccactccccccgcaacccccaccaagcatccattcgtactttctggtggattcttccagtctgcaaatatagcaattacaaatgtatactcttattttcccctctttttacattttctatttctttttactttgcggctccagctcaaaggatccttttttaaaaaacagaaaaaagggtaccatattatatatgctgagccacaccttttacttctttagttggatatttctatatctctacacacacagagatacagatatagacgtataagtgcgtgcatacacacaccagttattaatggttttctgcaattttcatccagttctcctggaaaggggtatttagattgggggtcaagaggggttgcttttcagctgacacacaaacagctgggccaccctctcttggtgatcaatactggacgctggttctctgcacttgaagcaggtgccaggagctagctctttcccaaaatatctgcagctcccatttcctgagcgtctaccaggtactaggagaactcttacaacagagaaggaaagctgagaatcagagaggtaaagtgactagcccaaggtcacacagccaggaagtgcagctggcagggttcacagccggtctgtcgctcgccaaagccggtttgcccacacacctggcccccgcggtctccagtccacaccctggtccacagccagaggcagaactggccatgccgagttcaggacccagggccaagtccccagcccggctgaactcgggcagagaagcgctttctccgccatttccctgcgggcagctcggccaggcctcccagggctccccgcctccgggccgatgcggggcgcgcagcctttgctggtcccgggagactcagcgaactcaggggaggacgctgggctccgggcaaagtgctctgcggccgctgcctcgctaagtctcccagccacccgcggggatgaggctgcctgaacccattttacagatgcgaggacgaaagcaggcgccgggcgccggctctcccgactaaggtcacccggccggggagcgtcggagacctgttcccacccaggtccgccgacttcaaaactttccgctctcgcgctcacgaatgcaaacgactctcaggtgtggggcgcgcgcgccagcgggggtgcctgagggacttgcccgcccggcctgaggcacctgccctgcgcttgggaagcctgggccccgctccctccccggtccgcagtcccccggccagggagttcccgggccagtccgaagctgagcggctgcggcactgagcatcgccgcggagctcctcgccgcagcccgcgaggtggccagcggggacccatttgaaagaggaggagactgaggcgcagagagggcccgccactggcccaaggtcacacagcgcggcggcgggccggggtccccaacagtggccgttcggaggtcccgccccggtccccgcgccgccccccgcgggtactcacagccggtcttgccctcgagctcccgcacctcctcagacgcggagtgggcagcgcccatggtgcccgcggcgggggccccggggcgcgcgtccctctcaggccccgcactggcttcggctgcgcagcggcgggactggcctcgggtccggcctcgggtcgggacgccggcgaaggctcggagccgcgggttccgcgtggggccggagcggggcctcatataacggcggagggcggcgcgccgcggtcctagcgcacgccggtttcgcgcactgcgcggctaggggagcgccccgccccgccccggcccggaaaccgccgggaaggggaccccggagcccaccgctctggagtccccgttcgtgcagcagtgctcacgtacctcgtcccttccgcacacctgctggatctggaaggaagcaggtgtgagcaaatttgggggcgtgggtaggaggggtgggacccctgggaggtgctatgcccactcccaacccatcccaccttacatcctccagatcttaggagggaaactccactgagatagtcaaggaagtcagcgagcatgaaatagctctatggagaacaacagtaataataatcctatttgaaaatgcaccatgcgctttggttttttccaggaaagccccagcaccttctgaggtgaacacacccacgtggcggcccgtgtgggccctgcacagcccggtggctgagaggcacctcaaactgcaggagcgggctgggcgcatggctcacgcctgtaatcccagcactttgggaggccaaggcgggcggatcacttgagctcatgagttcgagaccagcctggccaacatggtgaaaccccgtctctactaaaaacacaaaaattagccaggcgcggtggcacatgcctgtaatcccagctactccggaggctgaggcaggagaatcacttgcacctgggaggcagaggttgcagtgagctgagatcttgccactgcactccagcctgggcgacagagcaagactctgtctcaaaaaacaaacaaacaaaaaaacaactgcagaagtgggcccaggaggctgcatttgggacaaactgctggagagaaggcaatgccggtggtccccatgcccattagggaagttctgggttaagatggcttgaggggttggctctccatccagttggggtgactggggccgatgctgttgcctgtgtaatgtgattcctcctccttaaaataaggataagttaatgagatgtccaccagagggcctggcgtggacacagcacatggccacagaggctggtgggcgctatggaatcttgtcccctggagaggcacacagccagggcagaacatcaaggtcaaggctctcctgaaggctctgcagtgcttagtgacaccaccatcaatgaccgtcaggtatcaggtctgttctgaacgttagtctcgatgataaatgttggggaggaagggggacagggtagggggcaggagtttttcggtgcccacagaggggactcgggtggacctacctccatcagtttcacaggctgctgggaagggggctgctgagaactgctgttcattcctgcagactacaggctcaagccaagggtcacagccctttccaggggcaggaggtgactttcagagcccgaggtagagggtgggagttggtcctaaaacctcctagagcatcagaatcagccccttcctggttgcaaatccagcttttggccaggtgcagtggctcatgtctgtaatctcaccactttgggaggctgagacaggaggattgagcccaggagtttgagaccagcctgggcaacatagcaagaccccagctctaccagcaattaaaactttttaaaaatgagctgggcacaatggtgtgcgtctgaagtcccagctacttgggaggatgaggcagaaggatcgcttgagctcaggagttagaggctgcagtgagctctgattgcaccactgcactccagcccaggcaacagaacgagaccctgtctctaaaatggaaaatccagcttcctcttccactgcctgtctgcactcgtagagctaaggcagcacctgcaatctgcattttaaagcactctccagagggcagtgcaagacctgatcaaggtggaaagatgttggctgtgggtcatcagctgatctgagccggcaggacagctgacctagggactgcattttggtttaaaggattctggaaaca

SEQ ID NO: 916976 - DNA, 4001 bp, Homo sapiens
ggattcactacacattgacacgggcaagtcaaaggtaggtagtcataataactgaaatgtatagagtactgcatatttatccataaaactttcctgtaaactgcttaacttaatcctgacaaccactttagagctgattatggttacctgaccctcacagagatacgttatttgtccaaggccacatccctgtagtgctgagatttaaactcaagttggtctgactccatgttatatagtttttccactgacattagaataagaaaatggcccaatgtcaccatccaatgtaatttgggattaaaaaaaaaggagaagttattttagtaaattctccattttgcatctatgtaagctctccatcttatagtctagtagagaagaagcaccataaacacaatgtaatttatatttggttctgtgacagtcttagtgcaggaagtgttgctttgtttgtgttattagaataatttcctttctgactccagctaggtgattatgaagcagtttagccttcctcaggcttacagagtggtttttttggcaagggcccacctaacttctagttgggaggagagaatctgcctggaattccgcattactttcaggttgttgtggcattcagaatatttcataacggtttggggcaccacagagcaatgagagctgataccatcaccgccctgtggtggggccccgcccggtacatggctgatgtggccttgaatttctggggcctgtctggggagtcttgaggaaagagctgggatagctgggctggtcatgggcactcagagggcttgggaaagtggataattatcattagtagacatattttaatattttagcaactattagcctaccagtttgcacctgacaaatatcagctctgcttacagatacttcaccatggggcaattttcaaggggctcagtaaggatgaccaatgcttctttttctttaaagttcagagtgttatttagaaattaaagaaaaggaaaactgtagaaagagtttgggccttggaatcagagtaagcctaatttggaatcatagttctgtctgctttctgcatatttgtccttggtaacactatcttttcttctatacctaagtttcttctttttctttttcttttgtcttgctgtgttactcaggctggtcttgaacacctggcctcaagcaatcctcccaccttggcctcccaaagtgctgggattataggtgtgagccaccacacctagtctatacctaattttcttcataaaatagatactgtgccaaactagttgggtgattggcagttgtaatcaggtaacacatattaagtccctgatgtataaaggtggtgcttaataagtgatagatatgattatgattatgaatctcccctcagtctaagatgttcactaaagttgaaacatcttgaggaataaggaaggaaagaaggaaggaagaaggtgagaattgcagggtacagttgacagtataaaatcaagatggtgaaaaagattttttaaatctgtgttaagcagagataaaaagtaagcaatgaaaagtctttctttcctggggcctgtcctagggtggggggaggggggagagatagcattaggagatgtacctaatgtaactgacgagttaacgggtgcagcacaccaacatggcacatgtatacatatgtaacaaacctgcacattgtgcacgtgtaccctagaacttaaagtataatatattaaaaaaaaaaagtctttctttcttacctaattcccaaagggaccagagagattacctaatcctgttcactcattttgtagttgaggaaactgaagagagagagaaaggagggagaaagagagagagagagggagggagaagcaggcttgcctggagtcacaaagaatattagtggttttaaatgggaaccaaactcacaagttctgagttccagatgcatgctttcttcctttatatcatacagccttcctcctgccacacttggtttccaaggcccagtcccaggtttgcctttagtgctctaggggacatgtatgagacagacctctcttctcttctgtctgttttgtacctatgccccaagcagtgcctgtgagttgagactgagagtgagaaccagtgtgggaggagagaagaaggaaatggggtttccatgatgtggcccataagaccttctgcatccacagccaagatatacatcattaccatcgcagagctgcgggaaatcccagagtagctaacatttctctgttcatgaactggacaaactccacctcaacccaggtggattgtcccccatttgacataccccaatctgcaacaaattctcacattccttcatagaactgtcttctagctcctaaccctcttccatgtcactcaggttggaagatcatcagaacaagaatttccctgagtataatatttgagcattctgagacttctattgtctaaggagcagttcaatctgttcggggaaaaggagagatgttacttggtaaataacagaaagaaaaaatgcccattagtcaatagaactcctattcccctcccttttcatactctttctcccacaaataagcgtagctgaataaatactgaaagaagaccatctaagacctttttcctctccttccctttcttccttacttccacttttaggatatgaattttaagaaaggcttgtataattgctacaggaaatattaaagttgtggatttggaaaaaaaattaatcgcttgttctcaatgtagggagacatcaaatatcttcatttgaatgggcaataaagacatcaagaataagaaacagcagtttatctgagctgatttatagatggcttcatcaagagaaagtagggagaatgagcagatttctcaaccattgtgttagctctgtgaattcgtatctttaattcttcagtttcatttccttggtaataagctctgtcctgcatatattcatttttcttctttcctgcttttctttttcaatatctacacactctcttctcctcgtccctctacttatttgactgaactcttttctcaatctgaaatctgtgtttaggccattctgcatcaggcctgggtgttgtaaggcacacagtactgtgggtactggaatatccactttggtcttgtgccttaggtggaaaagagaacagttgtcagtttgcaggtggaaataaacgtgtgatcttttccccttactgtagcccagaaggaatcttgtaagtcacagcattggctgagacgagacctccatactagaatccaaatcaaacattgaactgaaaatgacggttggggcttcatgttcactacataatgctgaatcgcagggttccatcttaattttcaaaaaacccaagagttatgagaacatgttggtagcgtggttgtaaatggtttctaaacaccctggggtgcatgcgaataactcagatgttaaattgctttctatcccttctgctatatcttcagcttgttatttctgataatagtccaagtagagacagacaataaacctgacttcccttcttcctactaacacttcatgctgcaagacaatattgtgagatctttatctctaatcactcagctgaacaactattgagtctgatacttggacacacaagttgaaggttcctacctccaacctcccatcctaggtactgccctgcaccatctagaaagtctccttacctctctactcaggaccatttgtggtatacagagtcactagtacttccctggatatctcctgtaaatgctcacagtcttgtcaaatcacttctgtggaactctcctttcttgtccttgccctgccctggggacccaccctttttcttccacccactggtgagcttagtggcacagaaggggcatgggaaaaccccagggtggaggatctttccactcctccatctaccccaaaactcatgtaggtggtgatatgctctgcctgctaccactggggc

SEQ ID NO: 916977 - DNA, 4001 bp, Homo sapiens
tagctctgtgaattcgtatctttaattcttcagtttcatttccttggtaataagctctgtcctgcatatattcatttttcttctttcctgcttttctttttcaatatctacacactctcttctcctcgtccctctacttatttgactgaactcttttctcaatctgaaatctgtgtttaggccattctgcatcaggcctgggtgttgtaaggcacacagtactgtgggtactggaatatccactttggtcttgtgccttaggtggaaaagagaacagttgtcagtttgcaggtggaaataaacgtgtgatcttttccccttactgtagcccagaaggaatcttgtaagtcacagcattggctgagacgagacctccatactagaatccaaatcaaacattgaactgaaaatgacggttggggcttcatgttcactacataatgctgaatcgcagggttccatcttaattttcaaaaaacccaagagttatgagaacatgttggtagcgtggttgtaaatggtttctaaacaccctggggtgcatgcgaataactcagatgttaaattgctttctatcccttctgctatatcttcagcttgttatttctgataatagtccaagtagagacagacaataaacctgacttcccttcttcctactaacacttcatgctgcaagacaatattgtgagatctttatctctaatcactcagctgaacaactattgagtctgatacttggacacacaagttgaaggttcctacctccaacctcccatcctaggtactgccctgcaccatctagaaagtctccttacctctctactcaggaccatttgtggtatacagagtcactagtacttccctggatatctcctgtaaatgctcacagtcttgtcaaatcacttctgtggaactctcctttcttgtccttgccctgccctggggacccaccctttttcttccacccactggtgagcttagtggcacagaaggggcatgggaaaaccccagggtggaggatctttccactcctccatctaccccaaaactcatgtaggtggtgatatgctctgcctgctaccactggggcaaggggtgttggaggagcatgaagcccccaatattatgtaggtcactgagaaggcaacacatccatctatctatctttgagatgtgaaccctgaaatctggtcctgatggtggctatccatctatcttgagcctcccggtgaatttgaccttacctcactcaagtgtgtacatcctccctcgtagctgacctcaatatatcttgctgcagtttatctcaacaagtttcttctacagcttctgaagaaagaggtcatacccacagaaagcaaagttgatttcagccaggtactctcaatggttggagctatggacactagagtagggcctgaaatgaaaccgggaaacttcttccttgagaacttttcgatgttataatcagatggaaattgcagcaacaatgagttcagcaagacacagagaagaactttgcaggtgagaaaggtgaaaaaaaattcctaaaatgttattcaagtcatcaaagagacccaagttttgagaatctagaaagattacctctctgataataaagagaaaacaaacaaacgaaagcaaaagggcacccagcatcgttctcctaggcataatgatggatgcttttaaggttgaagtaagagtggtgggagattttctcttgattttcccttgacttgacagcctgatttttctctgacatgtttccttctttctcctagcatcaccctaaatcagtacagccttgaaactgagataaaggctgtgcttacctgtctgctggtagaaagctgagtttgaggcaaagcagttgtcgaagctgggccgaggccttcacaggtgtgggcacagaggtgaagcaagtgagaaagtatcatgttgtagattatgcctttctccctgaactcattcaactgctgttgcctgctcaaaaggggaagcggaaatgagaacacaccacacacacacacatccacacatgtagatgcagtccccgcctcctggcccagccacatcctttgctccggctcaggagactgagcgaaggacaaaccatccgtagacacggtgctcacaactaggaagaccttcctgccccagagctgcctctgtctttccagaaaaacaggagatcttttcctattaaggcaaaggtacagtccatttaaagaggtgtgtgcaggagtcttcctaccatataactagaattccactgctgcagataaatccttctgtcctcaggagagctgtctgaaaatgggaaagctctctctcataaatgatctggcgtttatctcagagaagaagtttccagtcgtatcacacacttgagagggctctgagccagtcgctctgtgttgataactttcatactctggtaaattcccccgaagcttgtttttgaatactgactactttttttttctgttagtttcttaactttgttttatgttcaaaccacttcaaagtttttgtttttgtagtaaatgactgctttccccaacgttttcaaagctgaacttttaaaatcggttacaccctgaagatgtcttcagtttattggttttcagtttggaaaaggcttgttgaactctaaaaggtttctcccaggcctcaatcactttcacccaccgggagcatccagcactgctaactatccctcctcgcttctccagtatctctgaacactcttctccgtaggatgctgctgcattttggatatcttctttctgtctctctcctgattctactgtttccttctttaaatcatttatttatgaatgtatatcacaatatttattctacaaggcactcctctaatgtgttaattgtgactgattttcacatgttcattaccttctttctgattttttggctataggtatagttagattttttttttaccatgtttctaaattccatttccaatcatcaatgggacaactccattgagtatccatagtatagctataatatggtagaaataatcctaaataaaattcttgcttggcaaattaagttctcaaaacattattttcttcaagtataatgtgaggaaaataacaattctctctgtttctcactcaacccttctcccacgctattccttttacgtaggcatgaaaatatctaacatattttctcaggacatagtagatgctaaatatgtgcttctctgagaattagcttcacagtcaacaagtaaaatgctaaatccaacacgccctaattctctttatttactattcttttccgtacaaattaactataaaagctgaactaatggaaacttaacaactcttttaaatcctaagtttctagaattcaatgttttccttaacagttgttttccaatatgtttgggaaatggagaatataacttcggtagggagtttggaaatatgtgagagagatttaattttcaaagaaatgggaagctgatactggtatttagtacctgagggccaatgatgataagtgcttttgaagggatgggactcttcagtataaggaataattgtcctggcccaaatgtcaacattttgttaacattgatagtttgatggttaggagagcaggctttagagtgaagctctggcatcaagtagctctgtagtcttggatacgttaacatctctaggtctcagtttgttagctgctaaatggggataaccttacaggagtggttgtagagctataagaataaaggaatacagagtattcagtccagcgcctaccttacagcaaatgctcaagaaattgcagctatttttaagactcttgaaatataatagtttcttttaacttttattttaagttcagtggtacatgtgcaagtttgttacataggtaaactcctgtcataggggtttgttgtacagattatttcatcacccaggtattaagcctagtacccaataggtatttgttttgat

SEQ ID NO: 916978 - DNA, 4001 bp, Homo sapiens
aaaaaattaaatattaaagatataactaaagtcttattttacttctaaagtcaattcttttccttcttccaggtaatcactatccaagagttaatatgtatcatttctgggaattttttttctgataaataaacagatgtagatagatggatagatatagacagacattttgtggaattataggtaggtataaactcctcctttataaaactcaccagtcactcactattaaaagcataaagcacatacacatatatcatctcatttaaacctcacgagaacccttagactgtattattttaagcgtcccactttatagctcaggcgtctacagtgaacagaatttaagttattagcttatggttggttaaacacttagtagcacaagaattaggctcaagtcttggagacttttcactaaccagaccacctttttgtcataaattttggttcagggtttatctttgtagagcatgagtgaagaaagatgatttctagagtttattatcttgtatttctgtgaatttattattttcaattagaacgaaatatgttctaagtcaatgagcatattttaaactacttggcacccctctaggttattcagataatcagacagttagcaaaagcgtaattaataattgctgacatgaattgatgactcaagagtagttaatgagataaggacattaactgagctgactgtttcccctgtacatatctggtaagtattttaaatcctaggacagttctcatcctaggcttctcacccaaacctgcaaacatgctgattaccaccattcttttcttcctgtattctgtgggtcctctaattgactttgaaatcaatgaattatgaataagatgagggcaatgagaacaataggttttttcaaacaacaaaacaaacacaaaataaatccttcctggcattgccttcttgggtacaggtgaaataaacaaccttggattatttggtgttatttatttcctaccaaataagcaagaatgggtttctttatgccaattaatagatgagtttagattaaaggctatataaaacttgagccattcctggagggaaaataaggagcaggcagaagttgtccattctgagaattcattattacacagaagactaaatagatcacagaattcttccttttgtgtctgggtatactgagcctaagaacggtacaggctgatgggctgtggggtctcataatttaaagtatctctgaggaaagagataatgcactgccttgaagtgcctgctccaattctcccctgctttgaatgactgtcataaaccctaagcttctcctgtgctctgcagtagaaataaataacacagatgaattgctcttcagcaagaatgatcaggtttccaattccttttgttacacaatgtaagactccaatctaaagggggaagtcaggggagtaggggtctggaactcaccccaactattccccatccactcttagctttagctcaaacccaacctctattcctagacctcgtgcctaatttagtcttagccccaagttgcacttgattcacaattgtgatcaccagttcaccctaaacccgcaacacccctccaaccaccatctcaaccttacttctaatctttaggcccaaatcaaatccatcttcccgtctctgagtttccaggagttgtgtctgttagcaaattcaaccatcagccacataccaccccattgcctgtccagcacttacccgcaatcctgcagccagtcttcaattttattgattggattccctagaaaagtcagacactagatcactgtgagaactgaacgaaatcagacctcctccctgcaactaattccattccacaagtttattcttacataagctgcgtcatgaatctttttttctacataaagcttttctttaagatatgagaggaatacaccgtatataaaaatagtagatatttcttctctctctctgcttcttttctcccttcctcccaagaacctggaaagtgcccaagatgtcaggcccactgctgtcttttgagagttcctttcccacaagggtggatccttctcatttaaaaagaaaaagaaaaagaaagacaatcttgtttttgtgctttttgcttcctaccaaataagcatttatttccatcagaatttttgttttactcttatgactgtggtctcatctgaacctcaaagaagctctgagaagtgtaggaaaggtactactacttcaattggacaaataagtcttagagaggtgagtgacttcccaaaggccacacagcttgttagtgacagcattgtggccagagtccaggcatccagcttgggtgtggtcttgttacacagacaaaatagaaacaccccaaagcattcatagagagcccccagcctcaggttcttacagaagcttctcaggatgatgcaaaaatgtgcccttccctttttcctaatcttatgcctgtctctttctcacataattcatatttcgtattactttagcttttctcctaaacatatttaaaccagtcaaaacagtcctccctgagggcctggctaaacaaggaacctgttcacactctgcagacctgggcctgctgtcaccttttgccgccagacaacatagacgcctgtctgatgttcgtctcttaccttcttggaaaacgtcatccaggctggaaggctcaggatctgggacatcctgcagggcggcggcagcctcctcttctaggacctgggtctgccagttacggctctgacggagccaggcccgccgtttctcccaggatgtggggctcagcacagaggcctccatggccctggctcagacttcagggcctcccgtaacagtaatgccgtcctaagagttgaaaaacagtgatactccctcatcatatgctcagaaaccatcatgatgctcagggttgccccctgaattttcctgtgtctgcccaaaggagcttggtctctctgaccattcaaaagcagggaggacatgcctagctcattttctgtctctcctgcaaaaaaggaatgctctgaaaactctaaataccgggataagtctttcaagccagaaagtttgaaagcttcaaacatcatgatttaatggacattaagaaaactcttctgacttaaagaatctctatttctcagggtaatcgaaatgctgtattagaaaacattttttctttaatccttaagaatgttgtctaccagaatcttccattatgactaaaacatctttaagtttacaacttataaaattcacttcattttttaatcctcatcaagacatatgaaaaaatttagggtctcaaaggtaaaacagattttctaaggtcccacaaccaggatgtcactccaactataggaattctgggttttgtttgtttagtttttgtcttgattttttatgttcctgttttatatattaggagtccacatatgatttctctcagaaaaaaaaaaataccctgtgattaaaagcagagagacactgccttaagcaattagcagccagcaccttcaggataatgactttctaatttgtcaacttgtgcttctacctaactatgaatttattcctcagctcatcaatgcaattactaatcctgtcgattcatatttcatgtaacattaccaaatattgatgtatttttccaagagacacaatgatggcactagatacacattcaaagaggaacagaggggaagaatcattcaattgtccaaatagagcttaaaaaagcttgaagctaatgtaatattcattggctcatactctgtcctgctgcctctccccagctggccacacttgcatcccaccacactgagcaaataggagtggggctgaaactctccaggtcttatccccctatttcctcgagctgccataaacaacatcatcttaagagctacacttttaactattggaataaaataaaataaaataaaataaaataaaataagaagactaccagttt

SEQ ID NO: 916979 - DNA, 4001 bp, Homo sapiens
ccaatgaaaatgttaagttctagtctcttgactcacttatttagattaagtcttaataatgcattaggaaacccaattatagtccatctacccctaagatgcagctgtttcaacatttccatacaggattcttacacatctataaatgaaataaactatactggaggaatgaagcagccaatgcatgcaacaagttatataggcaataatgttgctttcaaaggagtttttgttttgttttgctttgtttttcaaatggagtctcactttgttgcccaggctggagtgcaatgacaccatctctgctcactgcaacctccgcctcccgggttcaagcgattctcctgcctcagcctcccgagtggctgggattacaggcccgcgccaccacacccggctaatttttgtatttttagtagagacggggtttcaccacgttggccacgatggtctcgaactcctgagctcaagtgatccgcccgcctcagcctcccaaagcgctgggattacaggcgtgagccaccgcacccggccgaaaggagatttttcatctgttatcaacaactggcttgatacataaagatccagaagcatcttaagttttcttcgtcactttttcatttcacagcttatgttttaaaagtcagaaatcccagaattaagtaaagtcttaaagcaagctagtggtaagatagagctgtacggacttcttcatcaaggacttccatatctttccaacaagaaacgaaccaatattcatcattaagcaccagctcccaatttcccaacttcctagataccattcctatgctatatgtaacccttcttcacacaacgtcagacttacccacacatacaccatcagtccccaagtctcccacattggcacaaaagcctctcaacattcatctggttactaatcagggaccacttccttcttccactgattctgcacaggcttcatatcgcctacaatcgctttttccatttcttccacaacactaactactcaaagcgacaaaagaacaagtcccttttccccaatcgtaaacagctttttaaaactctatacacctccttcccactcaaccccttttcttagtgtctatccgcctttgttattcagaaggtgtagggtctgggaaaatctcactcacctcatgctataggcaccagcacccagttcctggccgatcccggacaggctagcatcaaagtcctgcaccaacccggattcaatcacttcgtcggccagaggcagcttcagagcccaggccatcctggctccttccttgccccaggagacaccgtgtcttgtacaaaggcgcggagggtaattctacccaacaggagtaacgcaaaccaagaaaactacaaaccaaggtttcccacgcagtgcccaccagccacccccaagcccgaccagcactgctctgtgcacaactaatctcccgtacccttggctgctcgttcttggctgccccaggttccaaaatcccccctgcccagctctcaggaacgtgaggacccctttgctcaactactgcagacttcccagaggcagctctggactcccgcactcccactcctcttgagagttcgtagtggtggcttgctgcttcccagtcagaccagcagcagccgcaggaagccagcccggcgctcccacgctgcttttgcaccttttcccccgcccctttctgctggaggccccctccctcccaggtctcgctctctctttcccctccaggcctcgcttccggtcagtcccacgatcacttccggtcaccccttctcaaccccacggcttagaaccaaatccaggtttccgctgagccgacttctcgccctctgtagccccccacggcctggaaacatggaaggagaaagtccagcacaggcgtaaaacctagactcgccaggcccttccaccgtccgccgccccagcgccaaccaatcatggcgtcctctttcctcgcctgcccggcgaacatgacgtcacgctgtcgttcgcctataaagaagagaccgcgtcagtctcggcagcgatgataggcgggctgcgccacggctctgcccccgagatgggctgggcgatcacggggaggacccggcgtgcaagtgtccgggtttaaacgtgtatccgtgtagttaccagagttctggtattcgctacccatcaagtcgtcaccctgagccatggaaggagcccttcttctagccttatgaacccactccacccctggcggactcttgacggcttcccaaacgctccttacgtgtgtgcgcttgctcctgcccatactcctgtctccttaaactcacctctccggaggtcaagaccctgcataagtcccacttccctgtatattcattttatcttcggcatcctctctaatgcatttgaacagaaaagcatgagatcagtaaaaatgtggtttttaggccgggcgcggtggctcacgcctgtaatcccagcactttgggaggccgaggcgggcggatcacctgaggtcgggagttcaagaccagcctgaccaacatggagaaaccccgtctctactaaaaatacaaaaattagctaggtgtggtggcgcgggcctgtaatcccagctactcgggaggctgaggcaggagaatctcttgaacccaggaggcggaggttgcagtgagccgagatcgcgccattgcactccagcctgggcaacaaaagtgaaactccgtctcaaaaaaaaaaaaaaaaaaaaaaaaaaaaaaaaaaaaaacagtggtttttaaaaggttgttgtgctggtatggggtgttggaatttaaaagatctgaaaatcagagtttaggctggcgtcttcatttgctactttggtgtcttcagaacaattgcttaatgtcacagatttagcttcctcgtttgtaaacgggagtgggagtaactttatctgctccaccttcctcctttgaggattgagtaataatggccattgtttattaagtatcaactactgctaggaactttattacactatgagtagtcctcaaagcgatcttggaattagaattataaagctaaatttaatgactcttattttatcagtaagaaaccaaggctaagcccttaaattggccggagctaaattgacatgccagcttcagagctgattccaaagcctggcatttttcgttacaagacattgcctttatgtgaaagtcttggttcattgttgtattccgttgctgaattttttaaaatctgccttgacttatacttttgtatatatctgcctctctcactagattgatctaaagaataaggaataggtctttttcaggcttgcgttctaaatatctcctactatagttcctgctttcaacaggacttttaaacatgtttattgaatttaaaaaggaatgaaaaaggaataagagaaccaagaaaaagagagaagttgacatgaagatggcaacatgttgtgctggtatggggtgtttcagccacaggcatctctctgaaggctccaggcttaaacctgccgtcttaccttggtaagccctaggatcaaagtcttagctcattctggagacattcagtatctctttaagccatcttttcttcccatgagccagttctatctcaaaatgtgtgactgtggataaaggaatgggtcctgggctcatagacaaaaagagagatgtcacatggagatctgagggctcaaagtttttgggttttgtttttgtttttgagatagagtcttggtctctcgaacaggctggagtgcagtggcgcaatctcagctcactgcaacctccatctcccaggttcaagcaattctcctgcctcagcctcccgagtagctgggattacaggtgtgtaccaccacacccggctaatttttgtatttttagtagcgacggggtttcaccatgttggccaggctggttctgaactgacctcaaatgatccacctggcgcagcctcccaaagtgctgggattacaggcgtg

SEQ ID NO: 916980 - DNA, 4001 bp, Homo sapiens
ctcatcaagttcattcccgatgatgcttgaccagcactttcagtaacactacgattctctacactgcagccagaggacttttcaatatgcaaatctaatcgtgccattcttttttaaaccctccatggtttctcaagtactcttaggataaaacagaaaatacttaagtagcacacaggacccaatctgtcatcctttggtctcatttgaaatgtcacatcctttgaaaaagtgttctttgactttccaagactaagttaggtctctgaatgtttcttctgtggcacttaattatttatgtctttctccaccattaaattctaaattccaggagggttagaactttctggatccttagcacaatgtcaggtaattaggaactccgtacatatttgatggatgaatgaacaaagcactacatatgcatgaactagtttaaaaacagaaacatcacaagattttttttaagtggcagcttttaataaaagtacagttcgtaataggtagggaaaaaggtcaaggatataatttctacatactaacatatacgttgttaggtatataaaatatataaaatcaggactggtgtcacttaactttttaatgtgtcttttcttcgggcacgtggcaggcacttgcagagaaggtaaacatttacagagtacctgttattttccaggcattgttcaaagtgctttcaagagttctggtttgacagaactaaagaattttgatttttcttccagcaaacaaaagaaaacctaggttctttttattactctattctagtaagaacagaaaggttatcttttgcactttaattaacatcgcttaattccatggctatcaaagatgactcaattcctccgcagaattactatgtgactattagaaatctaaatgcctcccatgtcaattcatctagtgagaatttcctaattttaacgggaacacagcaggcttttacggtgattgctgattgggaagatctctttctcccttacggcgtcattcatgtcaaggcccggtctaacagaggaataaaacagtagaaaattacgatatcctcctgttacttttttttactaaggggtaatgaccaaacagtacttggatttcttttagaaaatgagtaaagcttccccgaaagcagagaacaattgggcagatttgagaaacacaaaggacatacgatgcttccctgctaccagctgggaaagttattagaattagcagaatcctcctgttccttccacacaagcgatagccacaataggaactccagtttccgtcacccccactccctgcccaggttacctgtggaagctgatgttaatgtgcttgttgtaggtagtggcacagcccgccgcagcgcaattggtcggcatttccctttcccactcattcagcgcccttaggtctctactgaggcgctggctgctaagctttcttctggcagaggctggacaatcgaggcaggcgtgccttaatcgtgagagcttagtcgtgagagcggagtgggaagaaggggtgtgtatgtgggggcggaggcgaaggacggtcagccttccctttctctttattaatatggccgactagagcccacagaactggccctcctggagctctagtcgccttcgcttgacttcaccaacatggcggacacaacccgttctttctccccgcccccaagagggagcggatctactgcgtttctttggcagcggtcctcagagcaattaaaaggaagaggtgttttcccctccgattactataaattacaagagttttacaataaaactctctcaaggctgcaacagcagctccacctacttctgcatgcacccaactgtaccaagccagaccctgcggtgggtgtgaccctaggaccggaagagtaaacccgaagaaagacgaaagactacaaatcctagtgagtatcgagttggtcttattatcgcgtgaactgggagcctttgtttcctgcgtgtcgcaggaagtgacgtttcgggtacagccgctaccagagtccctttctcgcgaggcggaagaaccccgatcgctgaggagcaagggggcgctaggaaagggaactgggttgcgacggtccggcgagagagagctggggtgctggggtgcggggaagttggggagcagaggccgcttggtgtccgagtagggtaagaccgcaccgacccagtccgttaggaaagaagggaaacgaggcaattgtcgggcggatccccggacggagggctaaggttgtgtggaaggcgctgctccccggatggcgaccgcagatactccggccccggcctccagtggcctctcgccgaaggaagaaggggagcttgaagatggggaaatcagtgacgacgataataacagccagatacggagtcggagcagcagcagcagcagcggcggcgggctgttaccctatccgcggcgaaggcctcctcactcggcccggggcggtggatctggcggaggcggtggctcttcctcgtcatcgtcctcttctcagcagcagctgaggaatttctcacgctcgcggcacgcgtctgagcggggccacctcaggggacccagcagctaccgacccaaagaaccgttccggtctcatccgccttctgtacggatgccttcgagctcactgtccgaaagcagtccccggccgtctttctgggagcggagccacctcgccttggaccgtttccgctttcgaggcaggccttaccggggtgggagtcgctggagtcgggggcgaggagtgggtgagcgaggaggcaagccggggtgcagacctcctctgggaggaggagcaggatccgggttcagcagcagtcagagctggcgagagccctctccacctcggaagagctgtatccttaacgtggcggtcggcgctgggtgtgtcactaaagttccctttagcgtcattactaggtctgtgagacgagtgtaactttgaatcatcagaaccgcttatttctccctgtgtcagtatactttaagttgttctttggtaattccccatgtgtcacactatagcgttattcttaagactgcttcattgggtatattaacgtgctgtggattgggttaagcttatgaaatctaagacagttaagtctgatttgtaataataccttagaagcccaagtttcattagcatttgtatttttgctggtacagaaactttgtgttttatatgaagttgacttggattgttagagaaaaaatattcataaacagtttaagtaatattgttgctttatcatattgcagtttgacgttgaaaattgtaaagttttaatctgcacagtcctgcactatttttgtgattctgtttttatcttgatttattccggttgctgccttttaaagtgggggggggaggggtaaaaaaaaaacaactctggtgtctttaccaagtctgtttcagagctttttgattcatttgatctttttggaacactttacctcctttacgtttctatctgtgttcacttttgcacattgtgtaacttcgtgctgactaaatgagggccagagagagaaagataaacttatcagcatttttattttaatacgttagagtggaggaatgtgtatgcgagggtggagattacgggtaagttgagaaaggaaatagtaacattccagatttttcctacttctaaccttattctcagttttaaacattactgagtttactcagcatttatacagaggaatcaatcatccgaaggtttcctgttttataatgggtttgtaaaacactatcttgacttaatctgtgatcattgcaaaaattgtttaaagactttcattactggttgtaattcacatagtgtgatgatttttaatttcgttattatatatgaaacttaaaagtaatgacagttatttggaagacaatcagaattacttttatagaacacttaggtccagaataggtctttctcaaatgtcatgatgtaaaaggggcaaggaat

SEQ ID NO: 916981 - DNA, 4001 bp, Homo sapiens
ctaaattgaactgaaacagagaagtctggaagatgagggagaagagtttggagctaaagatttggaggcatcaggatgtaagatggtgtgagtgcagtgagaggaggaaggaagccaggaaggacttcttgatgaccctttcactgtaaccacagaagactcaattacatgtgttttccttaggacttgagttccttaagggtcgggaactctccatcctactcatctctgtaagcctggcgctaagcacagtgcatggtacatgttaggagctcagtaaccttttattgatcttttattgagctgtatcagtgcccctggtaatagaggggggtaaaaaacttcagggacacacaggaagaagtgactaacttggcataggaagctggatacattgattttcagagggacaattaagctcagtcttcaaagagaagttcgcttggcagagcagtgtcaagatcttccaagcagaaggaacagcaggaactaagtactgagatatgaaagagggcagccacaatctttccacgtggccaggagtcaggtgcgtaagagatttacaaaatgagattgagagggtcagggccagactgagaggccacagacacccacctacggatttaaggctaactgtgggtggtcaaagaggagttttaaatttaacatcagatgatctacctttactttgtacaaagtactagtagggccgggtgtggtggctcacacccgtaatcccagcactgtgggaggccgacgcgggcggatcatttgaggtcaggagttcgagaccggcctggccaacatggtgaaaccccatctctactaaaaatacaaaaattagccgggcgtggtggcgggcagctgtaatcccagctcctggggaggctgaggcaggagaatcgcttgaactggggaggcggaggttgcagtgagccgagatcggaccactgcactccagcctgggcgacagagccagactccatctcaaaaacaaaacaaaacaaaacaaccaaaaaaaacaaacaggccaggcgcggtggctcacgcctataatcccagcactttgggaggccgaggcgggcggatcacgaagtcaggagtttgagatcatcctgaccaataaggtgaaacccccatctctactaaaaaaaatacaaaaattagccgggcatggtggcgcgcgcctgtaatcccagctactcaggaagctgaggcaagagaatcgcttgaacccgggaggcggaggttgcagtgagccgagatggcgccactgcactccatcctgggcgacagaacgagactccgtctcaaaataaaataaaataaataaaaaattgaaagtactagtcgaagcacgaatggcaaagaattgagaggctcaaggaaaaaagcttcattagcggctgaggtccaggtgacaaacccgaacaaggcaacgaagggagggagtgagaaatccgttccataaaacccacgatataagtaaagcggcctgtgaattccgaccactgctgaccgccaggccacacaccggtttttttcaggaggtctcaactagatgctaagctccgaagtggaactccctcaggcactttctgttctaattcaggaattccaagcccctttccatcacaaccccatcccgcgggagacccaagctgtgcggagcagcgtagggctaagcccgcgtccggtgagacccgggaacgcggcgcgggagactaaggagcagagtacagaattgcgcgtgcgcgcctgcagcacgagccccgccccctggctctaaaccgggtggcgggaaaagggactcagcgtttcccgagaatgcccccatagcttcgaaaggatccccgtgtccgcttagcgccctctcgccacacactcactcacccgctccctgcgggtcctcagaagcccggaggagccaccggccctctggcgcggggccgcagcctttccgccaccaggctcagctggaccggtccccgcctgcgcgaagagcgaggcggggcgagccgggctggtccacgtgactccgagcgaactggggcggagattggtgaagaaggaaggaaaagggaagcgagtgcagggactgttttatgtgaggtcgatctaaaaatcacagcgctatgaattttctgctgaattatagtagaatcaaagtccgattagaggtgaatttacaaacattcttccccttcttctagtcaagcggactattccaagtcttaaatagttagttagaaaagttaggttttatttgggaggaagtaaagagctgaagtacagggaggaatggtcttctgggataggggatgtccgttgtattataggtataaatttaaagctttcaaagtatgcaagaggctcataaaaggaagaaagcaaccgtaaatattcattgaacagttgagggtctcttctggcctctgctgagatgatcttgccaaaaggaaaagaaaatagggctgtgctctggccccctgtaatcccagctactggggaggctgaagcaggaagatcgcttgagcccaggatttctagactgtagtgtgcgatgatcgtgcctgtgaatatccattgcactccaacctggtcaacatagtaagaccccctctcaaaaaaaaaaagaagatagggctcaaacaaataataatctcctgaattattaagcatttgaatagaaggaatcaatttctggggtatgagggagttagaagagatttgcttcaagatgaaaggacggatgacagagaaatgaaaatacacagacacaaaacaagaaaaaaaacacggaactagtgataaaagcagaaagatgccatttgaggagtgttttgatttgctctaaataaattagaacagagtcaaagcctctcccctcatgccccctactaccacccgttcatttatttgctccaggaatcagatttcctgtgttggccttagggaacaattgtggggcttaaataccatctgccaggcagccacaacagtggatgtcaggctgaccagttaagctgcttaatttttctagattctaggcttgcccaagctctatttaggttggaagctctttggcccaggacctctgaagagatccattatgtcagaatgaacacaaccagccagcggatgtagacaggtttacgtggctttacagaacagctaaatcctagtgttcacttttctcagagctacttccccacccaagtccctggggcaagcatccctaagataagtaggctatatattcccattaacttccccccaattcttcggtacacctacatcctgatctggggctaatactccgttttcaccacccacctcccttgagtcccttctcctaacccttggaagccttgtctcctccacttctctccatctgcctcgtgtgaggagtaactccctgcttctctgttccctcagaaatcaagagccacacacttgactggcagcagggtaaaggccagaaacttaaggtgtcggttacccagtactcaccatactgggtcgaggaagggaggtataggatggcacctctttttgcttccttagctctcatgccccaaaactcagacacagccacactcacattcatatgcacaatcagcacacacggcgaagggtggtgggatggggaggaagggaagtttgcaccaaccagctcatgaatgcaacttgaaagatttcacacagcaaaaggaaaaaaaaaaaaaaaacaaccacatacataagttaaaaaataaagaagtacatgaccctccccacagtctctttcttcatctaggggctggctaaacccctccacgtaaactcagaagctttctactccctctattcagctggagcttctacagggcctgggtgttcagttcaacaggttcccctgtgacctctggttgtccattggagacatcgggtttggcacccttgaggacagacagtctctcagaaatactcttgagccgggggaagagaagaaagtcgta

SEQ ID NO: 916982 - DNA, 4001 bp, Homo sapiens
ctatatacaaagatcctagaattcagtttgcacaagggcttttcaaagataagtgcatagcaacacaatcacattattcagaaaatattatgtttcagaactgcaactagtctattaacctcaaaacaaaacagaatgtgcttagtttcatggaaaagcacatgatgatctgcctggcacaactagtgccttttacattttatattaacaaaccatgagctgttgcccaaacccattcaccaagcacaagacttacaatctaacatcccattctgagttctcactgagatgaacaagaattacctgaaatcggccgggcgcggtggctcatgcctgtaatcccagcactctgggaggccaaggcgggcagatcacgaggtcaggagttcgagaccagcctgaacaacatggtgaaaccccgcctgtactaaaaatacaaaaactagctgggtgtggtggcgggcgcctgtaatcccagctactctggaggctgaggcaggagaattgcttgaacccgggtgtcggaggttgcagtcagccaagatcatgccactgcactccagcctaggcgacagagcgagactccgtcaaaaaaaaaaaaaaaaaaagtcacctgaaatcatcaaaaatggtgtactcatagggagccaagcccgggcatgttgcttcttggctcccacaggtgaatttgaagtggcaatagaacttcgttgattcttgtttttctcattttagttttactctctattaaattgttattttttacagttcatttatggatgacaagttatttcctgttggtagctgcaatgattgggaattttgtgatctctgtaaacgaattaatatctcatagagatctatttcctgttggatatgagacaacagagaacacagtttttgtccatttgtcttttttaaggtcaaatcgattagaaatttcttgccctcaagtaaggagaacaactctgatacctggactggcaagcttttgtgtttctgtgtttatttttcatttgtggctgaacttgtagaattgagggtatacacattctatctgtatgtctatgtatctgtaattcagaaagtcctttatttctcattgtgagtatggaatgttttcctgtctccagatggtattaataaattagatggtaaaggctctttaaaaataaagcctcattatgggttcattttccctctcaaactctgtagaacataaccagtttgaaaagcctctagatttgggggtgtaaaaattccatgcagcttgagagccatcagtcattaagccgctagttccaccccaagtcttgctgtccagaagctcagacagtccactgggcagcaaagaggcgctttagtaagttgaattaaagccacaaacatggctgctccctaagggagataatactgtgttaaaaaaagagaattatttatctcttcccatttcctccgctaaatgaggaggttaatagtaagacctccttagccatgagtgtttccgctgcaggaaacaccattcgtgccggttctggactcaccacccagcgtgtaccaacgcccccagcaccatctccctgctaggctgacagacccctggcggattttgacctcgcaagaaatgcaaaagcaactttgggttgcagaagccaggcgccccgaccttaccctcgctggaattcccgaagacctcggctgcaccagccacccggtgttcggatgccagcaccgctacgaccagcagctgcaggaaccccattgctgcctgggccgggctgggcccacgccagggctggggagaggtgcgggcgtgcgcgccggggccccgcagcctcgcccacgctatcccggggcgcccgcatcgggcgccatcgcccgccaggtgcagacgcttcgcacctgccagctccgcagccgccggcgcgcgccccgccgaactcctagccccagcgagaggtttcctcttccggcacctgacccccaacgcgcgttcccgcgcctcctcccgggctctcgctgcgtcacagcggcgggtctctgggcgcgggcggcgctggggcgtttccaggcagcgcgcgcctcctgccggcgcgcggggaacgcgcagcctgcggtgctcccgggagcccccaggaagtcctggcttgaggcccggtcttgccccacttttatctcaccaagtaggcaaacccactgtgaaagtacaaaataactttctgttgcggactaacgtcgccaggctcctgtttccgtgtttaacggccctttacaacagcaaaaaagaggaatcagttgctaaaaacacaattgaaggttatttcccccggtagcaattgtcttcgctgctgaggcttatgttagcataaaaatgccaggagaatgctgtttgtgtagtggttaccgcactagtcataagcactacatttaaaagtagtttcgttttctctaagcgaaatatcctcgaagacacggccttggtctgaacttcgtctcaagtctcatacctgagtgctgtttgagggacagtagtccatgtgacagatggctcatcgatgatgtggaattagacgcatagacttaacgttatttggggaggattgtcttgctttccttccctggttttaatttttttcacttatatattttgatgagcaacttatagcttggaaattacatgttcagttagtccactactaagctaacaatatatagctgtgaccataatgtgaagaagtgttaaagacaaaattattcaatgatacttgttaaagcaccgaacgaagactattgaggactgtctcaattggcatagggaccactgcaactgggtcttgcagtggggaagagggactgggctcaactccgaatacagcgtgggcaagagggaatttatagccaaccagcagtatggagttcagtggatggaaaattactaagaggaagcatcagaggtaaggggcatttggtgaaactgacctaacaggacttctgaagacataacatcacctgggggatggtgcagggtgagaaaactgattagatatggaggaaagggggttctttgctaaaactggatttttacaaagaagtgcacagatggacctagcagaagattcagaagccgtactagagtttggccaagcaaataatctttgtcataggcacaattctttctctgctttcccactgcctggtccaaattttcacacctttggtagcactatctatttctgtagtgcttattcactctcccacatgcccctattcctataaccctcagtagatgaaatccaaggaagatgaaagggacaattatgataagggtagcatctgaatcagtggatggattattcaataaattgtgttcttaactgattagctgcactatgggcagagagaagcagaactctatctcacactaattgtgaaaacaaaatcccaaagtaataaaaccataaaagagctagcagaagagggcgctcttttttttttttaataaattgatctcaaaatgggaggagctttctaagaagcaaaacagcaaaggaaacaaccataaaggaaaagattggtagacttggctacgtaaatgctttttacataaatatttaaattttattaaagtaaacacacaaacaatatgaaaaggcaagttgaccaaaaaaaaaaaattagcaaaggacatgaatggggaatttcaccccaaaaaagaaatacaaattaccagtaaatacatgaaaaaagttcaatctcactagtaaacaaataaaaaaatcaaattaacaaactaagatgtaaacattttaaaagtataaaacatccagtgtggataaaagagctaagaaggaggcattcttaggtagggatactgggaatatacactttaataaagtaatcggcatcaaaaatgtttaaaaatcttatttttgtagatttggtataatccacttttagatttaagtacataattaaatacacatataaaaattagtataagc

SEQ ID NO: 916983 - DNA, 4001 bp, Homo sapiens
tagccaggcctggtgacctgcatttgtaatcccaactactcgagaggctgaggcgggaggatcacctgagcccagaaggtagaggctgcagtgagcagtgatctcaccactgcactccagcctcggtggcaaagcgagaccctgtctcaaaaaaaaaaaaaaaggaaattctgacatatgccacaacatggatgtatttgaagacattatgctaattgaaaaaagccaaccacaaaaaaacaaatactgattgtatctagagtagccaaattcacagagagagaaagtgaaatggtggttccagggactgggggaaggaaggaatggggagttaataggtatagagtttcagttttgcaagattaaaaagttctggatattggatggtatataagtttagtctaaagctatgcctttagatattttaagttcagcctaggggttctcggtatatagtgaactataacctagtaaacaggctgtaacctacgcttgaaccaatcactgagtttcagccaaagatggccacgtgttcaaaccatgttcaaacgggcaaaaaccaagctgtaaccaatcaactctttctgtacctcacttctattttctgtacctcactttactttctctctccataaattttctcccaccaagcggcaggactcatcactctgaaccttattctggttccgggacctgcccaattcgcaaatcattctgtgctcaaactccgttagatttaatgtgtctaaagtttttcttttaacagtgcacaaccatgtgaataacttaacactactgaactatacacttaaaaatagttaagacggtaaattttatgttacctgtattttaccacaattaattttttttaaaaaaaagctgagttcactggccaaaataatttcaaaattcaattccaaaaatataaatgctaggcaccaagattcttggtgcatcagaactatcttcatctttccttttccagaacaagttctaggcactaagattcttagcacatcagaactatcttcatctttccttttccagaacaagttccagctgcctaaacaggctgaaagtctggggctgtttcggcgatcaaatgaccaaactagagcaggcaatggcttccacgtagatgaagctgagcattttaaattcaaaaatttctgcccattggctactacgtaataacttaaaacacaatttagactgacttaggaagcttctgtgttgagcaacttcctcaataatcctcaaagacctgttgcattctgggccctgcggagaggaaatagtgccgtcagggagcttccagcctagcacaggacggtaaatataagcctgtaacgcgaaaccccacagaacaaaaacatcaggccgtggattccactcgtgtgtacgtcagtcacagtgatcaaccgactcatttccacgacgtttcttttcacttcaagatgccaaattcaggctgcggcggtttccatctgtcccttcctacaccgcggcgcccgctggggagccggggcgcacacaggacagccgcaagccttctgggcctggcgccctcccacacccgctaggaggggaggaagcgcctccccgactccctgaggagggcgccagtcctctggtacccggagaaggagggccgggagctcagtgagcactccctgtgagtcccaggagatggccgctctccctcggaagccggaagtcggcttctagaggccgagcagtgcagacaagcggctgggaggcactggagaggggacaacgtacccattcggatgtgcacggtggcggaggccacgctgctgccatagttgaagtcgtcctcgatcgaggagcgagggtaccgggggtcggggtcagccatgatggcaacagcacccctaccggtcccggtccactaaccgcaaccgcctcctccccacttccgcgaggaagagcccagccccagcaagccgtgcggcgtcggcgggcgaacaccgagcgagtcgattttctcgcttcaaaaattccagctgggcggagaaagcggggatggctccgagttagaatggaagagaaaacggtttacattcccggcgtcatctgaagtgaaacttttctcaacacacttttttttttttttttgagatggagtttcactcttgttgcccaggctggagtgcaatggcacgatctcggctcaccgcaacctccgcctcccgggttcaagcggttctcctgcctcagcctcccgaatagctgagattacaggcgcctgccaccacgccaggctaatttttttatatttttagcagagacgaggtttcaccatgttagccaggatggtctcgatctgctgacctcgtgatccgcccgcctcggcctcccaaagtgctgagattacaggcgtgagccaccgcgcccagcctgaacacactttaagtcctttcaccttggagagttgctaaagtgatagaacccatgtcccagtcacccatccactcaacaaatacccatctcattcatccactttttcaataatcacaccgaggatgcatttttacttctattattttaaaataataataatacctacatttattgagcactttctataaaccaggctttctgaatgaagtaatatttaatcctgaaaggcaagtaggagccaaccagagaaagagcagtgatgtaggctgggcctcaagggaccaacgtctgcaaagagggagacggtgaagctcagctggtgtaggggacaggtggcaaagaatgaggctggatagataaacaaaggccagatcatcctaggccagaagtagaatacattgaagagggccattaccaaaggcagagaaaaggggataaagttgtattactgtaagagagagatgatggtggcaaatacaatggattagagtgaatattcatgatattgttgtcattccaatataaagaggtgtagacatacccagagtagtgtcatcctagggtcccttggaattgttttgatgagtttactctgatctacccacattgcccagtcctcaccttaaccacaacacccgaacacttagcaagtggaattcagaacagttgtggaacagtctattctaaactaaatccttaaacttgatgttctcagaagcctttgccaaaagaactaacgtcacttccacaatgacaagaaaaacaaaacaaaacaaaaaaacactttatcttttatgattttacaaacattttacaagcatatcattttaatttgtttttgttggtttgttttgagatagagtctcagtctgtcacccaggctggagtgcggtggctctatctcggctcacagcagccttgacctcctgaggtcaggtgaccacccccgggtaattttttgtattttttgtagtgacggaatttcgccatgttgcccatgctggtctcgaacttgggctcaagtgatccccctacctcgacctcccaaagtgctgagatcacaggcgttagccactgtgtccggcccctcgttttagtttagtttgttgaatggataggtgaatgggatatggcctctatctctttagtcactctccaggtgagaggacttaaaaagcttgctgagaaaaatctgagaaaagttttacttcagatgacactgggaatgtaatccgttttctctcccatcctaacccgaagccatcccctctttctctgccccgccgtaataatggaatttattatagaggacaaactggagctaaattgggaacccacctttgtattgactaaaaacagcatcagcaaagtttgatcctttacctcttaccagttacaaaaaaaaataaattccagatagattgtggatataaatgtgaaaggcaaaaacaataaaacttaaagaaaatgatacaggagaatatgatttggaggaaggcaaagatttctgaaaccagatacaaaatagcacttaacttcaaatgaaaagattgccaaattaaattatattaaaatta

SEQ ID NO: 916984 - DNA, 4001 bp, Homo sapiens
ctatagtctagtgctctttttactattccatcctacagtagaaaaataagctttcatttatataagctttcaaaagtttcagccataggtgaaaacaaatctttaaaacaaaaaaaccctcccaaaacatacattgattcctatgacatttttctgcattttcagcatttgtataaagagcgcgaactatatctataatcagggaaaataacttgaaaatgctaagtatctagattaattttaccttttcttattcttcaggagagatgactctttttctttaggaaaggattacacctgtaatcctagcaatttgggaggtcaaggcgggcgaatcgcttgaggtgtggagttcgagaccaggctggacaacttggcaaaagcccgtctctactaaaaatacaaaaattagctgggcatggtggtgcgcgcctgtcatctcagctgcttaggaggctgaggcatgagaattgaatgcaccagggaggcggaggttgcagtgagccgagattgcaccactgcactccagcttgggtaagggagtgagactgtctcaaaaaaaaaacataataataataataaataaataaatcgcttgagttctggagttggtaagcctgggcaacatggtgataccccatctccacaaaaaatacaaaaattagctggagctggtgacgtccacctgtggtcctagctactcaggaggctggggtggatcacctaagccaggagaggtcaaggttcaagtgagccatgactgcgccactgcactctagcctgggcgacagtgagactctgcctcaaaaaaaaaaaaaaaaaaaaagaggaggaaggtactaaaccatgtttccacaaccagataaataacggaagaagcaaactatggatcaaaagtacagattgtatttctcaagggttcaactattctgtccctactggaggaaagtggcggcagagaatctaaatgtcaacatattctttaggccagaacaaaaatattagacacaaagaataagaaaacaccaaagagtgtaaatacaataattacagaaaaaagtgtgtatacgcaggtcataagaaatgtgtttatgcaattccggtatctttccagaattcaattcttaaaccacacatacaaaagataaactgtaaataaatatcaataagtaactagaaaagtccatttgccatttatttacctttgaccttaaaatccttgtctgtttcaagcacagtcagcccttctactgggttacacattcacaagttgctagaacacagtctcaagttcatagtgatttttgttgtgggggtggtcaatgaaaggctgatgaccccaagcagcccgggctggcaccgggtagtaattctacactcagtaaatatacaaagataccaaagcctacttgttaccacaggtccagcaagtaggcccaagataaaaactgcccaacgacgcccttgctgagcagacttagaaagacgcccacaaaacctcaagaccaagcaaagcaaagccacctcacctgcccaaaggtaaccaatccgaaaagagcggggccgccccgtgggcctggaaggcagccccagccccagactcctctcacttcccgcctctgccgttggctaagtaactgaggagcctcgcgtgtcacagaggagtgtgacatcacccgcccgccaggccctacctcgagtcttggctccgggccgctcacccagggtcagcccgaccaaaggacccgcccgcagccgaacagcaatcggatgggtggagtttcgcgttccttcacctcggaaggacgtgctctgaattcgaacgatcgaagctaggccaaggggccctgcgtctacacttagtagaggagaaggagcgggagaaaggaaaaggcgggctgagaaggggccttcgccagcgctctggggcagaatagaggcctcgacaccccccaaaacccccgcagactcgcctccgccccacccccgcttcagcactgttgcgcacgcgcagcactagttccctagcttccctccacaccctgttttcccgagtctggtctccgagcagggcctcgttccttcagggtgccatctgtccgcagaaggaagctactgccactcttgctcagacagtaactgctaactccctttccatttctcactcccagttcgcccagtactaggttcagacgtaccttcctaacccgcctctccaaggcctaccagcgcttctaacaccggatgtgctctgactcgcccacttccgctcccgatcttttacccggcgttcgcctctcgagggaaaccccgccctgtggtccgcttaagaccagtcctcattggccgttggccgcactcctgcctttccattggctgtacgtgcataaacagcggctgcttagttcagaggcctgagcttgtcgatcaagactactggccaccaaccgcctcgaagcaaaaggtctccgctttcttaccgtagtaagccagggtcacggtgcgctgctgcctctagtggagaaagtgaaaatgggccggccccgcccgggacagcccgacggcttgtgaaggggtagcgctgcagtcttgggattctggctttagtcttgtcatgcagtgttaaagggggaaagcgattcagagaacacattaaaaaaaaaaaaaaagcgccctcgcaaggggcgatttactgtgaaactagtggagcgtaagcttcagagcacctttgaaaacacttcgatttctctagagtatgcgagaaggaaatagcaggattccaggaggaaaaccagaatttaggaaaccactttctggaaagatagaacagttcttttcagtaaagaatacaaatatccagggtatgattctcagtaggcaaacccaggtatgcaattaatagaagttaattttcggctgggcgtggtggcttacgtctgtaatcccagcactttgggaggctgaggtgggcagatcacttgaggccaggagtttgagaccagcctggctaacatggtaaaaccccatctctattaaaaatttaaaaaattagctgggcgtggtggcgtgtgcctgtaatcccaactactcgggaggctgaggcaggagaattgcttgaccctggaggtgaaggttgcagtgagccgagatggtgccactgcactccagcctgggagacagagcgagaccccgtctcaaaaaaaccaaaaaagttaattttctataatacaacctaatttttgctgtagtgtagcaggacaagccgcagacaaaacccctcagacaccgagttaaagcaggaagcggtttattccgccaggagcatcggccaagactcctgtctcaagagctgagctccctgagtgagcaattcctgtcccttttaaggcctcacaactctaaagggatccgcttgagagggtagtgatcgattgagcaagcatgcaccggtaattagatcagaacaggacagggattttcacagtgcttttctatacaatgtctgtaatctatagataacataaccgattaggtcaggggtcgatctttaactacgaggcccagggtgtggtgcctggctgtctgcttgtggatttcatttctgccttttagtttttactacttctttctttggaggcagaaattgggcataagacaatatgaggggtggtctcctcccttattcccccactttgagactctcactcattttattagtgggagttctcaccttcatcttcactacctatgtcttcctgcatgacagatcgatagtgatttatgtagtacacttgtgctgaagcattctggtgaactagagtagtgatgaaaccttttaccatttgaatgagtacagatagtaaataagggatcagtaagcaggctattactactataatttttattataagagttttaaatcctcctagcactgggaaccatttttaaacatagcttcagggtcaaatccgtgtcacacttgtacaggcacatgtgccagt

SEQ ID NO: 916985 - DNA, 4001 bp, Homo sapiens
gtaatcctagcaatttgggaggtcaaggcgggcgaatcgcttgaggtgtggagttcgagaccaggctggacaacttggcaaaagcccgtctctactaaaaatacaaaaattagctgggcatggtggtgcgcgcctgtcatctcagctgcttaggaggctgaggcatgagaattgaatgcaccagggaggcggaggttgcagtgagccgagattgcaccactgcactccagcttgggtaagggagtgagactgtctcaaaaaaaaaacataataataataataaataaataaatcgcttgagttctggagttggtaagcctgggcaacatggtgataccccatctccacaaaaaatacaaaaattagctggagctggtgacgtccacctgtggtcctagctactcaggaggctggggtggatcacctaagccaggagaggtcaaggttcaagtgagccatgactgcgccactgcactctagcctgggcgacagtgagactctgcctcaaaaaaaaaaaaaaaaaaaaagaggaggaaggtactaaaccatgtttccacaaccagataaataacggaagaagcaaactatggatcaaaagtacagattgtatttctcaagggttcaactattctgtccctactggaggaaagtggcggcagagaatctaaatgtcaacatattctttaggccagaacaaaaatattagacacaaagaataagaaaacaccaaagagtgtaaatacaataattacagaaaaaagtgtgtatacgcaggtcataagaaatgtgtttatgcaattccggtatctttccagaattcaattcttaaaccacacatacaaaagataaactgtaaataaatatcaataagtaactagaaaagtccatttgccatttatttacctttgaccttaaaatccttgtctgtttcaagcacagtcagcccttctactgggttacacattcacaagttgctagaacacagtctcaagttcatagtgatttttgttgtgggggtggtcaatgaaaggctgatgaccccaagcagcccgggctggcaccgggtagtaattctacactcagtaaatatacaaagataccaaagcctacttgttaccacaggtccagcaagtaggcccaagataaaaactgcccaacgacgcccttgctgagcagacttagaaagacgcccacaaaacctcaagaccaagcaaagcaaagccacctcacctgcccaaaggtaaccaatccgaaaagagcggggccgccccgtgggcctggaaggcagccccagccccagactcctctcacttcccgcctctgccgttggctaagtaactgaggagcctcgcgtgtcacagaggagtgtgacatcacccgcccgccaggccctacctcgagtcttggctccgggccgctcacccagggtcagcccgaccaaaggacccgcccgcagccgaacagcaatcggatgggtggagtttcgcgttccttcacctcggaaggacgtgctctgaattcgaacgatcgaagctaggccaaggggccctgcgtctacacttagtagaggagaaggagcgggagaaaggaaaaggcgggctgagaaggggccttcgccagcgctctggggcagaatagaggcctcgacaccccccaaaacccccgcagactcgcctccgccccacccccgcttcagcactgttgcgcacgcgcagcactagttccctagcttccctccacaccctgttttcccgagtctggtctccgagcagggcctcgttccttcagggtgccatctgtccgcagaaggaagctactgccactcttgctcagacagtaactgctaactccctttccatttctcactcccagttcgcccagtactaggttcagacgtaccttcctaacccgcctctccaaggcctaccagcgcttctaacaccggatgtgctctgactcgcccacttccgctcccgatcttttacccggcgttcgcctctcgagggaaaccccgccctgtggtccgcttaagaccagtcctcattggccgttggccgcactcctgcctttccattggctgtacgtgcataaacagcggctgcttagttcagaggcctgagcttgtcgatcaagactactggccaccaaccgcctcgaagcaaaaggtctccgctttcttaccgtagtaagccagggtcacggtgcgctgctgcctctagtggagaaagtgaaaatgggccggccccgcccgggacagcccgacggcttgtgaaggggtagcgctgcagtcttgggattctggctttagtcttgtcatgcagtgttaaagggggaaagcgattcagagaacacattaaaaaaaaaaaaaaagcgccctcgcaaggggcgatttactgtgaaactagtggagcgtaagcttcagagcacctttgaaaacacttcgatttctctagagtatgcgagaaggaaatagcaggattccaggaggaaaaccagaatttaggaaaccactttctggaaagatagaacagttcttttcagtaaagaatacaaatatccagggtatgattctcagtaggcaaacccaggtatgcaattaatagaagttaattttcggctgggcgtggtggcttacgtctgtaatcccagcactttgggaggctgaggtgggcagatcacttgaggccaggagtttgagaccagcctggctaacatggtaaaaccccatctctattaaaaatttaaaaaattagctgggcgtggtggcgtgtgcctgtaatcccaactactcgggaggctgaggcaggagaattgcttgaccctggaggtgaaggttgcagtgagccgagatggtgccactgcactccagcctgggagacagagcgagaccccgtctcaaaaaaaccaaaaaagttaattttctataatacaacctaatttttgctgtagtgtagcaggacaagccgcagacaaaacccctcagacaccgagttaaagcaggaagcggtttattccgccaggagcatcggccaagactcctgtctcaagagctgagctccctgagtgagcaattcctgtcccttttaaggcctcacaactctaaagggatccgcttgagagggtagtgatcgattgagcaagcatgcaccggtaattagatcagaacaggacagggattttcacagtgcttttctatacaatgtctgtaatctatagataacataaccgattaggtcaggggtcgatctttaactacgaggcccagggtgtggtgcctggctgtctgcttgtggatttcatttctgccttttagtttttactacttctttctttggaggcagaaattgggcataagacaatatgaggggtggtctcctcccttattcccccactttgagactctcactcattttattagtgggagttctcaccttcatcttcactacctatgtcttcctgcatgacagatcgatagtgatttatgtagtacacttgtgctgaagcattctggtgaactagagtagtgatgaaaccttttaccatttgaatgagtacagatagtaaataagggatcagtaagcaggctattactactataatttttattataagagttttaaatcctcctagcactgggaaccatttttaaacatagcttcagggtcaaatccgtgtcacacttgtacaggcacatgtgccagtttcgtcatgtctttaactatatcttcgactacttgcctctgatcatctatgtgcaggcagcaattggtaaggttaaattttccacagacttctcctcgaactaagatatttactcgacgatccagtccagccctgtcgattcctaaggtcacacgctcccctttttttccagcgaggatcaaggggattggttattactagctctaaggggttacattgtcccttagtacaggaagagccattttttcctttctgaaggtggactggatccttttcattttttatccaagtggcctaaa

SEQ ID NO: 916986 - DNA, 4001 bp, Homo sapiens
gtgtgtgtttgcttaagctgtagaatgaatgtcttctgtcaatcctattgctttatctctggctctatacttaactcgttgggtaataatgttaaaatctaaatttgagaccctacttaaattgtgacctggtctcaaaggtcctcgggtcaccactgcaatgatcttcttggatcattatcctcactggttacacacaggaatgtgaagcatgcagtcaggagaaagccctgtaattgcccccaggccacaagtaatccccctggaagcaaaaacaacctcctctccataaactgactagaaaggaacaggtgggaaggacagcagaggggtggccagcattgtcagggtttctccagaatggcctgtcaaccaggacaagccctgttcccacatctttttgaacagcctggcacagaaagcagctctgactgttttacaagcagcactcttgcagtttggggagccattttcccttttattccaattgaaactgtgtgcatcaagctctgtcaactgttgcactcacagtgttacgaggctattgcatgatatgctgtcggaacaactggcctctctgacttttttctttttttaaacaacagacagatttttttttttttttttggtttgagacagagtctcactctgtcacccaggctcgtgtgcagtggcgcgatctcagctcactgcaacctccaccttctgggttcaagtaattctacctcagcctcccgagtagctgggattacagacgctgctaccactcccagctaatttttgtattttaaacaacagaaatgtaacctccaagacccaaatgatcaaatgacaagcagcaaacttttccaactttccctcctctcccacccccaggtgttttggtttctgaagactggggatcactatcaacaatgggcaaacctttgctacagaactgattaggacaaaaccacctgaattaataaatgtgtgcaaatattttaatgttcagggaaggaaagaaagattgcattttgtgtcaatatagagaagtcttctatgacaaagagccacaagtgaacacagatttcctgtgagatcaaaggctcccccaggcagaaatcacatgaacctgagccttcaccaccctatggggaatgaatcccacactatggggtgtccaagcatggtccgaggaggcccagttcagacgcactctccatttcccccatggctgcttcctctcccacagctcgaggcagccaccacacccttcttccccaacgtgggctgggcagcatcacacaaagtcagttttacagagtttcaagtttccaggcaaaggcaggatgactcaaagatgcccacttgtcgaaagactagatattaaagtacaaagttagattccaactcagagcctggttagacccggggttactttcgaactcccagggaggtgggaggagacctggctcttctccagccagtagctggcacaatccaacccagatatttgtccatctgttaaatcactcacactggactgacatttttaaaaggacataacaataaggagactggtggttcattaggcgtttaggcagtttaagtatctagaaaccaactgagaaattagggagggatttgggcaagcacaaagataactattaagagcacaaagacaaattgcatttctttctggcatctcccaggatattaaagaccacaaagctccacaatacatatttacacactctggctgaaacggaagagttgtgaagagacttaccaagggccacacagcaaacccaggagcagagcaggatcggcagctagctcaccctcctgcccgaggcatttgaatctgcaaggcaggcaggctagatattccaaacagcacctaccatatgactcagcctggactttggagatactgctcacattatctcggggtattcctgtgtttgtctcagagaaactccacgccctgcactgtacccaatacaaatgtcagtaataatgcaccgtattcaacacattgctgtacaaatgggctctttgtgcagtcagcagaagagatccacattctatatctttgcagggaggtcgactagaagggcgcctgctatcaatcaccccgactctgggattgcaagaggacattcagtctggtactctctctttaccaataaggaaatgggctcggctcaacaaaccttgttaggcagagcaaatgccagcagtggactgggcacagtaaacaccaatgtgatgaaggcagagcaaaggggccagccagcaccaagggaagggaagtggcttaaagacagtgagcagtcaggagactctctgttgattcattcatgagacagacacttgctgggtgcctcctagtgtcaggcgcagcgaggcgtgctggggaggcaaaggggcatagccgcctcctggcgtagtggccgggggagagacacaatgacagccactgataagtgtcaggagagtacttggtgctaagcgagcacttggaaggagctgctaagggggagataagaggaaagggggaggggaaaaagtcaatggaaagcagaaaggcttgtcagaaggtgaatcagttagacagagaagtaaagatttggaggacttggtgcagttgaagactgggacagcagatgggtcacacccggagggtcccacttaactcatacagaggtgtttggggttcatcctgtaggtcccttggcagccgcatagaggattaggatgatcacatcctgttttaaacaagtccttctgagaaagcaagatggaaaatgcatttccatggagccaactggagcctggagcctgctgcagcaatctatggcaagagctggtgaaggctggatgtagggtggtcgtgagaggtctatgaaggaggtggaatgagaggacttgccaccacctggatgtgggggtgaagggacgagtcaaggaaaaccccacttctgtttcattccttctggtagctaagcttattcacaagataggcaagaggaattttcagcctcagacatgataaacttaaggttcctatgggaccttcaaacacagacgtcctgatgaacagagagagaaagggacagaggaaacagcactggagcccattggtgacagcgccttaggcaactctctgaggagacaagcatagacaaccagacctaatcaaatcccagcttctgcctcttagcagctatacgacctggggcaagtaaattaacctttttgggactctggtctcacctaaggaaattccttttgggatttaatgaaatcagaaaaggacatgatgtcatggcaaacagaagagatttaatattttcctcttgcccttttgtgatcatatactgctttgtattataattgagtacttaacctttgcagcagattataagttttcttgctgtcactcatctttaaatcccttttgaccatatttgtaggcacagattctcaaatatttgaattgccacaagtcatatgaaaaactaaggccagactgttctgggggaccaggggtttcctgcttttgacattaaataacaaatgcaaagatctcaaaattgctatgtggcttaagtggtgttgatttaactctgtgttgggggtgggatggagagaaaagggcagtggggtttggaaaagagggagaattttgtcagcctaataaaggctagtcaaagcctactctgtgaaaactctactgtaatatttaagaggaagagtgtctatcaaagttaatattgcatagcctctatcctctggctcagttcaagtaaaggtcttaagtcatgttaaataatgaattccagcaaatggatcttgccttaaaccaaatgttaagtcaatagtacactccgtatatgagacgtatatactttctttgctaggtcattttgctaattctaactcttaaaatgaatattttaaaactacaataagatttttaaaaccagactgaccagtaaggcatacataattca

SEQ ID NO: 916987 - DNA, 4001 bp, Homo sapiens
aggttttgaccttttaatagaaaagactggcgtagacaggcaacagtggcagatgcggcagaaacactctgcagttaccttacacaattgctttaccacattccacctaagcagttgaggcacaaactttatcaccaccattttacaggttatgaagagtgagttttgtaaagttgcatgagttttgccaaaccacttaaatgagttgacaatgagccatccatcccgctaagattactaatcttgtttacacaaagaagatcacagttgtgacaagaaaaaacaagctttcacatttcaagtctgcaatattaactttacagaatcctctcaattacaaatgcattcgaagatgatctccttttcttcatagttctgttaactagcattacagctatccaagaagaaatgtctacctgtgggtaagcacatttcttcaatgtttattccaaatggagtttctggttattttcacagcaaactgttacgaaacttatacacaaagtgcaaaaacaagagaattgtaagattgagatgagtgcatgaggtattattccaccaaatatattcaatctgtaaaaactcaaatcatccttccaaaatgattaacagatgctaaaggaaaaagggaaagcgggcaaataaaccagagactcattgcttcacttctggggcaatcgattactacttcaaattatgagtgaagaccaaaatcctgcacaaagggccgcgacacaaccccgtcactattgctactatttccatccagttggtctctcgatcttggaagtggcaggccagaatctgagcccggctctccctccgtgaactttacacagaggctgacacccaaatccccagttctcggacaagcgagtaagtagttggcggagcaaagaacaactccaggtgcctcctgccagaacagatgccagcgtggaggaggtgctttgttaaatggcacttcaatcagccctggggagaacgggttacagagcctcacatccagcctcgacgattcaacagcccgggagggcaaaggtattcaccggggagggcgaaggcttcctctcccaggacagacccgcgcttgggctgcggcctccgtctttattttgaagccctacagggctcgtctctgcagcaggctcagaatgagctattttcgcccacagccaaaatcagcaacagcaaattacactgcaaacaatggcgagggcgcctgctcggctcggctcgaaactccggagaggcagcgcaaagattctgacttttcacttgggcagagcccgtccgccgcctccccgcgctccggctgcgcaccgcgctcgggttccggccacacgccccgaggacagggagacagggcggccgccgggacgttcggcggggagggcaccgtcacacccagggcgagaccccggagacctggagacgcggggccgcgggtggccgggtggcgggattccctcgcggagcggcgggcgctccctggcggggaggacagcagagcgcgggccgtcggggaaccgggcgtcccgcatagcgcgcggggacctgggcgccgtgaggggcaggcggacctgggatcccagaaccgcagcctgggctccgacgcccccgacgcccacccttttagctcggaggatcggggaggcacggacctccggcggcagcggagggcggcggcgaaacgccgggggcgcgtgggttagcactgagccgccgccccagcccgcctcgcccccgggcccgcgcgcacccgccgccccccagcccgctgcgctcacccggctcttgcagcggtggtgccggccggggtacgagtaggtccggtccacggtgagcgccgtgtcgctgcccggcatctccgcgctccggccgcgaactttcccgtcttctggggctgccgcgccgcgagccaccggctgtgctcgggatcaccctgggagccgcgggcgagggggcggcgcggctgctgcagctgttgcctctggtgccaacacccgcgcggccgccctgcgccgccgccgccgcggggtgggggaggcggggcaggaggcgagagtctcctcccccttcccttctccccgcctctcccgcgccccgcagccgcctggaccccccacccacccccgacccgggaggcaatgtcttcgcctccctccctggctgaaagttgattccatcccctcccacacagccctctttctccccaaaagataagcgacatccacactacactatctgttgacttattttatatataaaaggtgactgttactgcaagaagttgacacttgccttaaatgcctctttttatgttattctccattcaacaggcacttactgggcagctgccatgtaccagacgctggactagagaccagagatttaaagtaaaaaaatgaaataaaataaaaactccccccgaccatgattgccctgagcatagagcatacttccacttaaactaagatcctactgtgttgtgtattttaattttgcatatctggctcacctttatgtttctttcttttttttttttttttgagactgagtctcgctctgtcacccaggctggagtgcagtggcgcaatctcggctcactgcaagctccgcctcccgggttcacgccattctcctgcctcagcctcccaagtagctgggactacaggcgcctgccaccacacccagctaaatttttttgtatttttagtagagacgggatttcaccatgttagccaggatggtctcgatctcccgacctcgtgatccacctgccctagcctcccaaagtgctgggattacaggcgtgagccactgtgcccagcttacctttatgttttaagctacttggaagtcaggatatcttttcattttagtattccccattcccagtcatcagtccctgcccacaaggaatttggagtttagaagaggaaggaccattggtgaacaatttaaatatcagtaaccccaaacaaaattcaaaacacctgttctggctctgtagggtgtacagtgggagactgggctgaaatatttaaagtgcagctgttccagagaggacctggagcccagtgtgaccagtccagggggagggaaggatttccctcatagggttcaaaggggacggtagagcaggctgaagaaaactttggagcccctaaaatcagaggtacatttgggaaaacctcaagtcatcagttttggggagtgtcctcaggaacaggaagacatgatggaaaagaaggcagagaccatgcagaatcttcgttcaagggtaagaagttcagccttattctgtgggaactgggtagctgttggaaattcttgaacagggaaatgatagcatgggaatggaagtttaaggagaaggtatatctgacatcagggtgaagcagcgattgaagatgggcaaaacacactggcttcttagaaggccactgtaaagacagaatagcctaattatccttcagaaggagactaagtaaataaatgatggtacatcatccaatagaatattaggtaactggaatagaaatgaggcagccctctatgaatagctttggaagcaaatctaacatacatggttcagtggaaaaaaagcaatgtgcaggataatatatatggcattccaccatttatgtaaaaacaatatatgttatgtgcttctacatgcacgacatatatctgggaggataaataagaaactagggaaacagacaagaaattgatgccaagagaggggaaccaggtagctagaaggcagagatggagagagatctaattttcactgtgtatacttttgaaacttgaatgtttatactgtgggcatatattaactattcagaaagtaaaattttttaaaaaatgttttttagagatagggtatctgttgcccaggctggggtgcagtggcacaatcatagctcactgcagcctcaaattcttggtctcaagggatcctcccacttcagtttcccaagtagctagaa

SEQ ID NO: 916988 - DNA, 4001 bp, Homo sapiens
aaaaacacgaaattagccgggcatggtggcgcacgcctgtattcccagctactcaggaggctgaggcaggaaaatcgcttgaacccgggaggcagaggttgcagtgagtcgagatcgtgccactgcactccagcctgggcgacagagcgagacttggtccaaaaaaaaaaaaaaaaaagaaattcaccaagaatatgtaactttcacttagcttcacttcggtaagtgataataaccattttgggctgcaattctcccactttataaaataagagttgacttcatggctttctaaaacacctttaggtcctgacatttatgtcttatttatccttattaaacccctcagaaacagaaagctcaccttaaatgtggtctctaactggcctaatatcaccaacaaacatggaactgtgactgatagcaaaactcaagaaaaaagaaatctctttaaaataaagaatttctgcatccctggttgacatcttgattgcaacctcatgagatactccaagccagaaccacccagctaagcctctccataattcctggccacagaaaccatgaggtaataaacgtttgtggttttttaaaatataaacaagatgaatttttatcacatttcaaggttttccagattactgccaaacagtgaaggaattctgctttatctgagatgcctgaaggcttaggggaaaggactagcctggaaatgagaagacccaaactctcatcccagtctgctacaaatcagctgttaggctgtgatcaagtcagtcgctctttcaaagtgcatgtcacttgcataacttcgagactgtaatagttgatcgctaaattcttagctaagtgtaagagtctctcccttccgttatccccttatttttggatttcacttgtattgtgtaacttgtgcccagccctactgagtacactgtcaaatggaaactccttagacccaattaatcatgctagcaggtgaattaaaataaaaactagcaacacatcattcttttggtttacaaaacatgagtggagatttagggactgctggtttcttaaactcctgtcttctcctgatacttcactgcactgcttactcctaaaacgcatgacccaactccccatctctccttggcagaagagactaaacgaggtagctggaggcgtaaagagtagaaccttaaggttgcttctatgaaaaataaacacaacgcgaaagtatgcctagcactcaataggtttttaatcctcaatcgattttaatcaattttttggaaaagtttccgtgccacgttccagcattaatccgtaacacgaaagaaggcaggtgctaactggatagagacccgccaccagctaactgtgactgagaagcgcctttggggcccggactgacacgcggcgcctgattcacaaagctcagcgagaggttccaacaggaacccgtcgttcaaggagaaaacccaaagcaaccaagcatgccgaaggagcccccaagggatcccggaacccaggcaagtcgcgggaaaaggggccgttaggaggtcgccgtggccggggcggggcggggggtggcggcctgggcttctccaggactcggacagcgacttccaagcccactccccacacaggccccgcgccggtcccaggtgccaccaatccccgagtggccacgcgaccaagcctcagctgcgggcagctagcccgcacctccacgtcgatgtccaggaagccgccctccgccacctcgaagatgaggcccatcttggtgcccgaggtgacccgctcaaagaagcactcttcagcatgggcgtcgatgctaacgaaatagcccgagaccgtggccaggagagcggccagaagcaccagcagttcagcaagcgtcaccatggtggggctgaggccgaagccaggacccggactgcggcctccacagccgccgccgccgccgccgccgccgccccgctgccttctcagccaccgccgcctaagctccgccccttccgcctgcgccaccagtgggggctgatgcgggcgcagtggattggcgggctcccgcagctgccacgtaaagggaggcacggcagccgccgagggacaagcgactctgcgcggcccgagcctggacggcggctccgaaggaccaaaaatttttccctagtcctttctcgtccaagctaaagttcctgtggacttcccaggaaaacgacagtgtccggaagcctctgcaatgccctcttaggattgtccaagaagatggcgaaacatttgcaggcagcgataggagttgagggaatgtgcgggctgaaactaaggtttttttcttttgttttgtttcgtttttgagacggagtcttgctctgtcgcccaggctggagtccagtggcgcgatctcggctcactgcaacctccgtctcccgggttccagagattctcgtgcctcagcctcgcgagtagctgggattacaggcgtgagccaccacgcttggttaatttttgtgttttttgtttgtttgttttttgagacggagtctctttctgtcgcccaggagtgcagtggcgcgatctcggctcactgcaacctccgcctcctgggctcaagcgattctcctgcctcagcctcctgagtagctgggattacaggcgcccgccaccacgcccggataattttttgtatttttagtagagacggggtttcactatgttggtcaggctggtcttgaattcttgaccgcgtgatccgccctcctcggcgtcccaaagtgctgctggaattacaggtgtgagccaccgcgcccggccaatttttttttttttttattttttagtagagacggggtttcgccatgttggccagtctggtctggaactcctgacctcaagtgatccgccctcctcggcctcccaaagtgctgagattacagaagtaagctaccgcgccaggcctgaagccatgggttttgaggggtgtttatttgtttgtttgcttagagatggggtcttgatctgtcgcccaggctggagtgcggtggcgcgatcatagctcactgcagcctccaactcctgggcaagtgatcctcctgcctcagccaacccaatagctgggattacaggcgcgaagcccactggtttttaggtttcatgttgcctctcccaccccctctccttccaggggactggggaacggtggaggctcatatagacctgaaaggggcacgagggatcctcccaggttgctggaatctctagtatctttacctaggtggtagatacgtggatgtctacattttttaaaaaaatcaattagactattacatttttattttattttgagacagcttttcactcttgtcacccaggctggagcgcaatagtgcaatctcagctcactgcaacctccacctccgggtttcaagctattcttctcccttagcctcccaagtagctgggattacgggcgcctgccaccacacccaggtaatttttgtatttttagtagagacgggttttcaccatgttggtcaggctggtctcgaactcctgaccttcagatgatccacccgcctctgccttccaaagtactgggattaacaggcgtgagcctccacacccagcaactattgcattttattttactgtatgtatgtaataccttaaccacacacaaaaaattaccttgttcaaattttccagaattagaattctaccagttccccaaagtcttgctgtttctccatgccccttagcccttaccagctgctagagctgtcttttcatcctttgcaccctggcacactcctactcatccctcagaacccaaatgtcacctcttatctctaaaatgttccttgacatccttctgccaaatactagccccttcctctctgtttacaatgcagattcggtcctagtgaattactgttattttctactctgcctcactcatgaaggcacaagacttgatttacatacgctgtcctcttcaggccctgccacag

SEQ ID NO: 916989 - DNA, 4001 bp, Homo sapiens
ccttcaaagcatttccagcttcaagtttctttccccagattgtgatgggggcagagatatcttgcttgggcaaacagttataaggaaaatggggaacttataagaacatgtgtagttttcaaagaattaactggcattcatacatacagaaagagattagggacagaagtaggtattaacaggtgagaagcaggtaactcacgttcgctgagggcgcaatctctgatcactgtgtgggatcaaagccaccaactcatttacttgctctagaaaagagccaaacaattattttgtaaatcccatgtgttggcagtacttccttcacgtctcacttgagcctgccacaacaaatattcttctggaatgagacattttaaaaaatactagtgaaattcacatgttgggtctaatgaacaagaaacaagagagtgccacaaattataaaacatctatcagtgctgccagggtagtgatgtggaagttgaaaaacctgggatcctgttctggctttactgcatgggcttggcagagtcgtcgaatctctcaaggccatggtttccttgcctttcatatggaagctttggagtaaatgattttgaaggtcctaaccagctctaaatttctgtgactctccagctaaactgttaaagactttctgagggccaatttgttaatagtaatagatgatcctgtaccaaggctaagtatttgtctctctctcttgacctgatatatttttctgaccttaggctgttaaggattagctacccatttccttgaaaagcagcttccaagatggttcccccgcaaagctgtcccaatccttgtgacagcgataaagaaatgtgcctgtcaacaaatcccacaacacagagcgaactgaatgttccaaacctcaggaaaagaacaagagtggcggtaaagaaaagaaagggttggaaaaataaggagaggaagagaagttgcagaactgcccaagtgtattaagtcagttgagctggctcctgtccagggcactgtctctattatggtattactgcctagaagaaaagttgtctgggcagacaggagaactccgagggtaccttgggattctcatcagggaatcatccctccatgatcacctgttggaatgtagcctgtcccctggcacgtgagacaggtgatgctatctctcccggtgaattccacatatgggaactgagcaatggcttcttcctgctctcgttcagccagcaaaccgtccctgtcatcttcttgctttcgcctgcaggaggaggggcgagcagcagcggaatgctgagaccccatggccgtgatatgccactggtgtcatgtcctaagatgaaaagagggagtgcacgttagcggccccagtgaatcacgacagaaatcgcttgtttctataagaaaattaaaaacgcaaaaatgacaagttgccgccctgagtgtggtcccaacacctgtacgatttctatcgggaccctcattttgtagtagtgctacccactctcctcttacccgccacacacagccggcgggggtggggagggggaacggggcctgcctttcacgcacctgcctcgatcctcaccgccctgggacttggggcacccccgctcccacctggtccagcctcgccccttcctcttcactatttgtaagctctatgcccctcctcgagcaacaaacaggcaccaaattgataaccggccttaacgattcccattcctctccaccccccagccccaggaggcgggctcaggtcacgccccttggcaaaaagcgatgctctgagcccaccaaagtggcccaggcaggagcgaacgccagcgtcgcagacctgcagggcacgaactcccggcagctcctctccggccgctcccccgaccacctgccagcttgaggacttaccagcctcttcggtcggcggagcggcacgcactcagcgcgcaggcgccaaataccaagcccgccaggagaacgcgggcgcgcgctcgcgcgtgcgctcttcgcggctccggaggccttcccaatatcgcagctgtctggctccctcggttccggtagagggcggcagagagcgccggggagccgcgacccttgctgttgggccgcggtagtccgcggagtcgggatgatgctctgctgttcgctagataggctgggaaaggctccagtcaagtttccagagcaaaacacttctctgctgcgagaggaggaaggtgctgccggctaccgaagccattctgaaatattctttatagtacaggagctgtgtagtcgctgagggtacacacatgcggagcattcggataaactgcctttgcaaaaattgtaagtgagaaaattatgacagtgaaagagatctgacttacccagttccgtcttgcttctaacctccgaactgcccttgttcattcctgggtataggccaaactaactttgggaggaatttagtttatagttgaacttcgaagcaaagataacagcccttccccaaaacaaacccccttcttgcctggggaccagactgcctttgtaagactaacaaattagccacaagattagaaattatggtttaggagtcatccagacagaggtcacaagattccaaaccttccctattgctccaagggataacatcactattgtaaaatctaagatcggtgctggggatatttttcagaccctgcattctgaggcaccagctggcagtacctagaccagttatctggctcagccagttctgcaatcccacccaggaacagaaaacagcaagaagaacccacttagacccccctatgatttcatctccaacctgaccaatcagcactccccactgcctgatacctaccagccgaattatccttaaaaaaccccagtctctgaattatcggggagacttatttgagtgataaaactctggtatctcattcagccggctctgcatgaattaaaatctccattgcaattcccctgtcttgatgaatcagctctgggcaacgggcaaggagaacccgtccggcaattatatcagaacctgtcttcagtccaggaggggaacccagaggcttcatcagacccctccaatactgtagataaaagtgctgctggaagtctcacaagtcagaggggcccagcctgggggaaaccttccatggggagtcctgctggcttctcgcaggaacggaccccacagctgagctttgcaagccaattaggtgccaagaggcaccaaggagtagattcattcggtagtagggcccccccttccccagacctccacaaaaaaggcacgtacgtaagaggttagaaagcacttttcgttcgtttgtttgtttgttcgtttgttttgagatggagtcttgctctgtcgaccaggctggagtacagtggcacagtctcagctcactgcaacctccgcctcccgggttcaagcgattctcctgcctcagcctcacaagtagctgggattacaggcgcacacctccacacctggctaatttttgtatttttagtggagaccgggtctcaccatgttgaccaggctggcctcaaacccctgacctcaggtgatctgcccaccttggcctctcaaagtgctgggattacaggcgtgagccactgtgcccggcctagagggtactttttaatgggtgggtttctttgttcatactgccaggttgagcttagcctgcagcagcaggagttgagtacagacattaaccaggtgaaattattaaagatgatgctaggggagaggagatattctgaaatgggatgaataaggggcccacttggcaatagagagtgaggctgaggctggtgacccctcaggtttctgccacctctgtattttcctctttctcctgtggggaatgccaatgtacctgctgttgtctagccatctgcctgaccactggccacaatcagcccactgagtctttagtaagaggcaacaaggaccctctacttcccctctcacatctctgatccac

SEQ ID NO: 916990 - DNA, 4001 bp, Homo sapiens
gcggggctcccacaggctccatggagtgtgcagccccagtcacacctccctgctgcagctggctgccatcaatagggcaaactcaaaatttttcttaacttccccagacacattcacacatacacacacacaaacacacacacactttctttcaaaatttatatccaatcaaactggttgtccatgattggatcctgttatcactgttgactatttatacacatacattttggaaacatacaatggttaattatagcagtaagtcccttacaatgcattgtatatgttctcttacatgcatttgttcatcaaatcttgtgaattctaccctttaaaagtttgtcaattccatccatacttcttcagccctattatgtcctactgcatgaccttaacctcttccaactagactattgccataccccattaattggctttagtcccgtcttctcaattccaatccatttccttcattcctgagtaatgttgtttttgttttgagacagtcttctctgttgcccagactggagtgcagtggcagcaatcagggctgactgcagcctcgacccctcaggtccaagtgatcctgctgcctcagcctcccaagtacctgggaccacaggcatgcactaccacacatggctaatttttctacttattgtagagacgaggtttcattacgttgcccaggctgacctgggtgctgtttctacacacaaatctaacctcactctcctagttaaaacttctggtgactccaaaccctttagcttggtgagaccctttcgaatccgccccatggaagctcagtaataatcaatcaaaataaaaaagagcggcagcagctgttgcgccagttcgcctttacatagattcatctcaaccagttccccaacatgcctgtgcataattttcccattgttagaaatgccctgtttctctttgcctcatgcacgccccctcttatttcaaggtccagctcaaaagtcacctcctgtctacaacttcctctgatgctcctgagcagggatggctgaatctctgtctctttacaataagaaaatacggtctttttttttctttttgagactgagtctcgctctgtcacctaggctgaagtgcaatggcgaaatctcggctcaccccaacttccgcctcctgggttcatgcaattctcctgcctcagcctcttgagtagctgggattacaggcacgcaccaccacactcgcctgatttttagtagaaacggggtttcaccatgttggccaggctggtctcgaactcctgacctcaggtaatccacctgcctcggcctcccaaagtgctgggattacagacgtgagtcaacgcgcccagccggaataatattttacagcaattacactgcactgtttagatcattattcctatgccgcctcctcccccaacaaagtgcgtgccttcagcacacaacggtcttgtttctgcttattccgtagccccgcaggcaaagccagagtctggcacaagccagggaccgagtgactacctgcggaacagaatgattagaattgcgtctggggttcctggagggtgggccttggctgggcggatcccaggagcctggcgtctcccaggggaggcgctcacctcagatcgggcctaagagggccctgcttgccacactgaccgccaagcctggccaaaaagctcagggaagccgcggagccactgcccgcctgggtcagggtggtgacggagcctgactgagaataacggctgaacttgactaatagactgaccgagggttggagcgggtcccaaccaactgcctgacggcccaaaggcaggaagaaacgatggtaggccttgtcatcttcgaaggagaggaaggacagcaaacgaattgctatagcgtccccatgcgcacttggcgcttctcctcaagcggagcaggaacggaactgggcggacccgccggaagactcggcgagtgcgcgcgcgcaggagcccattttcccgcccgcaacgtggccccgcccttttacccaggccctacgcgagcttcgccgagtacgcgtgcgcagcagcttcccctccctcgccccgcccctcacgtggccccaccctctcaccctagacagatgggagcctcctggggtgtccacgtgagcgcgcgtgagtccgcccccccagtcacgtgaccgctgactcggggcgttctccactatcgcttacctacctccctctgcaggaacccggcgatatggctgccgctgtgccccgcgccgcatttctctccccgctgcttccccttctcctgggcttcctgctcctctccgctccgcatggcggcagcggcctgcacaccaagggcgcccttcccctggatacggtcactttctacaaggtaaccggggcgggggacgtcgcgcgcaggtgccgccggggcgcccggaagagcgcgcgcccgtggggagacgctggattccgggagctgacgggaggtggtctgtagcaacggtcccagagcttcccggcgtcctacaggcctagtggactctgagcggagaatgttatgaccaccgggcatgcacgcttcagggccccggcgcacccttgcttttgcagcatttatacttgcatccacccttgcaaagatgcagccgagggaactgggtgccccttcccttcacctgtggggagagggcggtgcctggcgagatccaaccctcgagtcccaagtgggagaaccggagggcggtgcgaggtcgacgccaccgggctcccggctgtggaagctgggaggggttggcggggggaaatgcaggcgcgttagcctgcgtgtccgcgcccctcttcccagggttggattgcagcctgctttgcagtgtgcaaacaatgatcagatatcatacatcttgaatagtgcaagcgtgaagaataagcttcagttcagccaccctgtaaagcaggggtccccaaccaccaggcccgtcggtggcctgttagaaaccgggccgcacagcaggaggtgagcggcaggcgagctagcactacagcctgagctccgcctcctgttacatcagctgcggcattacattctcataggagcacgacctttattgtgaactacgcatgtgagggatccaggttgtgtgcttcttatcagaatctaatgcctgatgatctgaggcgaaacaggttcatgtcgaaaccacccaaccccgtggaaaagttgtcttccatgaaaccagttcttggtgccaaaaaggttggggatagctgttgtaggaaacatcttggggttggcaacaaaatcagtaaaattgggtcaaggcatggaagaatttgccactacctccgcctttccccccttccatttttgcagaattagggatcctggcctgagtaaatggacggttggaaatggtggctgaatgcaacaccgcagtcccagtcccctcctcttgcacctgtcttcacccacgagcagcttttaacttcctctaggagatgggcaagcttagtgttgcgagagagccagtcatttcattttcaggttttgtactcattgtggggaagtgaaaccaagaagtagttgtctccagtggttgaagtctcctattttcaagcgttccctgtcgtggatttggcacttgcagctcattcaaggcaaagtttcaagaatttaaaagtgtaggccgggcttagtggctcacgcctgtaatcccagcactttgggaggctgaggcgggtagatcacctgaggtcaggagtttgagaccagcctgaccaacaaggtgaaaccccgtccctactaaaaatacaaaaattagctgggcgtggtggtggacacctgtagtcccagctcctcgggaggcttagacaggagaattgcttgaacccaggaggcggaggttgcggtgagccaagatcacgccactgcactccagcctgggcgacagagcaaatactccgtctcaaaaaaaaaaaaaaaagtgtgggctgggtgcggtgg

SEQ ID NO: 916991 - DNA, 4001 bp, Homo sapiens
tgggtaaacaaattgcttaatcaatgcaagtttttaaaacagcaactccaaaagcaaagtaggtctaggggtcctctgaacagagaaaactctccattgaaatggcaaaatatttatgagccggagcacattataaaattaaaatataatcactactatatcctttaaaaatgtttagacctccttttcagtgatttgtttgcaataaggaattgccagcccggagcagtggctcacacctgtaatgtccgcatttctggaggccaaggcgggcggatcacgaagtcaagagttcgagaccagcctgaccaacatggtgaaaccccatctctactaaaaatacaaaaattagccaggcatggtggcgcgcgcctgtaatcccagctactcaggaggccgaggcaggagaatcccttgaacccgggaggcggaggttgcagtgagctggaaatcatggcactgcactccagcctgagcgacagagcccgactccatgaaagaaagaaagacagaaattaaagaaaagaaaagaaattgccatgatcatattccaaacacaatgccaaagaaaaacacatttaatgaattaaatagaattcatgtgaaaagtttattttttaatgacagcttaaagaaacttagataaaactgacaagagccagtttctcatcacacggatcagatggagggtggaataggagggataaatgcctgagacaaaatgtcaaaatccataattacttttaaactataaagacttgggggataaaagaaagtatatccatggtcaaatgtcaatactttacaaaaaaaaatggggtttacagggattcaactacttttatattcaataaattggaagaccttgtttctgaagccaaaacaaaaccctgtagcttcctagaagtccttccttggatttcagacaatacatcatttataattgggggcaatacatacccttatattcaacatacttttactcattttttttcctttttggttcctgataagcatgtgatgtttactcccgtgtctctctctctctcacacacgcacacccacacacacatacacatacttcattgttccacagagggtagaacacacttgtgggcctgtggcattttcaaaaataggaatgaaaaaaaatagttttatttagtcacgatgaagttagcaaacacccaaacacccaagtctttgtttttttcccaagaacaacacctacgaactgcaacctgttaatttaattaagaaaaatagggcttttactcagttcctaggctaggaatcgctgaagcaaggaaagttcaaggtctgctctcccgccgtatctctgcacacacactggagccgggagtttgaggactcccaccaagagcctttcgcccgggagtctcctctgcccttagccagagggctggcgcgtcccccctccctccttgacacttcaccctgcctctttggctgccatccccaggaaggcaggagcagaggcgccggagaattcgggggccgggccggggttccgcggctgcttccgcactcgcgggcagtgacgaggtggcagccgggacacgggcggcagggccgggagggctccgctgcggctggaccgaacggctggggaggctcgcccaacgcccgggcccacgtactcacccgaagggtcgcgcggggcgcggggcgactgcacacgggattcgcggtcgagcacagccctcggcgcgccggcggcctcgctgggaagcgcggcgagacgggccggcggcgtcgctgccgctgctgctgtcacggagctataaataccggctcggcccacacccgccgccgcctacgccgggcgccctccgcgccggtgcttcaccgcgccgcgctcccgccgcaaagtccgcggccgcgggccgggcaacgcgagcgcaagggcaccggcgccgcgcaggtgaccgcgatcatgccagctgtgtgcaacctctgcagctggaggcatggcttctccccgcccctgccctctcgcccgcaccacgggctgactccagcccgcgggccgcgtgcgccacgggccgagcctgcccgggccggcccgcctctgcagagcggcagctgcaggcgagggacggactcaggaacctggtgggggttggggggcggctgacagaaaatccaccatcctgcagggaaccaatgagggtcccactggaatgtcctcgaagagctacaaactttcgaaagcaatctcaggtcgcaaaacatgatttctgtttttgtctgttggtggtgtggggatgtgggggtggggagaggcagagcccatgaggagtatgagaagtcttccacttactttccaacctgcctggtatcacacacacacacacacatatgcacacatacacacattcatacacacatagagatgcacaaatacactcatgcatacatatgtatacacacataagcacacgtatacacatgcatacacacatatgtacatcagcacacatactcatgtacaatttttaaagtttttgcagtctgaggctctccggagcctgtcattctatgatacctaaatgatacctctgcggcatagggcaggaagaccctttgactacatctgaccaattcctctcttcctgaatgtaacctcctttccatcatgtatgtgtggcctctgtttccttccacacctaatagcaactgctacctcagtttaccggttgctgaaaacgtgttaacagctgctatccagcatgctaatattttgtggtaatggaagttatcactagtgtatataatcaaatggaaaataggatttctatatgcccatattagcaaacttatgaaggcagagctaggccctcccctgtactggtagcctgattcaggaatgggtggatggcaagagggagaactgagatgtccgcggattttaagatgggatggagagagccatgcccaagtgccatagggtagtttatctgcataggcataattgggaattcactgccatacttcccactaatttgacatttttctagcttccaaaaatgaccacgtatatatggatatatataaatatgcctctcatatatatgagagtgaactcaatccactgcataatcaattgaactacatgggtgtctactaaaatgagcttcagttcatcagaaccgaaatgtcattcagcagcttgtcttctgtcttcttaagaaatagaacccccacatccccacaccactggatatatagtagtcaatcatttgtgatcattttacagaactcttaactagtaaggttctcttttgtaatgctttaacaagttttgccagaaagagttgttgcctatgctagcacttggtacattttactattacacttttgttgttcttttttgcaacttcttttttctcccactacgctatgaactcttcaagggcagagattaaatcttactcatgattgtatccttagtacctaacatagtaagttatagtaatggctcatagatagtggattaattccacatattagtcattatattccactgtgcttttataactgtaattaatattattctctaaagaatttttaaactgttacacgtgggtaactgtttaacaaaggttccatatgctatattttccttgtatctccatttaaagcaaggactcttcagtcagttaaaactgaaaaatagtaaagcttcacaaattatacagaatactgaggtctgtaatttatttcttttattactactattttctttgagacagagtctcactctgtaccccaggctggagtgcagtggcacaattatagcctactgcagccttgacctgctgggctcaagtgatcctcccacctcagcctccagagtagatgggacaacaggcacacaccaccacacctggctaatttttgtattttttgtagagacagggttttgccacattgtccaggctggtctcaaactcctgagctcaagtgatctgcccacc

SEQ ID NO: 916992 - DNA, 4001 bp, Homo sapiens
gtgcctggtgcgaagtagctgagccccgaggaaagatagggtctggggtagctgaattccttccctagccgaactccaggttcagccagcaatttcccaccctgagtcgacaaatgagcaccatcgccggatgggaacatgcgctcactgtctggtccggccgccacccagtgaaagaccaaccttttcaccccgttcagtgaaacctctttagctctggccgccaaggaatgcagaaccaaacacacacatgcacacacatacacatacacacacatgcacacatacacctacacacacatatacatacaacacacacacacacacacacacgaagtcagaggcagagggcaagaaaggagaacacacaaactgccactggctctttaaggctgagaccctgactctcagagtcccctgcaccccacaacccctcctggcttccagggaaaggtgggggcaacgtatggaggacccagccccacctgcagtcagcagagcctcaaaaaagatggttgtgtggccctggacggcccctgccctctctgggcctcagtttcccatctgtggaatgaagcactgttctgggcagctctgaagtcattattctgcctacctccccccggaccctaattttttcaaggactcagaatctaacaggccattaggagctggggtcaggcccaacgcctcttgcttcaccttagaggtaactcaggtccagagactggaaacagcctgcccaggtcacacagaaagtcaggggtgagcccagcagagccctggacagagaagcctgtcttggtatatcccagaggaggtcacttcccggctatgtgtccttgggctgggcatgtcacctctctgagcctcggtttccatatctgtacaatggggataagagccacctccctggactgctgttaggacaagatgcggccatgcctggtgcacagtgggtgccaattagcaggtaccacgtgattgcccaggactccctgcctggggacatgtcaggcagggctggccgtgtgtaagtgtggcaaatgccctaagatggtcctgagtctgtggaggagtgcagatgcacccctgaggcctgggggccccaagacttgaagctaggggaccgggggctgccccacccccacccagagactggtggcctttgggggaggggcggcccacggaaacctggcttcaatcagtggccttgtgggggaggggtgttctggttggagcactgcacatgcccccgaccccagggccagccaaggacagggacctgggccctggaggtctggatggggaggggggtcctgggggcacaatccccctccacacacacacacacacacagagcagcatggacacacaatataaagacacacaacacaggcacaccgactcacacagcactgagacacccaacagcactctcatggcccatgcacacaatacacagagaacacacacggacacacaacacatatacatacacaaccccctgacacacagccgatccctgcacacaggacaataccgtccacatcaccctcacacagatcctggaagcaacagcctggcatccacttgcagaaaagtggaagcaacacaccccctacaccaaggccccagccgcacacacacaacactccggcccaccctggcccaccccagcaccgcacacgggactcagattccaccacactcatgcacacaacaccaaacacacactcaaagcccacacacacttagagaggccccccagagtgctccaacagtccccagtccctaagctccaagatagctccaggctctcaggacagaggaggggaccccaggactcaccagttccttggcgtacaggactgggtgctcccgccgaatggagcgagagtggggggcacctgggctggaagagagagtccgtgctggtgcccggggctgctctgggctggcgcctgcccgccctccctcctcccgtccctcctcccgtccctcctccttcctccctccccggctgggccgcagggccagcttgatttcattaagagggtttggggtggggacagggggaggggaggggctactctcgggccacacgcaatcccacccttgctcacactctcgctctggggaagaccagatgcggcacttcctccctgacctcgggtccccagggcaggctgagacagacagacaaggctgtcctgcagcgctcccccagacagtgagctggggttctgcccacgctgctgcccaataccctccaaaggggacaagctcagggaggttcagaggcctctggaagtgggaaggaaaattccccgtccttgtgtggctcaggcttccaggctcagggtgcagcgtgggagctgggattcgttttagagacaggcctgatggtgggtccgagcctgagacagggagcccaactctgcccttccctctccagacctcagtttcccatttgtagggatgggtgggaagctttctgggctacctctgactctgatgttctgggatctgtggcctcacaatgcccccaaatgatagtagcttgaataggagttggagccccatttcacagagggggaaagtgaggcagggtgagttctaatggttcaagcagggtcctgaggtgagtcagtggcaggccttggaaccgggacgtctggctgacctgaggagtcctgtggattagcagccccttgcattcattcattcattcattcattcatgcattcattcggcaagtgctcaatgaacacctgcagcaggccacgcactgtgctaagcaagttccagaggtgaatcaggcacagcccagccttggggagctcacagactaccagggagaaggacaccgaggtaaattacttttttgccaaacagaaaggggtcaggtcaagggctccgagaaccccaagacagagagatcaatcccccaagggaaagaggtaggaagccatcctggagggcatgcctgtgtatgagcagaagcgggcaaagcaggccctggaaaggcattccgcatggaaggaccagcgtgggtaaaggtatggtggctgggaatgccaccacgcacaagccaccgcaattagattaggctggagcatggaccaaagagaggatcatgtagtaagggtcagagatgttgacaggagccaggctaaagtctcggaaggtcggaggcagtacggagccagtgagggtttggaacaggggagtgcatgaaggatgagtgcgtgctctctgggtaggaaccaagcctagattatcattgttccctgcaatggtcccagcagccctcgctcacccccagaaaactgggacagtcatttgcttgggaaataaaatcagagactttcccatcttctctggaaatcaccccaaaccctgcatcttcgagggaacaggggaccatccaccaatactcgcacagacacattcatgcacacacatgtcccaggggcaagtggccacccacagacatgttgtagcagctgtgcccgctttaaggtggccaggggtgttccaggcctacctgacctgtcttagaccagacatcgggtggtcaggggcagccaaacctcccccagggcccaccagcaggggaagaagaccttacccaacattctgagggctgcagtctggggaccttgggatgtcgaggagcagggacacaaccaacccaaatagagcctgctccctgcacaggtggccccagaggcccagcctgagggaagctctcggagtccccttcccctcgttctttgcttctccctcctgggcagagcatccccctgaaggaggggtagtaagtgttggagacattggcaggagctgggctaaagtattggaaggtcacctaggaggcagtagggagtcaatgagggtttggagggtttgttctgggatctgtggcctcacaatgcccccaatgatagtagcttgaataggcgttggagccccatttcacagagggggaaagtgag

SEQ ID NO: 916993 - DNA, 4001 bp, Homo sapiens
ctgtctctactaaaaatacaaaaattagctgggcatggtggcgcgcacctataatctctgctacttgggagactgaggcaggagaatcgcttgaatccgggaggcggaggttgcagtgagccacgatcgtgccactgcactcaagtctggtgacagagcaagactctatctcaaaaaaaaaaaaaaaaaaaaaaagaagtggctgagggccaggcacagtggctcatgcctgtaatctcagcactttgggaggccgaggtgggtgaatcacctgaggtcagaagcctggccaacatagtgaaaccctatctctactaaaacacaaaaaaattagccgggcacggtggcgcacacccgtaattccagctactcaggaggctgaggcagagaatggctcgaacccgggaggcggaggctgtagtaagccgagatcacgccactgcactccagcctgggcgacagtgagactctgtcacaaaaacaaaacaaaacaaaacaaaacaagaagtggctgagtcttctccgtgggagtggagccaaaacagtcccctgagaaccggatgggacccaggccctagaagagaaggcatcaacctacacatgctggacaggtcgagatgtgtctaggtcccttcccctctattcatgcctgaaagggcacccccattcctgccccggctctccagcaaccctctgtctattgatcagaatctacaaccacgtgtctagaaagacccatcagagacacccttggcaacctcctctcccctctgcacactgtaggaggccaactgaactgcagacaagaggtacatggacagggacaatgtcactgctccaaatgagaggactggggtgatagtgtgcaatgtaatttcaggcaaagccaaccccccgaaaaacaatcccgtgactggagagggaacagccctgtcttcaaaaatagtcaccgagtccctcttggtcaaccccaaggtttcctgaggcgtctctagtcaacacggtaggtagctggggcctctctgaacctcttagcaggaacaactgctgccaggaccgctccccacacccagcagcaatgccattctctcaggggacccccgccttacacccgccctcactccaccccgtgtaaggctccgggccagaaggatagagctgggagtttcccctatcactgggtgaggctactcagctgtccgaactgacagatgctctccacgccaaaatcagcctgcagcagcgtcagagcccccaaagacaggaaataggggtccctaatccccaagcacaacctagaggttcaaggtgaacagctcttaagtacacctcccaaaacagagctgcaggatagtgctgccccgccagagcacggggtgggagctgagctaccaaaagcagatgggagggggcggggtgagatctggggagaccctgcagaggtgggggctgggctgttctctttgaaccacccccacagatgaacacgcctggaacttgcctcagaggccacagaccaactttctgcagcgaagggggtgcgtggagcagagagccagtgggagggcggcggaagagggggctgcgacccggcgccccacgtggacgaagagctgaagcgccgggtgatgggagggggctggtccatgcctcccgtccgcccccagggcctctccggggcactccctaggccctgactgtccccaccgcccgggccggggggctcaggaagggcaaggcgctgcaccgcgggcagcagagttgcgggaccaggtggcctggccctacctgcagttcttgaaattctccctccagctcgtgccattcgcgctcgcaacgctccagctgcccggacatgatgcgatggtgcaaggcggcggtgccggcggctgctcccgcagcgctgcccgaccggccccccagcgccccacgcccgcgcgctcgccgaccgccctcggaggcaccagctgttcctgcgcagccagagccacgcgcgcaactgacgtcacggccccgccccggcgcccgccccgccccacgcctgggaggcggggccgcgcgtgcgcatgtgccccgccccgccccgcgtgcggcgttccggaccgggacatggcaggctcgcaaggtctttcggggtctgttgcggcccccttggcagtgcctctgcgcctccagaatctgtctcttccaggaagagttgggggacttgtctgcaggttgcatttgcagagattatttgacttagattgtgtgttttgggggtgtctagagtttggggaaaggagatttgggggaggtgaaatgaaagctcaccggcccctggtcattgcctgacttgagcccaggccagcgccccggaaggctggcgctgacatcgaccatccaaaaaggtcgggggccgggcggcgcagcgcagagagggcacggtcatttcacgttgtcattattatgtgctgcagctaatacatcctagattcctgccctctaacgctctgggtgacgttcttaacagctgtttctgtcgctcaagggacaaccgcctccaagctgattaaatccagttctgtcccctcctctgccaagtcctgcaagaactgcccctgcctagctttccagtcccttctatctcaccgccctggactcgtaccctccagccattgctttttctcttcctgaccttgcatggaactttcttccctctaaatcttcatacgatgtgcctttttttcatcattcaggcctcagtttcaaatgacacctgtgttactttacttttttatctttcttttttcttctatttttatgggtgtttttttttttttctgtcgcctaggctggagtgcagtggtgtgatctcagctcactgcaacttccgcctcccggaatcaagtgcgtctcatacctcagcctctggagtagccaggttataccacatccagctaatttttgtatttttagtagaggcggggttttgcagtgttggccaggctgctctcgaactcctgaccttaagtaatccgcccgacttggcctcccaaagtgctaggattacaggcatgagccaccgtgcccggccccctgtgttcgttgctaaagctgccataaccacaacctgggtagtttaaacaatagaaatgtattctcaccaacgggggcaacataaggagaccttgtttctacaaaaaatttacagattagctgggtgtggtggcacgcgcctgtggtcccagctactccggaggctgaggtccaagaattccttgggcctgggaggtcaaggctgcagtaagctatgattgcaccactgcaccccagcctgggtaacagagcgagacccagtctcataaagaaagaaggaggccgggcgcggtcgctcacgcttgtaatcccagcactttgggaggctgaggcaggaggatcacctgaggttgggagttcaagaccagcctgaccaacatggagaaaccccatctctactaaaaacacacaaaaaaattagccaggtgtggtggcacatgcctgtaatccagttactcaggaggctgatgcaggagaatcacttgaaccagggaggtggaggttgtggtgagctgagatcgtgccattgcactccaacctaggcaacaagagtgaaactgagtctcaaaaaaaagagagagagaggaaggaagggagggaaggaaggaaagaaaaaaagaaaagaaagaaatgtattgtctcacagttctggcatctagaaatctgagaggaaggtgtcagcaaagcagtgctccctctgaagctctgggcagaatccttccctcctcatagcttgtgggtgtatgtggtggcggggggctccttcactggcgttccttagctcgcagctgcatcaccccaatctctaccctgttgcaccgtcttctttcctgtgtgcatgtctgtgtgtgtcctctcttaaaaagacaccctttctggccaggcatggtggctcacgcctgtaatcccagcactttgggagg

SEQ ID NO: 916994 - DNA, 4001 bp, Homo sapiens
gacaaggttgttgccttatttcattttctgcaccctaagatcatggatggggcctggaacattgtagacatgcaagaatggtgcagagtaaatgagatgaagtgggctgtccaggatcatacagctggcaactggcaggtcctgggagcccctctctgcccctcaccagcactggaagtcactctcagcccccacttccaaaagatctccctagctcagcccttcaagatctgatcatgatgctttgcacttggctacatttctttttatcaattcatttcaagcaggttcatctggcctccatgattggaccttggctgggatgtgacatttctttatctctctctgttggtttgctcagcgttcagcctgtaactgactgaatgtccaggcctcccagccagtgtgggccttggggcagggtgggcagaatggggatcactgcactgctttctctttccatctcattcaacacacttccatcgtagaatcttaacatcttggcactgaatgagaactcagaggtctgatctgtgcccacttagtggagatgtaacccagagaggacaagtcactgtcttaaaggcatagagttcacactgaaggtgaggttaaaattcagacctgccttggggccagcaatgttatatggtgggctctgagcaggactctggggacacaaagtgagtcagagaggcgatgccctgcaggaagcccaactaagtgaaggagactgactcatctgcaaaatattgtaaaatacaatgattaggacagtagggtttgcacagtgcttataagatgccaggactcagtggctgtgttcagcccaacccaactacaagaagggactgatacccatcttaatttgagattcccaggacatctctgttccaacaggcctcaatgacccccataacctgaccttatctcactccctattagatggcaccagcatagagcacagacaatctctggaatctgcttggtaggactcccatatgaagacaacaaaatattcttacccaaggagaaaaagccctgtccaaaccacatggaacaaggtttgattctacctttatagtcaagtgttaccaaaatgttgccccttatcaagactatacaagcaatgcaggcccaagattatgatttgattacaaagtttagcatatgtttatctgtaggatgttttcattttggcatttatttcatggcatagggagatttaaaaagcaccaccaacatttgtaagcctaggaaaatatctaggcttacaattcatcaaatggtgcctgagaagggattgggcgttgatgatctggtgaaatcccagcatatcatgctgcccagccccagttctgactgcactccccgaacctactggagaaaagcgctgttaattaggtgccattggcacaggtgctcaagccacaagcttaggtgttcagggtctgtacataaattagtcaaagaaaagataaacattttggcagaataagcatattctcaggggagaaagagagaactgcagggcttgtgttttctaaacttgttttgaaactataaaaatttattttagaaaagaaatgtttatcaaatgaatgctctgaattgtgaactcaaggtataaaaattgttagctgagcatttttgtctctgagactttgagaaaagggaaaagtaaatacaaatgatgtcctccccaccacttgctccagaatgagagcagaaaaaaggtttctggaaaggcccaagctgaaaagacatggcagagcttcagatctgttcagtgctacccagagaaggctggacacctaaactcacactcaaagtggagatttccagagagagacccagcaaataagaacacagtcaggctgagcaagtcaccgaggaaggcttgatgtgaaagcatggcctccacgcagtctgcaggatctacacctttcttgactgtgagtcctttccagcacaggaaaggttggttggaaacctggctatgaaagttctacttctgtgtggcctcagacctggctcccatggtgacttattgtgattcttactttaaaagactctgctttgtgggaacctttgatttacattagcaataaattaagataatcacatctaacatactattccagtgtaacttatctaatgcaggtaatctcatctaacatatctgtaatagaattcagtttaaacatgtaattaagccatatttttcagcacaattggcctgggatggaactttaaggaggtctggtgggagttaactcaacaactaaatccctgttgagaacagggaggtgacctaaatgaggaaggtgggtctgctgtgaatgacaggacatgggactgcagggaggacaccccaagccctgctgaaagggacctcagctgagcccactgctgccatgtgggaatgcaaggactatgttcagagagatcctgattcttcaagagaaatgggaaatctagattcttagtgatacaatattggcatctaagttatatatagttttaaagtacttttctagacaaatagagcgtgtctttgggaaatatttgtctcaaggcctgtcattttatgatcacgtcatcctgatatgtatagcatgatgccagaggaaaggtaggaaagtatgtcacccttcgaggtccatatcttgtcctcattaacatcatgctctccattccttattaaaaacttttgctggttccccacagactctaccagaggtaagaaataggttcatcttgctggccaatgcaaatcaagtcatagttgttactcaagggagttctgcttgagaaggaatctgggctccagcatgaaggagtgctgggattgattaatgatgtctactatgaccacatgctagggagcagtgtcttaccacatgcatgtcttatatctgccactgagatccataaatttggtccacataccttagcagagttttgatggtcttcaaatctccatctgtctttctaacctcaagccccgctcccatactcccaccaacatgcacctaacactcaaactcccccttccctctactcaaagagatcatcattccttacattcaccttgcttttataattcttgctcttatgttcttctctgtctgaaatgccctcatcattcttgtctgcctcctgtgcacccctcaagacacggctcaaacatcaccttctccataaagtcttccccgtctctccaatagtaacactcatgtgcccccattttacttttacattttacccatgtttacaggaggatttataaacgtgacccattcaaggtcataaatcaggtcttaattatctatgtgtctctggcacacctggcaccacaacagactcaaaatgtatttatggattaatggaatttatttattaatggtgatttaacttcttatgaggtttgaatcaatggcatatcttgggccaagtctcccaaagttcagttgtctgtgtgatatggtttggctgtgtccccaaccaaatctcaacttgaattgtagttcccataatccccacatgtcattggagggactcagtgggaggcaatggaatcattggggcagttactctcatgctgctattcttgtgatagtaagtgagttctcacaagatctgatggttttataaagggcttttttccctttttgcttgttacttctccttcctgccaccatgtgaagaaggatttgtttgcttccccttccaccattattgtaagtttcctgaggccttcccaggcatgctgaactgtgtgtcaattaaaactctttcctttataaattacccagtctcaggtgtgtctttattagcagtgtgagaacagactattatagtgtgggactcttacagcttttgtcatgtcttcagatcttaaactagtttgttttatcattggagaaagacagcacattaagctggtttgaagtgataatatgcatattttgtgggtgatctataacatctgatctctc

SEQ ID NO: 916995 - DNA, 4001 bp, Homo sapiens
aggtcatgtgaaaatgaagtgagagactggagtgatggggccacaagccaaggaatgcctggagccaccagaagctgaagaggcaggaaggatcctccctcccctagagccttcagagcaagtgtggctctgccaacaccttgattttggacatctgcccttcaaaagagaataaacgtatgatggatgccccaggagactaacacagtagccgaaggacacgtggaatagccaggtcccatttggggaagaaggctcccagcagaggaaacagcatgggcagaacacagaaccctgctgcagctgcaagggtgtggtggctgggcaggagtgagggcaccgtgctgggctggaaagggaggaaagggcacatccttcagggctggcggaggccactgcattgtgtttggactttatcccagggtaatgggaagccacctgagtgactgaggtcccaggttcatggcaccacttgatataacacggttaagacatcactctgctattacggagaatggactaaaagcaggaaaggccaagacagggaaatgaatgcgatggcccagccccaagggcagggtgactttgttttacaaacgggccaaagacggtccttgtagactggccccaggtttacttcttcagagttggctagggccatccattctccaagacccccggtgccaaaatcaaaattttacacaacccattgttttaaatgtagcccaaagaagcagactcttagctatgtagagcccgcctgctttatatatcctgagaaactgcacccagcatctgccagccacagattttttttttaaaaccttggactatagaagaccccaggcagctgctgtcccttggagccccctggcccagaggcacccaatggtcctgctgtgtgacctggacacttaagccccctctctagctctccttttccccaggagttccttcttccttcctggttggctggtggcccaggtgatggccacagtctctggaaggtctcctgctatgggagacgtcccccgcatgcaacctgtcaacatactgcccaagtaaaaaagctcactcttcctgatcaggcctgaaatcctcaaactcaccgcagcctctactgcagaaagggccaccaggatggagaggaaatgaagagattctggtaggacttggacatcaattagctatgatgggaggggagagggtgctgagagagggaagaaaagacaaagaggcattttgagcttagtcttgggcacaagggtggacccgtcactgggacaagggaggtgggtatttgggagaaggtgctgagctctgcttgggacgtatttagtttttgatatttgtgggcccccatgtagaaatgagttagatgctgatgctggagctcaggagagacctgtgagctagaaggagatttgggtgtcagcagaagagaggtggtgacagaagccattgggaaaagtggcccaaagagaaacatgcagagtgggaaaaagaggagggaaagagagccttggtggagagaggctttggtggagagaggttttggtggaaaggtctagcagggggcaagcctgcagagaaggctcagggggcatccagggagagagagagaagggaaagcaggtgcctgtgttgttagagaaggcagggagaccctgtgcctctgagctgcaaaaaagccaagcctggagaagtggcccctgcatgtggcaatagctttggcagcctcggtggacagtttcaatagtaacaaggtggcaagaagcacaatgagtgagcaggacaagaggaaggggtgcacggagaacaggcaactctttcaagaagtttgctgcaaagggagaatctgaataggacataggaaaacctccccttgggtctggtcccatccctgtcctggttgcaccaggccattcccttccttccgacctcccccggtgcagacagcagtggtgtccattctggatgctgcaccaaacatttcccgtagagtctggagctgaggcgagggcaccaaatcttcagctttattcaacaccccccagttcctaattcccacctccccccatcaaacagcattaagccgatgtttactatacaggttgccaggacaacggaatgtcagagctcatgtgctccattttgagctcatattgtcttcattggaaacaggtcaacaaggagggcaagtgactttttcaaccaagtctggaatactgacggggcttgtccagcctgagaccagtcacttcggaacagagtaattctcctccccaaaagcaatcaatagatcacacaatgactcttctgaagctcaaaggcacggggacaggacaagtgctgagctcctcagagttcttttcttattaggcatttgttggtcgcctctccagtgtctacagtcttctctccctttgtggagaaccttgatttggtcataactgggcatgtgacctagtgccggccattaagggagagagagagactctgggtttgtgcagaggctccctggggtgtccccctctccctgtgaacagcgtggtaggaggctggaggcccaaaacccccaaatgtcactgcactacatggggagctcagagctgcagggccctggagtggggtcaacaccatgaaaagcaaaccaggaagtcaaagaaactcggtcctcacacagtccaagctcttgggtcaagctactacatctgatatgattgtatagccacagctcattccatgagacacaagagagaatccacagcatcccatgtgatcctatgacctgcagagaaagaagaactctcactagaagctagtaagccagagagctccacctgaaaagttggaaacaacaacaacgacaacaaaacaaagttcttagaaacagacacacacacacacacacacacacacacacacacacacacacacacacacagggtgggaggcagggaaagaatgcaagaggtgaacaccttcttaacataaaaatgagccaacttcagatcagaaaaatggaggccccatgtttccagagttctccgcaaaaatgtcaaatctctgatcaataactttcaaatgccacaatccgtgcgttcaaataattctttgaaggcttagtaaataaatatattgacaaacagattaattgctaatcacttctccgatattgtcattacttccaaacagttagatccaaaacaaggcagcttgcaccagaaagccttcccatttcccctgggcgctgctttgaaggtcctccgctcctgcctggtttgaggctgctgctcccatggccatgcattctaggggcatcaaacgctcctgttttgatgagaattcaaaaggtttcctgtcagctgggatgctgtgcttttttctgggttttgtgtgtttgcgtctttaccttacccatatgttctgggcctgtgaaaaatgtaagcaactggcagatgtgtcctgagaaatcgctggcatgacttattcaatttgcaaaaattgtaaacacaatggaactggtgcctcaggctacatctaccccttgttatcagctatctcagtggaaacaatgccagaagagctctctgttttgcgttgcaggcaggtaaccactgtctacaccaaggggcccagagcaggaactggcccaaaggagttttgtttgagccccgttgaagttggactgttttcccccaaaataagagattgccacgtccacagctcacctttcaagctgataagatccaaagaccagacttttggagtctagctaagatagctaagggaacacgatctcagttgtcactctagggcagtggtccccaacctttttggcaccagagaccagtttcatgaaaggcaagttttccatggatggtggagggcagggatggtttcaggatgaaactgtttcacgtcataaggggaacgcaacctaggtccctcgcatgcacagttcacaatagggtttgggctcctatgaggctctaatg

SEQ ID NO: 916996 - DNA, 4001 bp, Homo sapiens
gtaatcaaaagtaaaatcctctggatacacacacacacacacacacacacacacacggaatgtgagccttaatgaagaacagtccacacttgctttaaagggaacatccagttcgcctggttaaattctctcaagggcaaggggtgaaaacccggaggaggtcggtcacgccctgctcaattagcaccgccttcctctgcaaagtgctttactacccattcagtcattttatcaacaaaaaactgctgggaggtaggttgggaagggaattcttcaatggccactttgcatctaggaaaactgaatcctagaaacgctggaacctagagctaattaacagcagaattcaggcaccagatcgtgactgttgactctttcaaataaaatagaaaagtgcccccctctcctactcctccacccccgacttgccccccctttccctcgtctctcaccccctttcccccctctctcgccccaccctctctttccctcttctctcactccttcttcccccccctctctcaccccaccctcctccctacctggagctcttggaagaaaggaacacttatataaaacatagcaaacttgtctggttggtgtatctgggaaagcgcagcctcaaggaaagtagatttttctggattttcaggcggtgcagaatgacttttgaaaagcaaacgctacttttaaacctccattgacaacttgtctctctgaacgcatttctagctcagcctcagagcattaggcgggagaagggtggctttgagtgttctctgctcagagcctggggccgatactggacccgcggcgccgcgcgaaggctcagggcacccatgtgcgcacctccgtttaaccaaatgaacccgagaccttcgccagggcgcggggagcaggaaagcgacgctctcctttttctacgccctgggcgcgccccgggactcgggcagctgctgccctggcagagcctaggccttgctccccgcctgccccgcggctcctggggctggagaccgcctctccccgcccttcccgccgccgcatccgcgcggccactcggccgcacacgcacataataaaaaaggtcggaaaaaccacacggctacctttcgtgagccctgcgggcgccatacgttaactcctttaaattcctccaacccaaagcagggccgtcactcccattgtagagaagaggacactgaggtgaaggagccccggacaggaccgctggtgaggtagttcccgtcgcgagggacgcacccacctccccatccgcgctcccccaccgcaaaggactcatttgagagaacccgcagagagcccctggtttctgccaagctggggtccctggtgagctgcgcgatgagtgagcgttcctctagggcccgcacagagaccctagcggttgcggaaaggggatgcaaagaaccgggccttccctcctggagcaccagccccacagtgccgaagctgtggatggggagctgtggacagggagcacacagccgggaggaaggagcgcacagagcggagcacctctcctggatgccagttccacagggtgactgtgctggggctggggcaggtccgcacggaactcagggatggggaacaaacaccgtgtccctcagccacgccccctcctcatccgcggggcagctctgggtctggggggtccggggtgggagattcgggactcgggaccagcctaacttgcccggatcccggcgcccagctgggagcgcccttctggattaggggcggctcggcacccgcagaggcgctgttgatgggatccgagcccccgccgaggcccccgccgcacccctcgcttcggctgccctcaccccgagctcccccggaaccgggaagttcgcatgcgtcggcgcgccaggcacccgccccggccttacctttgcccagcagcgcgcccagcagcaggctcagcgccccgcacagcggcgccgccggcccgggggccgcaccctcggagcgcatcctgcgtcccggccgctcacgcagcccgccgccagcccgaagcgcagcgcccgcccgcggcccccgccggccgccccatgcccggggccactcccgcagcccggtcggccgggcccgctgcgtctctgctgtccgaggcccgcccctgccgggtccacgccgccgcagctccggctctggctctggcggctccggctccgccgctgctcgcgctccggccgggacaacttttctcccgcagcctccgcagcctccgcagccgccggcccgccccgcccccggccccgcccccgcccccgcccgggccccgcccccgccgagccccgcgaccgcggacagattgagggtgcggtaggagagagttcgcctgcccgccgggaggggcggcagatggagaacccccccgcccgggctagggagggtgtgcccgggaaagaagaccgggagaggagggggcgtctccccaggcggctgggacggctcctccgggggtccgcgcctttccagagaaactcagcgttcgcagactcctgcccgggtgcccaacggacagcggcccgtggcccggagggtcctgcccagggacccgacgctcaaggcggagctggactccttctccccaccctcccgtggtcactgcgggacctggtggtcgtcacgccccattcctcaacttcaggtggccgctgctttagcctggagggctggggacatctggaatgcaaagtcccgcgcagctgctgcggggagagctcctaactggatcactgagcgcggaaaagcagcgcgcagcggagcgtgaaggcggggtgcgggctcaagacagatgcgggtgtgcacctgtgcgtgtgcggagggggcgaggcacgagatcacagcggtgtctctgggaaggggacgagaacgcagaggggaagaaaggatcatttttcactgcatgtctgtggggcttccactccccaatcatctccccgccgcccatagcatgtgttttattatcttttcagtgggtggagaatagcccctctctagacttgctcctgcaataggcaatttctctgcagactcagacaaggaagatccgccctcccccccccccccccgacttcgttctctctatcttttccctctgatttctccagggctggcctccctcatggtggtgatcccaggtgatctcagcggcttccctgtgcggttcctgatgctcatgctctgctctttctgccacgcgtggtctgagcagtttgagggcgggaccccgactccccccttgtgactgggaatgaagggccatgggttcggaggtctctggacgtcccctcctgtcctgagctcctcaccacgggctcagcatcccctctcaccgtgggctggctcggtccaacatcaaaaggaagcctgaggggtcttttctcaccatcagtgcaggaaagaatttcaaaagaaaaaaagaagtccttgattgaaagaaaagaaatgtaaacgaatgatccccagcaactgcaaccccaagtcttatctcccaactcagcccctaaggaatgagccaggcataaggagaaattggggcggggtggggcgaaggctttgcagggcactggccagagtgggaggctctctcctggggtggggcccggaagtctgggccaggctggggggagatgtctccctggttttcttggccggctctactcacatgatgtgaggagaaggcagcttgaaaactatccaggccccaaagggaacggtaaaagcttgattctcataggcctggatagcagagacttgatttttaaagtggattatgctgataatcgcccaattcttcagtacattcagctagtgtagacctgaccttgggggcagggggcagttgtaaagtagatttgggctcctaaaacggaaggtacgttttattctcagtgctttgagcctgaacatcaccggggaataatttttttttcatttaaatgttcccagcatgagggagaaataca

SEQ ID NO: 916997 - DNA, 4001 bp, Homo sapiens
aggctaaatacaattctcttcaacactgctcagtctaataaagaaatcagtaacagacctatgtacctaagtgaaaaaacacaatagtgaggtcctatttccaaagctattctgtacctttcttaatacaaccttgttattgcagcataaacacaaagaagtctggacctattataaaaccaagtgagaaccaaccccccccgccccaaaaaaaaaatgctgggctgttgttgctgtggattttggtttttttaacctcacgtctgcctgagtcaggttcactgaattcatcaaccttttctttggtttcctgtgcacattataaatccagaaggctctgatcccagggattgttctaactcataattaggaaacgtgagcccatttcaaccacacttcaaagacagggaaggagggggaacgtaaattcctctttctaaatcgaaccatcacagaactcggcatttcaactgtcttcatctattatcagatccaaagcaacataacctcagtgattctggaagaactcagagaacagacaattcatgtaattaaaagactttgtgcgtgataattggctttgaagtttctgagagagatctcatctcaaaaatctttgcagaaaaatatgggtacagggttcttgcagcacgtattagagactgctgagacgcttcactctcctcccagtgtatctatctgcaggaaaggggcacgggtgggggaaccacacacaagcagcccaggtcaatcatgagaaagaatctcccgcacaaatcacaccatttctcttcaaggaagaatgactgtccagagcttccaaacttgctcttcccatgacagacagggatgctggcagaagagaagaggaaacattgaggaattcctgccttgacacatggcttcaagtcagggctccgctgggaaaattcgggtcacaacttgtagctgaaactccacgtgcaccctgcggggccgctgctgctcccagcaccctacggaagggtgagcgccagaccctgtgcccaaacctcacagcggcagacctggagaaacccatcccccttcttcagagccgccccccaggctatatttttggcagcctataatacacaaaatagtattcccatacaacaggagtgctccaaaattatttccaaataggtcagtgccaccagggaaagtcaatcccaaattccagaaatctccctggtcatctcaatcccctcctcccccgacagccggctcggccctccagaggccacctttcctctcaagggtccccacgccctctccctttacagaaaaggctttcaggaaacagccttcctttcctttcggctccttagtagtctcacctaaggcctcccacccaagtgctccaggacaagcaccttcggccaaggggcgtccgaggagcttggctgccgcacgagcgcacgttcacacgcgcgcacacacacatgcacacaagcgcgcacacacacttgcacacgagccctctctcccggccgcccccatcctccacacactcccacacactcactccaggcgaagttagtccccgggccctggcggccgcggcgtcctcacctttggaaaacagggcggccaggctgatgagtaccggcgaccagtggtgccacagcgtccccatctcagacgggcacatcctggagacccggagcgcagatcctccgctccccggcgccgtccaggcgaacaagagaccgtctcagtcccctagaggcccgcagcggggccggtggcgagggagcgcccggctaggggcccgagcagcccgggcgccctgctccctcttcccgccagtccatggccaggccgggaggcgacgaccgcgcgggctcctgagttgctctccggagtccaacacgcgcgcaggcaaaccccacctccctccttcgaccccaacagaattttttttaaattttaatccacagggggtatttcctttcctgtttacccgagcgaagagtggcccccggtggcccaaggaggggcgcctccaggcgcagggctccggcggctccagctgctcccgggctggctagcgggcgctggcgcaggcggcgccggggtggcggggctgcggagcccgggacgcgggcagaggcggctcggagccccccgggcgggtggccgggctcgctgggcggcccggggctccctggcccgcagcccccatcccaggccggccgctgcgcctcggggctcgggcgcgcgcgcgctccggcacccaaagtttggcgggtgcggctgctccccggccgccgcctcggcccgcccggccccgggcccggctggggctcgcggggctctacgcgcgccgagcgcactgcaggctccggagacgcggggctcccccctgcgcccgggggaggcgggccagatgtgcgcggaggagggcccgccggctcggggacgcggccgagcaacgcagctgcctcctgccagcaggcgcgggggctccgctccgcaaggaccgcatccggaacggaacggaggcgatcgccacggtgcccggagccggctggggctttcgccttaaaaatttgtctgcttttaaaaagccccaccctttcggagtgacagctgtgagccccaatccgcaaagtaaatcccacctccccctggccgccccacgcccagcctcccggccaccctccctgcgagcgcggacgcgcggtggcggcgggcgagggctcccagcgcgggcgcaccccggggacggagccacccactctcccaacaggtgtccagctggccaccggcctctcgtcgtcatcaaaacctcaggcccaggggaggtcctccagcccgggggcacctgaggctcttcgccagggagagcgcaaggatggctggagaagggccctcgccccgccctgcgcatctcccagggatcgcagtgaggaagtctctgacacgccacactgaggtcatgctggccccaagccccttcccagagcgatcccccaagttagtgtccctagaaacatgtcgtgtgctccccagggctcactgggaaaggaaatggatccattaggagacaacattgctttgagaagataaaagacatgattctcaacaccgcccggaatctccaactaagacattcccacaccaagatccctaagcaccgtcctgtaatttgtagcccaagaactgctttgctccacgagagcctttaaattaaccccatcaaagctcagagggaagaaaagcattcagaatttttaaggaatattgtaaaccaacaagccctgaatctaatgaggtgaattcacctcagtagataaaaatgggtcgttatcatctgactgagggggcaatggacttttttatcctgtatgcctgtagttgcagaaatataccaatgctttaagagtttttagctttcaaagtttcaaggaagatcaaaaaagccactgctgttctaccgaagattgtttttctgggttcatgtcctttgagatgtgctcttgtcttttattctgtatctacttatctgaatatatctgtctttctgttttttcttttgtttgtttcttaaacttgttgccttttctctttgtattgctctcctgtaaaattcctaagagtcgacgctgcaaagaccctaagagattgtctctttcactgtttctgaagtttgaaccagcaggagagtcactggaaaatttgttagacctgggttgctgggcccaccccagagctatctcggcaggtcaaggtgggacttccgatctccgttcctaaaaagttccaggtgatgctgatgctgccggcctgcggaacacgtgctggaaccactggtcccctttctccttcacctgagtgatgagagagctgagctttcgtctcttggacaccttcacctggtctctgagtgtcaaaattgatgcccgcactgaatgcataatccaggttccatccttaacgctacagtgggtctgagtctatttgtaaatcatctattt

SEQ ID NO: 916998 - DNA, 4001 bp, Homo sapiens
tttcagtttacaaatcctgatttattccatttagttcaagtcatagtaaatactgtcactaacaagaatcttttcttacacccctcccctaaaactctgatgccccactgtgaatcattatgaacgaactgcactgagagcttctgtagcctggagaaccctttccaactattcacatgtctctttgcaaaaagcctacagtctgaaatggcaatcccttacgatacaagcattctcattctccttttcatttttcctttgttgcaaactgaccagtattttgttttcataggagaaggaagtttgtgtaaatggaggcttatgctctaaagcacctttaaaactttaaagatctgagtccagagtaccttatatttaagcaatgtagctttaggctttaaaaggagtctattcttttgaagcaaccaaatggcagataagtccttcagctctccaaatgtaaatagtataccgtttttaattcttattatttttacagaacatgtgaaactgataaactacattactacttttttttttttgagacggattctcgctctgtggcccaggctggagtgcagtggctcaatcttggttcactgcaacctccgcctccagggttcaagtgattctcctgcctccatctcccaagtagctgggattacagcttttttctagttttagtagagctggggtttcaccgtgttggccaggctggtcttgaactcccgacctcaggttatttgcccgcctcggcctcccaaagtgctgggataacaggcgtgagccaccgcgcctggcccattactaatattcttattcaaaattaaaagcatcactgtaattgctttacaaagctatattcgcctcacttatcttttaccaagacagatggaatagttacataaaatataaagacattttgaaataggtgtaactagtccagaagtggtggcctgtattgccagcactttgggagacacaggtgggaggatcacttgagcctaggggtttgagaccagcctagcaacacagagggacccctatcttatacaaaataaaaattaaaaaaaaaaagaaataggtataactcgaattatcacaacaagcatttattaaaggcattgtttatactatcatgttagtaagttaaatcaggctatggaagttaagtaaacacaaccattcataaccattcagaggatatgagttttggatttcacaatggtatggttttaatttcctctgactagattacagagaaacaacttagaacactcagacttaccataataggtgcttgcagtcattgatataatccagaaagctaacgaaatgcaaatgatcaggctcagtataactatattagttatcatctttatatatcttttgcatatattgtcgttaagatctgtcatggaaaataaggatatgagctcctgcgggaaagaatatttagcgtttcggagagaaagtcatttacgatgtgagcaagacacttgttcagaggcaaacataaatcccaacatattccaccgaccaaacaagcataaaaatcacaaaaattcaaactccttccggaaactcctactggcggagagctccaattcatatgggcgtggtcaacgcctcaccgcaaaagcagagcgcaacccggcggacggtgagggccggtcgccggctgccggccgcttcagcgcctcacgccggagcccacggggaaaagagaaagccgaggcagccaatccgcggtcccggcgctggcgagttccacccacctcccgtcgcaaccttctcacccgcgggccgggtaggccagcggctgcaaaggggcagctagggcacccgaacttgggcaagtctgggaagcacgcccgacgcggctgaacgcagtcacgtcccgacagctgcgcaagccgccctagggtcaggtccagccggccaaggccgagaccccaggagcaaagcccgcgcctcccggcgcccccgcctctagcgcctcgcccgctgtgggcatgcgccgcagccgcttagggggatgtcgcctagctcacgtgggcaggcactgctggcatcctggccggctgcgtttgcactgcttctccaaaaccacattataggtactaaacaacattgtttagtacctataatgtgctagactcctggctgctagcgaggtaaagttaaacatagtttctattactgagctctcgtaattattgtcataacaccacttagattgtggaaatatctgtcctcacaccccttatattaaaggtgtgtgcatttagaaagcaaaacgtcttgttagcattaaaaatctgaatcgtggctgatttcttttcttttctttttttttttttcgagacagtgtctctctctgccgcccaggctggagtgcagtggcacgatctctgctcactgcaaccaccgcctcccaggttctaagcgattctcctgctccagcctccggagtagctgggattacaggcgccacaaccacgcccggctaatttttatatttttagtagagacggggttttgccatgttggcccggctggtctcgaactcttgacctcaggggatccacccacctcggcctcccaaagtgctgggtttaatggcgtgagctacagcgcccggcctgatttcatgttttatgtgaaattaacttgtttgcctgggttaacagtaattaactgataattacataatatttatcaattttttcagttaattgctgacagtgtaagaagaggagccaaatccatttcagacacagtatgcaattgtgttttaagccccaagagtagttactttaaaaaagctcacattattttaaatttcaaaatacatgccaagacagcttgtcattttctttggtaagacatctaattaagtagttaactaagaatcaaatctgtgaagtaggactaaatagtagtgggcttcctgtactagataatatacatatatggtctttatgctgaaatgtattatgtgcctactttatttttgtcttagtctgttctgcataggtaaatgtttggattatttcaccaagctgactggccagtatcaatgttaccagactactgggtaaaattattaataatgaaagctaatgttttgtggtttgcacagtcgcattgtttttgtctctgcttagacaaaattataaactggtcttttttttttttttcttttttttgccttgcttcaccacagtcacagagtgaccctctctgattagttggtgttcgataggaaaatcatagcctagttgtgaatgtcaagctatctcccaacactgtggtgtagctgtgtcaggtcagtccctggatgtcagggatgattttctcatgactattagatctggctaaaaaatgcatattaaatagtagtgtcagtgaactgaccctttagatgaatattttcccttctatttttttcagtgaccaattatagatgtttttctccataaaagttattctagcttaagaccaaaataatttagaggagttaatataattaaaatacagtagttcttatatgcaataggcagtttcagttaccaagggttaaacatgatcttgaggcaggagaatagggtctcctattgaggcagggaacctaaggccgattcatgctgacttcctagagctaaatcaaaaggaaaaccccaacttcccatacctaagtaacaaaaggacccaaagctacgccctttgcaaacccctctttttttctgcgtggcagatagaaaattgaaagtatctctgcttggtagctttctgcaaccaatcagacgtttgcgtaggagtgtaactttgtaactttgcttcagcctctaattggttgtttttcacaaccaatcagactgattgtgggctagtacttcatttacatttacataaggtgtacaccaagtaaccaatgggaaacctctagagggtatttaaaccctagaaaattctgtaaggaggcccttgagccccta

SEQ ID NO: 916999 - DNA, 4001 bp, Homo sapiens
gaaactctgtctcaaaaaaaaaaaaattagccgagtgtggtggcacatgcctgtagtcccagctacttgggaggctgagatgggagaatggcttgaaacaggaaccgagattgcaccactgcactccagcctgggccagacagcaagactacattctgcggggcggggcgggcggggggtggagaaaaaaaattaaatgaacatctgcacatacattggaatgtaatacaagtaagacaacatttacaaagaattttaaggccgggtgtggaggctcatgcctgtaatcccagcactttgggaggccgaggcgggcggatcacgaggtcaggagatcaagaccatcctggctaacacggtgaaaccccctctctactaaaaatacaaaaaattagccgggcgtggtggtgggcgcctgtagtcccagctactcgggaggctgaggcaggagaatggcgtgaacctgggaggcggagcttgcagtgagccgagatctggccactgcactccagcctgcgcgaaagagggagactctgtttaaaaaaaaaaaaaaaaaattagccgggcgtggtggcgggcaagtgtaatcccagctactcaggaggctgaggcaggagaatcatttaaacccaggaggcggaggttgcagtgagctgagattgcaccactgcactccagcctgggcaacaagagcaaaactccatctcaaacaaacaaacaaacaaaaaaacaaaaaaagaattttaaattacttgggaaaattattgtactacaaaatcaaacgagaaaactatctctggtaacgactggcagcctccagggaagagaactagagtactaactggatacaaattatcaattcataaaaaattaaaaatatgtggaaaaagatcagaagaaagtgtgctaaaatagattgcttctgaatggattaacagtgtggtttctgcctgcttctttatacttaattgtaccttgccaaatcatctaaaataaacatgcattatttggccggtcacggtggctcacacctgtaatcccagcactttgggagggccaaggcggatggatcacgaggtcaggagttcgagaccaccctggccaacatagtgaaaccccatttctactaaaaatacaaaaattagccgggcgcggtggcgggtgcctgtaatcccagctactccggaggctgaagcaggagaattgcttgaacccaggaggcggaggttgcagtgagcgagatcgcaccactgcactccagcctgagtgacagagctagactccatctcgcgggccgggggcggtaaggaatcaaggttttacaagagcagaagatagtagagatcactgcatttctgtcaactacatccgttctgccacccgtgccctgcgtcctgacagagcatacgctcagatggtgtttgctgatttgccgaatgaatgagatggtccctttcccgcggctgctctgcctgcccagaatggtccccaggttttctcgcttttaaccaagaaactcaaggcttctgcaacgagacacagcccccaggactgcttctcaaccagtctaggcctcccttcctgtctccgccaaaaggcttcaggctcctccccactctggaagctgccccagcccgcttcagggcccagaccctcagtcccgacgcccactagcctgccaagtttcttccaccacactacgccggcggccctcggtagagccaccgcccttctgcagagtaacggcccgcgccctcgggacaatcccttttccaaaaataaccccctcggcacctgcccccttggcagctgctgcccgggcggtacctgtgccgtagaccaagcagccggagaggatcaagagtagccgcactgtcccaccgcccccgactcccgagccccagggcccgggaccaactgccggcgagaccgccactttcattcctcccgccatggttgcctcaagccacctcctcctcacgtgccttaccccagcaactaactccgaacgggcaacgacagcagcctatcctctacgaaacccgcccctatcaaccaatgggatgggcagggcttcgagcacccagccctccaagggccctatgagtcccgccccttagcaactgaagagagagggcgggaaaagcagctttcagcctattggaaaatgggttctcaccctagcagtggcgacaggaagatcccaccccgctaacaacatgcttccgtcttcagtttatttacaactggtgtgattgatggtaagtttaaccaatagaaaatcggaatgggagaggcctccttgaccaaactcggtatttccatagaagctgtctgaagttccttccgttttctttcggttactttttatcacgacctttctgttatgagacgcctacaattgagatcgctttatgagtaggaccctgataggacgatttttaaagtcgactgacaaaagtgtggttctccaaagtcctaaaggatttaaaatagaagtcacaaaaaagtgtgtgtcaatattttataagcataaacattagcttttaaaaatgtattcataggatttttatttttggaagtaaaattaatgttaggattaagaaagattcatttattcctcttatcatcttgtgagacaaatataattctctccatttaagaagccaaagccaagacagccacaggaacctgcccaagatttcatagttcatctggtctgtgatcccaacctaaatcctactgactccaaagccggagttatttatatggattagctgcttcccattcaatgatttaacacagggcccagcagagatccaggtgttcagaaactgttagtagaaattgaaactttttttttaagaggatctgatggtgatgggtaggaaaactacagatgatagagccaaatgaattgaggaattcaaggaagggggcatctcctggggaaggttcaagctttcaaaacaagaatttttttttttaatgtttttagagacagggtcattctctgacacccaagctggagtgcaacagcaccatcacagctcagtgtaaccttgaattcctggacttaaaccatcttcccacctcagcttcctagataggttgggctacagggatgcaccaccatgcccagctatttgtttgtttcattgttgttgttgttgttgttgttgttattgagacaaggtctccttctgtaacccttctggaatgcagtggtgtaaccacagctcactgcagcctcgaactcccaggatcaaatgatcctcccacttcaatctcccaagtagctgggactacaggcatgagccactatgtctggcttaattttttttaattactttttgtagagacaatatcttgctatgttgcccaggctgacctcaaactcctggcctcaagtgattatcccaccttggcctcccaaattactgaaattacaggagtaagctactgcacctggtctaaaacaaggacctttttaaaagtcaaaatgggccgggcatggtggctcaggtctgtaatcctaacactttgggagtccgaggcgggtggatcaactgaggtcaggagttcgagaccagcctggccaacatggcaaaaccccgtctctactaaaaatacaaaaattagccaggcatggtggtaggtggctgtaagcccagctactcaggaggctgaggcaggagaatcccttgaacccaggaggcggaggctgcagtgagccaagatcgccccattgcactccagactgggtgacagagcaagactctgtctcaaaagagaaaaaaaaaaaaagtcaaaatgggctgggcatggtggctcatgcctgtaatcccagcacttttgggaggttgaggtgggaggatcacttgaggccagaagttcgagaccagcctggccaacacagcaaaaccctatctctaataaaaatacaaaaattagcccagcatggtggcaggttcctgtaatcccagctacttaggagtctg

SEQ ID NO: 917000 - DNA, 4001 bp, Homo sapiens
gggtttgggaaagggcaagttacgggtgcaaatggagccttgcaggtgcccacgaatcgaatatggtgccaccacccgtgggcaagtgtgggcggacttgatgggggacgggtggctagcgattttcacagcgctgaatcagggctctgcgtctgtggccggggagttccgtggcccagctgcaggcgaggtgagccggtgggggagggagcgcaactgcaagggttgtcccgggacagtgccggtacgaacctcaccccgccgccacccccgggccagctgctgcagtcaataaggcgagggcctagcaggcgctcgtcgccctcctggtggggttcgctcgggtgttcctaccagggttgaagagggctagggagctgagctccggaagggcggactagaggccccagcggccactcctagagaggcgggcagctcgggaggtctgagcgcagagggcgggcggagccgcacgttgcgtggaatcccctagttcattcccgggagagccccgggcgcaggacagagcggtggaggggcgcctgggagctctgggggacaccaagagaagagaggttagggccagtgcgcagcaaacggggaggaactacgacgcgctgggtagaaagagtaagagaggcgcacccactttgctggtgaggggggcacacggggagcctaagaaaggcctaaagaggtagtgggtgtgagccagcctcgggcgcgttaaaaagggggcgccggagggaggcaaggagaggaagttgggtgtaggaagaagcgagaggaaactgttgcctggacagagcgtgccgtgccaaagcgcggaaacgggatcaaggagggggcatcaggaatcgcctggggaccccccggagagtggcggaagcggtgcccttgggcgcagcaaagagagaagggagcacaggctgagatagagacagtcctgggcgctggagagcaggagcccccggagcggcagggaaaggaacgtagagcctgcatgctcggggtatgagcttactgcgctcgctagggtggcgcgcactggggctctagaaaagagggttgagaagccccgggcaagtgcctaggaaggtcagaggagtcagcaaagtccacggaagaacttccccgggttggagaggaaacgcaccctgggagctggaaagaagaggaaagctagcctgggggaagcttgatcagggctctgagtaccacgaggagtgcagaggaggtgctgatgattgcggggagagctctgagagcccgagaaaggtgaggaggaggtgcgaggacaaagaacacctagcgcgggccgggccgtgaggaagggagccgcagagagcgcgcggactcccctgcaggggctcaaagccgcccgggtctctcctcccaggctgcctctggccgtgattcactcaccatgatggaaaagaccaaagccacgatgttgatggggtacgcagggcaaaaacacgagacgatggtgagccacaggtagttcttgggcatgggcacgtcctcctcggtcttgtcatcttcagtgttggcctcgggactgctgtccaaagccctcttgaagtccgggctaggggcgtactgagacatgggcgaggccggcggcgccgggagggcggaggagcgcacggtctgtgtggtctggggctctggccgccggcttgtggcgaggctctgaaaagccagcggctcggggctcaagggagacgtgacctcaccccttctgcgtcctctgccagcacccgcccgggctcagggaccctggccaagagcctccccacaaggaggaagggagggagaaaaggagtgaggggaggcggggaggacagcgggagcgtcagcctgaggaacagggaacaggcagatgaaggcaccccactccctgagatcgtcggagggacgcacagactcacactgagaagtctggaataaaaggaggctcagggaaggaggacgcaaaggcccattaagttccaaattggccagcccgtgggctgaagatgaccagctcatttttaaaagccacttaattctaatacatttagatgggacaggaccaaccctatccagttggcaacagactcactacttcctcttgacttcaacgttttaccttaactgtctggtgcctgggcatttgatttgtctcctgtgcctcagaccttgaacactgagccccaggaatttctcctccccccgaccccctcccccaggtggggtgggaaccaggtgcccagctttggcctcaaagctttccacattctacttggggctcaagagactggagtccagtatagtcagtcagtgggcactgcccggtccatgcccgtccaggtgccctccccagtgtggaaacaaggaattcttctttccacttttccacctgcaggacccctggggagaaatgcaggtagatcaggctggcctaggcaacctagatggatgagtgggctgggaagaagaacaaggtatccactttggggactagtgtgagaaaagcaattgtatcagtgtctaagctattcatgagagggccgtatggaccagaactgaagcttgaatccagacagaactaggaaattgtcacttcaggaaagccccttcatcttgctaagcccctatttctccatctgaaaaaggggaaataatagtccctgcctcataaagtcgtagtgactcttctatgagatggtacattatccaggtcaatccatgtgctcaataaatattagctattattagcatactatttctccttatattctgaaacatatagtgcattatacagtatcctaaacttgatatcccttgctaatatttcaccaaaaatccaggtattctgagctgcaggaccacaaagaaatgaaaataatttgatcatgcagtgtcaaaagcaattgctcacatcatcatacttgaaactattaatcatcttcttggctttctcagaatataagctgattgcctgggagattctcacttatctcatgagccatacttattttgttatctgcctccctcattggactgcacactccccgagagaaggggtcatctggctcatctttgtgtcagcatctggcacagttcctggtacaagggaggtgcttagtatagcttgctgggtgaacacacaaagatgaaatagtacattctccgccatgccttctttctcattttgatggattaataaaatgggagtaactaaaagattagattcatctactgaattctcaaccaagtctttgcattggctgttccctctgcctcggctgtttttccctggctgtcacatggctcctccttctttttttttttactttgagttggagtctcactctgtcacccaggctggagtgcagtggtgtgatctcggctcactgcaacctccacctcctgggttcaagcaattctctgcctcagcctcccgagtagctgggattacaggtgtctgccaccacgcccagctaatttttgtatttttagtagacacagggtttcaccatcttggccaggctggtcttgaactcctgacctcatgatccacccgctttggcctcccaaagtgctgggaggctcctccttcttattcctcaggtgacaggtcaagtcacttcctcaaagagaggtcttcttgtagattatctagtgtaggtctccatccttattttattcttgccagtttattattttttgtgtgtgtagcgtgtcacaattgtaatttatttctttacttgttcactgtttgttctatctctagactatagcctgtccaacctgttcagaactatatttccagcacttaagaattgtcctggtgcatagtaggaatgcaagaaatgtttcttgaatgaattgaccaaaattacctggatgtattgaaaaaaatgattttcaggttttgatcaagacctacttggattagaatttctcaggtagcaccccagaaatctgtactttttttttttttttttttgaga

SEQ ID NO: 917001 - DNA, 4001 bp, Homo sapiens
taactgacagtgtcaaaatggcaatttttaagggttatccttaaatgaaacattaagcagaattacaatactctattaaaccagagaaccagtaaaccatcttcacattatttcaacagatatttgcattcctactatgtgtcaaacattctattaggcactgaggcatccttgtgaacaagcatacaaaggtcttattctcaagatgtttatatataatccagtgagatatcttccggaaatagaaaaagagcaaataccgaataactgaaacaaaggtaaagattttcctgtagttaaaaaaaaaaaaatcaaacccatgcacacacaaagaaatctgtatatttgtccaatgtagcaaccgttataatttctaacgatgctttctataaatggacaaatttttactgaacttggtttctggtacatctgttctaacaaagactaaagaaatgaaagtggaaaaagcaaaacaggatgcatatgggtttatcaaaggctacttctccctttctttttaaaaagttaagcatgggcgcgagcgcgcacacacatacacacacacacacacacacacacacacacacacacacacacacacgggcgcgcgcgtttacctgttggtgttgtatcgatattcctggggaacccctgagggcactcacaccagcagaagtttcaaaggctaaacaatagcatacagcaaataatcacatatagcaaatattttcatttggaattagcacagtgttcacaaggacgcaaaaatcaaattaagaacccttcccttttctctaggtgtttctaaacccttccgggtggccccttctctccctactgatccctttaggcactagcaaatcttttttttttctttagcagtgagtgacgtggcaggaggcagaaaatgaccctggaggcgccgtggctagcactgagcttggcacctcctccctccgctccacgttgtacacccagcactccccccactcccgaagggctccagaatttctatgtaagaagggtttaggacaggcgatctgattggaagtgggagctggggggtcggtcttgaagctgcgtgtgcagagcaggcagtttttatttagactgggaggcagtgacggcacggatgggtgctccagccctccctgtcacccctgggcgcggccagcaccctctccattcccacttttactttaggttaggcgtggagatacagccttcctacccaggaagagctatgggggtgtccactgggaaaaagtcttgtgtgcctgaacccaaaagggaggtttagcaacaggtcaggagttggcagggcgaggaagcccggtacccaagcccctccgctgcatccctctcccaggctgctgatgcccctcaccttcctcctccgcccccaaccccgaacccccagatgctaagaagtcaggcggaggctttccaggggtgcgcaagctccaatcgcggcggggcagtcagcgacgtataaggaggagtagccccagaagcgaacctccatccgcccccaacttcgtcccgcccctccccctttcccgctggggcctcgccaaggccccgctgggcagccaggccgggcactgggaggtgaggggcaggggcgccgacggcagagggcgacggaggagggcaggaagccgggactgcgcccctgccctcgcatcccgactcactcaccgccggggtcgcggccagcgctagggctggggccgggcggagtgagcgggccggcgcagaggagagctgaggcggcctgggcggcagcggcggccggcacaaccccgggcagtcgcggctccagaggcgtcctctcaggatgtggagctggaagactgtggcggcggtggtggaggcggaggcctctggctgcggacgtggcgcccgacgcgacccgccccctccgccgcctcctcagctcccgcctcctcccgcggctccagttccgacgcgcacgcgcgctcgtgcagcccgggcccctcccgcgcccaccgggcacacgcccacccgttctcgcagggtccggccctcccagcagtccccagccggctgtgtcccaattgcgcacgcgcgacgctccgaggcccgctcccgccccttcgccccctggacgcctccgtgggaacccccggccggcctgcgcgcccctcctccgggggtctccccgccttcttcccgccaccatccaatcaaatcgggcgaggggcgcgaagcccgggagacgcgtaggccgcggcccccaggcccggtgttttgacgtcggcggtgcccgcgttccgcgccgagtaacggtcttcggaattcagagccttcgccttagggaaggtgggacggtcgccagtttctccagcactttcttcgtccagggacgtcaacctcccttgcatgctgtcctcagggactgacagcggggcctgctcagaagttctcgtcgggactctctacaggcctttgtgattaagtgctaggggtgaggagagacgtggcttatttatgtgtttttcagtttgttatgatttttttttttttaattttacttctccctgccctagaattgagctccttgagagtaaaaacccgcctgggtcgccatcaccctaggcttggtgcagggcctgccaggcgctcgaatttgttgaagaggtgggtgttcagtatcgaaagagccgcggattgtacattagaaagcctggctttgcgccgcgtccttgccacttgctgaccaggcccctccacgtggtccccgccggggcagcagctctcctcacccgtccaaaggcacggggaggcgcgtggcggccccgccagagctgagccccctgggatgtgaggccgtctcgctctgagcttcagagcagggttgcaggagacacctcagaaggtcgttttgaggacgggaggagatgaactgctcaaagcctgcttaactagataaatggtatcgattaacttttctttgactccctttccacacctataaaatgaagatgacgggaaacttgtcatactttttttgtggtgggtgggaaaggtctttatgaactgtgaagtcctatgcaaacgtgagatgtttcctttcgcaatctgattagcgaagcaaaaacacgcgagtcaaaaacatacacagaaagcaaaaaaaaaaaattcacaaaatggtttatcaactgcagaatattcaggatggtggaactgaatggtaactactgacaacatagctcagaaaggacgtgctaaaacatgctggatgaagctaactttgatccaggtcttaaatggaatggactatagtttatagcttcaacctaatcattaacttatgaaatcagagaattaaggccacttaagccactgtgctcagactgtcaagatatttagtttctcaaagcagaaagaggaaattaaatactcttgtcaattcaacatatgggttggatgattagcaggatccgtggattgttgtttatccagtatgtgaagaaacggatatcctctgttttctcgttattacacaaacttctatccttaatatgtgacctttcaaggttgaactctaggtaaaattatgaagtgcacaattacgtcttgtttcttcttccctttgcacgtcgttttacaagagaatctaattattattaaagtacaaatgactgacaagattgtagccactcctgggagattttgcatttttacggttattaaaagccataactcaaagcagcagttgaatctgtttcataaactaactaagatttaaaagagctcctttgggaggtcatgagttcatcagaaacttctggtgtaggagttcagcctataaaacaaacaaatacatgacttgtagtatttcttcgttttatagtctgaactcctctaagttcttgattcccattctgtgacctccctttcttagattgttaaaataaaatacagatgactcacgcctttaatcccagcacctcgggaggctgagtcgggaagat

SEQ ID NO: 917002 - DNA, 4001 bp, Homo sapiens
tggccactttgcacttatcagattgaaaagagagaagtctggaaatgaaaatctgagatttaaaagaagaaatcaatattagagactttatttaaaaaataatggctagaacttgatgattgaaggcctggtttcaggtacttgaaatttagaggttggtagtaatcttctaggatatatacttgtatgtaagtatgaacgaatttatgaaataccatgagcagagcactatgctctgtacattttcctctcatctggtactttctatccatatgccttattgtacataaacccaactcatgttcaaaggccacataaagcgctttctaagtcactaaattctttgtgactctttaaaccctcagggccccattctctaattgagcataatatatatcttagaacactacactctcatgatattcacagcaaaaatgcttctgtggtcaatcaagtttaatcaactacatactataatatattccttcgctgatacaatgaacattgtcatattaaaggctcttgagaaaggcctgcaatgaagaaccttgtttaactttgtactcttcagtgtttcccaaatgtgtttggccatcaagggcaggggccacatcttatacttgtgtatcaagtgtccaaaaaatacacagattcatgaaaattcagttgacatatgcattgcaatctaatgacactatacagcctactcaatgtatcaataaatgaagctgtgctctgctaaagaccaacagtggaatatgtatgtgtgtacatttacaaacagatgttgtctaattggaaggagaaaggaattattgacaaaaagcgaaaaaatatatcatgatgccttaattaacaaattatgaaataaattatattaaaatgaatttcatatcaataaaatacattttataatgctttttacatgtcttccttctacgtattaacttaccaatggcagctttgccccagatttgtacactgagatctgtttttcctttcgtggatttatctaatatttgaaggctagttttaaatctgtgttgttgctcatttttttcatctccttcccaaggattccattcttcactttccaaagtggactgttctgttttaaaaagagtaagtgtttaccagtaaggtattattgcagttgtaggtaaattcaaatcatttaaattaagtgttagttctaatttcatcctaactttaatttctgagaggtacagcaactgaatttaaactggtaatacacaatgaaaacaaaaaagaaaatcagcaatttttttactgaactttttttactctgaaaagtcttagaaataaaatgctaccttgagacaggaaaattctcttccccaacacaaaacctttaaaaataacaggataatatgtatcaagttacaagcttaacttttgcaattatttttatccattgtatacaggtaacctatgcacaaaaaactgacttcagagtgtagtgttcaccagtcttagatactatcgtgcaaaattctgaataaagggaaagagaaagccgagtctgatcttaacacaagttaaaacacaggacaggggaccagaatttggaggtaaagtctgccttatggtcactgcaggattagagagggctttgtttcaacatggaaacggatgtcttaaaccttgcggcgattttgaggccttccaggagcattcccgcaaatctctggcatttgagacgacgtcttggattttaacacgtgtttgaaaggcgtgcgcgcctgtcaccccctgggatcgggagcggggacggcgtgtgagatctgggtaagaatgaggaccattctccaattccgagccaagggctggctcgagaggctgtagggggcaaagcgcttctcaggccctgcgggtaatcccggacttgagagccgggtgcggggacccggccccagccgcccagcagccccagccaggagcgcagagccggaaggaagccgccgacccagtcctacctcggccgcgtctctcccgcgcgggggccgcccccttcctgaggccccgcggggacccggccggcgcctggcggcggcgcccgaagaagacgtggtaggcagcgtagagggagaataggcagtacagggcgataagaaacgagcagagccgcttccgcgtcagccgcatcccactcgggcttccagtcaggcatccaccgccatggagcgggcggaaagagaatccgcgacaccggcggcgtccgaggcaggcccagcccgtttccaggcagtccccagccaaggctcctccgcccagcgcccggtacagccccgccccggacacgcccaccgcccgcctcccgcccaggccccgccccctccagtcgcggctcatccacccggccgagggcctgcccaccttcgacactggaggagggggtactggagcggcccctaccccacgctgcttccagacgccgggctgagtgggaacctctctgacctctgccgtgtactcattgcacctttcaaccctggccacttttcccaagtacataaagactcgggggaaaaagaacacccgcggtggtccatgaaggccatgtgaaggcatggactgtgacgttttttgctctgcatggaatccctagcgcctaggacagtgcctactacgttgatagatgagtgaatataaacgtcctttaaaaaaattaagtgatgatggtcgcttaacattgtgaatgtaattaataccactcacttgtatgcatagaaatagttaaactgtcgaattcatgttttatataccttactgcaataaaaacatttttaaagttaagtttcattattatgtgagttgaacgcacataggcatgcagtattttgtcaaatagaggctgtaaatgtgaatgcttcagaaaactttgtatccagccttgggaagatgggctacaatgttttgtcagttgctctggtactactgttcaaattacccagcagtcttgcgacggtatgtctgctaattagggtgaccaatggtcccagtttgcccaggactgtaaggattctccagttggaggatttttagtgctaaaattgagaaagtcctaggaaatcagtaaaattggtcactctagcaccgaccctaaactattaggtcaaacactttacccaatcccccaaacagttccctgcctcaaaagacctgttttaaaccatttttgctcagactccccaaatcctataaatatcacccccaaccttctccttctgagactgccaagcttctgtcaaagtgtggcctcccttactgtagtagatttaataaatttagctttccttgattaacaggctattctggtgtcttagggagatggcagttgttttatgtatgctgtattgttgtttatcctattttgtttgtttgtggaaatgacaattatttaaggataggaagtaattaccttataattaccacaaaacacccactgtatcaatgtacattcagatgctactgactaatggttttactattgagaaatgcatacaaggtaaaactaatatgcagttgatgtcatcttgaataggggagagggccatgaaaatgaaggagttgttttacctcaaactgcaaatgactgcataatttgatgataagcttttaaaaatgtatttaggttacaaaggaatcttctaattgatctaagtctggcagagttcattttcctttctcttggtgtttaatggttgagctacagctgggagctactttctgtatatgctctcatctcttcaggtggatggaaagagagggaaagagatgtggtggggaatgcagcagtgtggagggggagacaaggttaaatatcctctgggggttgaagctccgcatatagggaaccagacctgagaaggaaagatgtgggaggaagaatagaaataaaggaatatgagatgaattaaactaaagcagggctaaaatctttacttggtgaaattttctactctgtctgcaaagggaag

SEQ ID NO: 917003 - DNA, 4001 bp, Homo sapiens
tttctaagtcactaaattctttgtgactctttaaaccctcagggccccattctctaattgagcataatatatatcttagaacactacactctcatgatattcacagcaaaaatgcttctgtggtcaatcaagtttaatcaactacatactataatatattccttcgctgatacaatgaacattgtcatattaaaggctcttgagaaaggcctgcaatgaagaaccttgtttaactttgtactcttcagtgtttcccaaatgtgtttggccatcaagggcaggggccacatcttatacttgtgtatcaagtgtccaaaaaatacacagattcatgaaaattcagttgacatatgcattgcaatctaatgacactatacagcctactcaatgtatcaataaatgaagctgtgctctgctaaagaccaacagtggaatatgtatgtgtgtacatttacaaacagatgttgtctaattggaaggagaaaggaattattgacaaaaagcgaaaaaatatatcatgatgccttaattaacaaattatgaaataaattatattaaaatgaatttcatatcaataaaatacattttataatgctttttacatgtcttccttctacgtattaacttaccaatggcagctttgccccagatttgtacactgagatctgtttttcctttcgtggatttatctaatatttgaaggctagttttaaatctgtgttgttgctcatttttttcatctccttcccaaggattccattcttcactttccaaagtggactgttctgttttaaaaagagtaagtgtttaccagtaaggtattattgcagttgtaggtaaattcaaatcatttaaattaagtgttagttctaatttcatcctaactttaatttctgagaggtacagcaactgaatttaaactggtaatacacaatgaaaacaaaaaagaaaatcagcaatttttttactgaactttttttactctgaaaagtcttagaaataaaatgctaccttgagacaggaaaattctcttccccaacacaaaacctttaaaaataacaggataatatgtatcaagttacaagcttaacttttgcaattatttttatccattgtatacaggtaacctatgcacaaaaaactgacttcagagtgtagtgttcaccagtcttagatactatcgtgcaaaattctgaataaagggaaagagaaagccgagtctgatcttaacacaagttaaaacacaggacaggggaccagaatttggaggtaaagtctgccttatggtcactgcaggattagagagggctttgtttcaacatggaaacggatgtcttaaaccttgcggcgattttgaggccttccaggagcattcccgcaaatctctggcatttgagacgacgtcttggattttaacacgtgtttgaaaggcgtgcgcgcctgtcaccccctgggatcgggagcggggacggcgtgtgagatctgggtaagaatgaggaccattctccaattccgagccaagggctggctcgagaggctgtagggggcaaagcgcttctcaggccctgcgggtaatcccggacttgagagccgggtgcggggacccggccccagccgcccagcagccccagccaggagcgcagagccggaaggaagccgccgacccagtcctacctcggccgcgtctctcccgcgcgggggccgcccccttcctgaggccccgcggggacccggccggcgcctggcggcggcgcccgaagaagacgtggtaggcagcgtagagggagaataggcagtacagggcgataagaaacgagcagagccgcttccgcgtcagccgcatcccactcgggcttccagtcaggcatccaccgccatggagcgggcggaaagagaatccgcgacaccggcggcgtccgaggcaggcccagcccgtttccaggcagtccccagccaaggctcctccgcccagcgcccggtacagccccgccccggacacgcccaccgcccgcctcccgcccaggccccgccccctccagtcgcggctcatccacccggccgagggcctgcccaccttcgacactggaggagggggtactggagcggcccctaccccacgctgcttccagacgccgggctgagtgggaacctctctgacctctgccgtgtactcattgcacctttcaaccctggccacttttcccaagtacataaagactcgggggaaaaagaacacccgcggtggtccatgaaggccatgtgaaggcatggactgtgacgttttttgctctgcatggaatccctagcgcctaggacagtgcctactacgttgatagatgagtgaatataaacgtcctttaaaaaaattaagtgatgatggtcgcttaacattgtgaatgtaattaataccactcacttgtatgcatagaaatagttaaactgtcgaattcatgttttatataccttactgcaataaaaacatttttaaagttaagtttcattattatgtgagttgaacgcacataggcatgcagtattttgtcaaatagaggctgtaaatgtgaatgcttcagaaaactttgtatccagccttgggaagatgggctacaatgttttgtcagttgctctggtactactgttcaaattacccagcagtcttgcgacggtatgtctgctaattagggtgaccaatggtcccagtttgcccaggactgtaaggattctccagttggaggatttttagtgctaaaattgagaaagtcctaggaaatcagtaaaattggtcactctagcaccgaccctaaactattaggtcaaacactttacccaatcccccaaacagttccctgcctcaaaagacctgttttaaaccatttttgctcagactccccaaatcctataaatatcacccccaaccttctccttctgagactgccaagcttctgtcaaagtgtggcctcccttactgtagtagatttaataaatttagctttccttgattaacaggctattctggtgtcttagggagatggcagttgttttatgtatgctgtattgttgtttatcctattttgtttgtttgtggaaatgacaattatttaaggataggaagtaattaccttataattaccacaaaacacccactgtatcaatgtacattcagatgctactgactaatggttttactattgagaaatgcatacaaggtaaaactaatatgcagttgatgtcatcttgaataggggagagggccatgaaaatgaaggagttgttttacctcaaactgcaaatgactgcataatttgatgataagcttttaaaaatgtatttaggttacaaaggaatcttctaattgatctaagtctggcagagttcattttcctttctcttggtgtttaatggttgagctacagctgggagctactttctgtatatgctctcatctcttcaggtggatggaaagagagggaaagagatgtggtggggaatgcagcagtgtggagggggagacaaggttaaatatcctctgggggttgaagctccgcatatagggaaccagacctgagaaggaaagatgtgggaggaagaatagaaataaaggaatatgagatgaattaaactaaagcagggctaaaatctttacttggtgaaattttctactctgtctgcaaagggaagaactattaatcaacaagatattgagaaaatagccctaatgtcctaatgccttcttctagttgactgtgaaatagtacacgcttattcttagaagtccccagtacaaatttcttgtgatacctggtcaaaattctcttcttagtttatcaagtttccagtaatactcaagaagtgtgttaactactttgagagatttttcacagcttggccaagcttctgtgtcaaaccctttgcaagatacttctagcagggcttggccatgtaagttataaactatagctatttcaaatttgtaagaatcagtcctaagaagatacattttt

SEQ ID NO: 917004 - DNA, 4001 bp, Homo sapiens
attcaccccaaaattcttagatccattgccagataaaacagtgaaaatcaaaagagaatatatctgattcgtaaaagacaccatatagaaacagtctgctaatgaaattagcaaacaaacattggaatcaaatattttggcccataattctggcacattttttacaaatgtagtgtgacttactctctttgaatttcagtttctgtctctgaagagtgggtacaatatctctcctctgatgctcatgaaaaatagttttccctttcataaattacttagcgaaatatcctgaaacaccttcagaatcaccactttctccacctgcaatacacataactcaagaatttgcgtcagcgaacttcccaatatgaagcaaagcctctccttcctcctaccaatgattgagtcattcttctattagataacagtagctatttaaatacttctgcagaagctcacatatttttagtttgttgaagttcgtgactgcttcactctctcattcttagcttgaatttggaaatgacttttgatgacctaaagatccagactgtgaaggaccagcctgatgagaagtcaaatggaaaaaaagctaaaggtactagggatgggaaaatgtgtacagggaaagaatcccagtgttagccccaaaatgtaaattcaccgaagaatgggattagaaagctaaacacccaagtatgggaaaatagaattaataccatttacttaaaagaaaaacaagaaggctataatgatgatgatgatgacaacttatttataacaatttatactgagtatttactacaggttattctatatgttattcactttcagagtattatttctcagaatcttcgcaataacattttgagattggtactattactatctcccttttacagagagctaactgggcatcaggaggactaacaacatcatccagtttcacggagctaataagtggtagagctaggactgtaccacaaactcccatttatccagaattctatacatcggagggctcgggaaccaaatttatctggtgtatataacgataatttctgtaagagtccttcaggcactacaaaaacctgaagtacctcatgaattatgcaggcaaagtaaatgatattcagtatagtttagcataagttacattttgttgtgtactactgctttgaaaaattgtaagttctgtttgacccatacagtaattaaattgcatagctataaattaattcataatcccaattccacagacaatctgggtaaattgccttttattctatatctgttctgaggaaaatgaacagaatataaggagagaaagagagacaagtattgtcagaaatttggataaagaaattccaaattacatttccaaaaacaaaacagaaatttctctcaatagagaacataagtgtgagcatggagtgatttaacatttgagccaatgaactaaattgctataaaaactgctgatatttataggtaaaaccagaagtgaacaatagtcattcgtttctttactcattcattatttgtgtagtaaatattgagggtctgaattttacaataatcatgagattgatttttctttcagaatcttggttagatcggtacctactgcaaagaatcggattggtttatgattggaaaatcactagtaggggcagcagttggattaatggtctctgcctaccaaggacacaggacaaagagaatctatagaaaaagggaacacataccttccttcacagggtcctgtgattttctttttcctctaaaaatttagtttttcattatttaagagtgatgaggccaggcgcggtggctcacgcctgtaatcccagcactttgggaggctgaggtgggcggatcatgaggtcaggagttcgagaccagcacggtgaaacctcatctgtactaaaaatacaaaatttaacctgctgtggtggtgcgcggctgcaatcccagctgctcaggaggctgaggcaggagaatcactcgaacccaggaggcggaggttgcagtgacctgagatggcgccatggcactccagcctgggcgaagagcaagctccccctcaaaaaaaaaaaaaaaaaaaagagcacgatgagggtatctgatgccctacaatgtggaatgaacagtgaccacagagttgaaagatttacatagaggtatttgcccctgaggctagaattaggcaattatttgcaagagacacagctatcttctacaacttctctgctagcttgccacacacactctagaagccagtaagtattgaatcagaagatgaaccatatttatccctgtcaagtttctatcttctttttatcatttgtggagtctaacacactacctttgacatatgaaaactttgaatatatctgaccactgcttgactggatcattatacattcacactggaaattgtattataatatttcaagtcatgtagctactgacaattagactaaagacttatttttgggttttagcatctgtgtgatcttaagcaagtcactaaacctttcagtctccttatttgcatacagaggataatgataggagtaccttatttgtttatctcacaaggtgaggaaaccaaatacattgtatgggatgttttcctacacaaccagtaatatctgtgatttttttttttttagtggtggaacacataattgtatattcatacacctgtgagctatgtgatttttttttcaaaatggtgaatatttctcttgtaaaatcaagcctacacttggcgtgagtgtaggatatgctgttaatataagctaaattaatatcaaggtttcatccctacttttctttgattaataaccccagttccaggttgtaattttggtggactcataattgaatagcataaaattattcataaagttatttgaggtaatctcagttgattaactgaagaaagcttgtttgcttgatgtctgatatttatgttacttttgtgtgcacatgtgtacacgtggtgtatattaaaaacttcaggctctctgcactgtggatgaatttgatccaaccaagctagactgtgagtttcttgaggagtaattgtcgggaaagtagataaagtataagctttagaatcatatatttagattcaaatatctggtatcgaatcctggctctgaatttactggctgtgtgaccatgggtaaattacttaaattccttaactctccctgttttccattcctaaatgtgtatgatgaattatttgcagagccatttggaggactagtggtatggaatgcaaactatttatgtctatttactaaaacataaacagagtaaatcaccaagtacagacaggctccaaggaatggtttgcttacttgttcactcttttttgtctttctgattctatcctctgtcactctaggtcttcagtttctttactctccatggtggtgcctggctgctgcgactctaggggtcctttgcctgggattagtagtgaccattatggtgctgggcatgcaatgtaagtgctaaaatacggaactgatgtttattggggcaggggtgttggaaatgaggttaataaatatggtttataagtttctttcataacaactacaaacagccttgatatagattcattttaggcaaaatgtttttaagagtgaccatgaaaataaaggggtatattgttcatcttccaatggatagagccatgaaataaaaattacaattggtaggcatttttttgtttgtttgttttgttttgttttgtttcttttgttttcataacttcatggataggccgggtgcggtggctcacacctgtaatcccagcactttgggaggccaaggtgggtggaccacctgaggtcaggagttcaagaccagcctggccaacatggtgaaaccccatctctactaaaaatacaaaaagtagccgggtgtggtggcacatgcttgtaatcccagctactcaggaggctgaggtaggagaa

SEQ ID NO: 917005 - DNA, 4001 bp, Homo sapiens
tggtgcatgcctgcaatccctgctacttgggaggctgaggcaagagaatcgcttgaacccaggaggcggaggttgcagtcagccaagatcgtgccactgcactccagcctgggtaacaagggcaaaactccgtttaaaaacaacaacaacaacaacaacaaaccatttaagtaaactcaattctagaagttgcttctgtcttctaataacctgagtgatctgatatttcaggaaagcaaccacaaaggccctagaaaagaaacagatttgtaactattgggagtttatggcgggtagtgaaggggtaaggagacacacattctcaagacctatcagttggaaaggatctgtaaaaggattaatggccagcctttgcaggtaacatttgagaaacccgtgtttgtgttttcattggaaagaaatggccactaacgatgaaaaagcgtgtgtttcctctacgcaaccatggtactttctttcactttcttcactaaaggtaagagaagcctaaagtgctcagcagagaaaatgctacttttcaggcttgttgcaaagagaaaagaaaggaaaaatgaagggaagacaaggcaaagggagtgaagaggaagcaaaaagaaaatataagaaaaaatggattttcagataccactttaactgttctattagcaaaaaaaaaaaaaaaacaaaccatacagcccactctgtacgggggccatacgggaatctgagactatccagttttcttcatttgctctccttcttgctagatggcatagctctataaacttccctgtgacaattgtttagaatccctcagtccagtgacccttttctccactaatggattactcagagacttctgattcattgtggggcccaaaatattttaaaagagccctgcctctcttatttctagactagaggcacctaaactgctagaacaggattagaaattcctggatgggaaattccgtttaggggaattacacacctagttttcataatttgtttggaattttgagggatgggtgataagatgctaaaagagataaaatacttcagcggcacttctaaagtgccacggcaatcctgctcgtttccatgctcactctaatttctgtcccccttttcattgtcattgccatcagtcacacatgcatctatgcaatctcgtaatactaaggaaactttgtagtttattcatttccctatgaccccctgggttctgtatatgtctccccaccccgcagttcatttcctttcagactcttctgagagttgattaatctggggaaaaatactctttctgccttttcaccactgaactcaccaggatgaaatacagcagggctgaggccgccacgacatgaactcggactcccatcgggctgaattcctgcttcttcagaatcttgcactgggcatccgttgcctcctttcaatgctctgtgccatattttacttcttgacctagaattcttaagaagagaaacttttctcaggaatttatcagcttttctctctctcgttctctctgtctcctcctactcgctctggctgttattttctatggcttttccctcttctttcctgtttttcttctttattcttattactatttctatggcctccacatttacttccttttgccttctttctttccgttacactattaattctttctacatcttgaagtttctttctcctactgctcccaaaaaggagacattcaaagaggacatatgtgtcctctgaatgaagtatttttctagacagcgatgaaaaacttggctttgaggatggtcaaaggcagattgctggtgaccaaatatattcctttcttcatcagaaaactggtaatattcttgatccttcaccagagtactccagcgtgactgttgcagggtgaaagtcaccctgctaatctcctttcttctctctccgtgtgactaacaaccccttcttgctctttgaaaccctccccttcactatgttgataatcaactctcctggttctgggtcatttatatccctaagcattggggtaagactgagaggttgccaagtgaacaggaaagccatctcatctttggagaaaacagacttgaagatgagaaatcaagtcggaagattagaattttcaggtgttatcagtgacatcttcctcctccctgacttcacttcccattgaaatagataactgagaaagacatttttttaaaaccaaattttaaaaaagcaaatgtataggtttctttctttcttgccttttctttgttccttctttctctctctttctctctctctctctctctttggttaaggagtgatgtgattgagaaataagtcttgtcactcaggaaaataaaacctaaggttagagtaaaaacaagcacacatgcaaaagcatagaatactttttttttttttttttttgagacggagtcttgctctgtcacccaggctggagtgcagtggcgcaatctcggctcactgcaaactctgcctcctgggttcatgccattctcctgcctcagcctcccgagtagctgggaatactggcgcccaccaccacgcccggctaagtttttttgtatttttagtagagacgagacggggtttcaccatgttaaccagaatggtctcgatctcctgacctcatgatccgcccgactcggcctcccaaagtgctgggattacaggcgtgagccaccgtgcctggcctagaatacttacaatgaaacaaagctatagacacaaatgtggccgggtgccatggctcatgcctgtaatcccagcactttgggaggccaaggcgggctgataacttcggccaggagtttgagaccagcctggagaacatgatgaaaccctttctctacgaaacatacaaaaattagctgtgtgtcatggcaggcacctgtaatcccaactacttgggaggctgaagcaggagggccacttgaacccggaaggcagaagttgcagtgagccgagatcacaccactgcactccagcctgggtgatagagcgagaatctgcctcaaaaaagcaaaatattaaaagaaacaaaagaatgctgtatgaatgatttatacttaagtaggtgatcttttacttaataccaaatgtttaataaaaaaattattattattattattattattattattattattattattattatttgagacagagtctctctgtcaccaggctggagggcagtggtgcaatctcggctcactgcaacctctgcctcctgggttcaagcaattctcctgcctcagcctcctgagtagctgggattatagacacctgccacgacacccagctaacttttctattttcagtagagacaaggttttaccatattggccaggctgggataagaaaagtagaagttagtttacagtgatatatctatctcataagaattgaataaaacctcctttcaggacctttctagctcagtaaatctaattatgctgagtgattgtggaagggagactcttgggtgagctgatcatactctaagggtcctcacacatagcttgatgatgggatatgagaatgcaggatataaactggttttgttctcagctaaggaaaacaaataatgagaaaatggcctggtaccatactggtgatttaaaatctgtcagtttcaagacgaaatgagcactgacagtcttttattttttatttttttaaattaggcaactggggttaggatgaagggtgatttccagatttcagtagaagacttggcaaggtggaaggtattttataggacaaggagagcagggctttaggtggccttccactaaattattatgtaattcctccagtccttaacgttcccattcatacaacaggagcagaatacccacttgacctgctttagatgttatttcctagagaaaataaaataagagacaggaaagcattttgaataggatatttctatcatgagtgccctgtacgtagggaacccatca

SEQ ID NO: 917006 - DNA, 4001 bp, Homo sapiens
tctgcctgagtagccgggaaaacacattagacaggttccttaaaaactaaagtaaaatttgaaggaaggaataatttcggtttaaactagtgatcattcccaacaactccaaacaccacattcactgtctcttacaaggcattttatgttacaccaattactagttttagcttcatcctattacgatttgaagcctggtaactcggcaggcataagcaaacccacaaaaagcatattaaaatccacaggtaaaaaagcaaactattctgaaacaaaacatgctttgctggagccgatttgagatttaaccaggatcagacattccaaattgcaatactgatgcaccagaatgtcatgaaataaatttttcctgaatcctaagtctttcgtttcctcaagcaaaatttaccaatatgtggggaaaacgcaatccaaactgcaattttcaaatatttgtttgcagggccgggcccggtggctcacgcctgttatcccagcactttgtgaggccgaggcgggaggaccacctgaggtcaggagttcgagaccagcctgaccaacttggagaaaccccgtctctactaaaaaatacacaaatcagccgggcgtggcggcgcatgcctgtaatcccagctactcgggaggctgaggcaggagaatcgcttgaacccgggaggtggaggttgcggtgagccgagatctcgccattgcactccagcctgggcaacaagtgcgacactccatctaaaaaaataaataaataaaaactaaaaaattataataggcgcctaaaaatatagtttaaaatgctccttttaattcggcatgaacctgttccgccaaaagatggcctgttgctgggaaaaattaaaacaaactagaaaacataaacggttcaaaaagccctccacacgcaaaagtataaaaaggcgggaatttcctcatttcaaattttggttagaaattagagtgtcatcagttgccctccagggagcgctctgagactctgctgcgagtcatttcagttaataaagcgggaaaacgctcgaacttaacctatagcattttggggccacccctccagagctttcgaaagggcacggaagtccccgtctaaacgcccgctgcaggcggctggtggtccagggaagcggcgtcgactgcgtgcaaaacaaccgccgccaacgcaactccacacctcccagacccacacgtcaaagaacgcgaaccccgcggccccaacttctggcctctccgctccggcgcctgcagccccgcggggaaggggcgacgcgagggggcgcagggacagccccgcacctgggaggcccgagggggcgcccgggagggaggggctgcaaacggcggcgagcgcgcgcggcaaccgccaaacgcccgcctttgtagccccggccccgcgtccttaccctgccgacggctgctcggctccggcccgcggcggcggccccagagccgaggaccggggtgggctcgcgctcttcgtcactggagaagtccgggggccccttgctgttggtgccggcggggagcggcggccggttgcgagccgtgaggtgctgcaggtagagctggacgtacacgtctttgcgctgctccccggccggcagcgtcacattgttggcgaccaactcactcttcaacttgtcttttgtcaggaccgaggggtcttccaggaactccggcatctcggggatctgcgaagccccctccccacagcctttgccgccgccgctcacgccggcgcgcttgctcctggccggggaccgcgctgccgcctccgagcctcacggctcctgcccgggaagagcgctgcggagcggaacaaaaactcgcggacacaaagccaagccagacccggacacaaaagaccccagagccgaactacgaaccaactgcggccaagctggaagctcgcaccaaccccagcccacacactacaggcaggaggcgagcagcctgcttcgcccacgccccaagaacgcgcgccgccattggcgggcgacgggaggaagcgcggcggtgattggcgagacggctcgcgcgggttccattagccgccgcgctgagcgagaggaggtagaaacgcagtttaaaaggcgctggggcgggagccgaggctcccggcccgcttctgttttcgttttctccacccttccccttagacgccgataagggacaggtcgtactgcttttgtgcgccgtttcctctccctcccccagcttgagaagcagctttcgtctctggggtcgatcgcctacgaacgcgccgaattccacgccagtgtgaggacccttggctgggcctttcttcctcccgggacactgaagctccaagagtagccgcagccttgccttccccaaacgctagccctgaaggggaagaaaagaagcgaggcttgtctgcaggcactcatattccttgatttgatttactttgggagggggagggcggggagttacccctctcctcgcgaacgcttcttttgttccagaaacccaggggaagccagacctctacaatcgggcacttaaattacccttgaatttgtgacaaaagtgtactataccattcacttcttagtgtcatagttggggcatgtctaaattgtttaatttgaacagtgcgttcagacgcaagacaaattcgcgcttgcatttttgttgaaaccgtctctggctttggatcccaccacccgcaagaatcctaaacctaacgtttgataacaaaacgaaggagaacccttgggaaccccctcaatggtcaatttaaaataacagatggtgcataatcctaaaggaagactagtgacctataattaggcctagaaccctaatcaaacccgtattaccgatccaaattaaaacctggtagaatctaatacattgactgcaattaaaatgtttgcctggaaattagtatcactgatgacaaatatttgtatttctgatgaatatgtatgtttaaagatgctttctttctagaaaggaaaggagaccttggatgtagggtgtgttaatcatttccccagaatctgagctccaaactatgttttagaaactggttaaattttttttaaatgtttgcctgctttctacattgctaggttagaatacatttaaaacaaacgccttcactaaaaatgtttcctatgatttaagcgacttacttttattcaaattgcgatattatttcttttagtgataattattttcctagaggtaactaattcctttataaaaatctcagtattcacatacatttaagcaatggtattaagctcaataatgcaaattaaaaatcaggttttaattagcaagttgttaggtaggtttttatgatcccttgtaaaagttgcttggttttttgtcctcacagcttccctggacacataggcaaatgtttttatcttcagaaggggaactgagctgagaggcaaaggaccatgactttgcaatgactggtaacccagtacgtataatgcaagaactgcattctagatacgcctgaaattaatgtttcctgggcaaaaacattttcattatcttttttttaatccctggacattagctacaggtggttacttgcagatttactgctgtagagctccaaaattgagattacacttttcagattctgcgtaccctaaggctaagaggttgggctattgagtttgggtggtctctttggtcctgattgctacttccaaaccatttctgctcttttctgcttcaaaaatatttgaagttcatatcttctggctaaatcactttctactctccttcctgccatcatccacgagcctcctggtcactttccagaaattatagagctgcttgccgtaggttttcctcaccatccctcttgtctacattctatctgaattcagcatgcttgtaggtgacccatgcaacaccaacacttggcctcttagacctctgacctcttcatctccaacaatttgttcctctcttgcgtctta

SEQ ID NO: 917007 - DNA, 4001 bp, Homo sapiens
caacatgccctactctacatttttaaatggctgaatcaaccacaatatttcatgacacgttaaacatatgaaattcagatttcagtgttcataaagttttattggattatagccacactcattcaattacttattttcagtgctggttttcatgcaattgtgagagagaccatatgaccttcaaagtgtaaaatatttactacctttataggaagtttaccagcctctaatttaaaagatccatgatcgagcatggtggcttacacctgtaatcccagaactttgggaggctgaggcgggcagatcacgtgaggttaagagttcaagaccagcctggccaacatggtgaaacccccttttctactaaaaatacaaaaattagctggacatgatggcaggcatctgtaattccagctactccgggggctgaggcagaagaatcgcatgaacccaggaggcggaggttgcagtgagccaagattgcaccactgcactccagcctgggtaacagagtgacactccatttcaaaaaaaaaaaagtaaaaaataaaggattcctgggtagggggctaggggagggatagcattaagagaaatacctaatgtagttagatgatgggttgatgggtgcagcaaaccaccatggacatgtatacctatgtaacaaacctgcacgttctgcacatgtaccccagaacttaaagtataataataataataataaataaaggattcctttcaacaaatacactgtactatatataaggcattatggctatttgcaaacatagcttagctgaaaatggctgaagttaaatggtcctctatcacttcaaaatatcccctaagagcataaaaatagttgtgttctgaatacgtacctagcgtctttagtgcagtgggcagctgtgaggacccacctctctctcactagggttcccccacatacatgaacaagaacacggccatatttaatctgcaggctcaccacccacggccatgcgccagcttgtgcttcggtgccccctataatccgagacccttgcaacacatccttaagcggtgctgttccacaatctaaaaataaaaatgatatattatttggactgagcatctatagtatgtgttacttcctaagctgaacatattaatgcaatcctttaaattcctatgttaaaaacacaaagcaagctaacataccggagacacgcccatattttgaaagaaacttggagagttaagacaaatatgccataatcgattacttacaaatagacatgaagtcaacacaattcattaattttaaaactctattccccaaaaatataaaaataaaaatttttggccacgtatcacattcttccctgtgtgaaatagcagttaaagagcctgggaacggtgagtcgagagccgcaaattctaatgctcaccatttcacttgttgggctaatttttctcaactatagtatgaaatggtcacctaatagccctccctttcaactctttatcccctgacttattaatctataaaatggggatgataaaacccagaatgttttgaggagaaaatacagattcacaatacaaatgtgtcatttcactattacaactactgttattacagccggtctagaaactgcttaggtatgtaaaattttggttaaaggccattgggacaacagaaaaggagaaacccgaattcaaagactatagcggtggggaaaaggtaagagaggctccccagagacaggcacgaacaggtactgccctctgcatgcgcccctccctccctccgccgccggagcctcttgcggacggcctcagcctgctgggaactagccgccggttccggcgaggggccgagcctgtgccttccagagggcgagtagtggtctgagtataagtgagagctccccacaaacaacagcgccacgctcaggagccccagccgcattttggaggctggtgagcaagatggcggcaggtacttcccacccgccctgggcacgcggggcgcacggcctggcggggaggcgcgagtgaggcccggaggtgtgggaggcggccgaggaataggtaggtcagtttagaaagaacccctcaccctcaaggtctgatcggcttcctcatccaccactatcccccaggtgatgtctgatcaccctggcctgtccagcaagaatcctgttaggtcggttagccggaatgccattactcctgatgctacctcttagtaattttccatccactgacacgtctctcctgctccgtggctgtaaattctcccttggctctgctctgtttggattttagcccagtccctctacccattacaaaatcccattgccatggtccctatccctatctggatggtcctgaataaagtctgccttgctgtgctttaatgagtatcactgaataatttttctttaacataacccagagtttttaagagtgatacctaatgttcagttttaaattgttctgtcattcctatcttgacctatactgaactttgcctttgttaacccaacaccttcagtaataagaagaccgtgtgggctgtgggaagttggtgaggtggtggagagttaacgtagaggtcaataaaaggacagttgccttgctcataccatccttccgaggctggtgcagttggcagcattagataaaaggagtatatgagtttggggcttacacatggtaacatgtggggaagggagcagagtctcagagctgtgccgaaattggggtggaggaggtgatattggagaaacaaattgcagcatgagctgatctctgagggctgacaagaaacaaagtccttattccccagatattttagtggaaggtgatattaggaggagaaaaacacagttggggtgtgtgtatttctgtgtgtgtgagatgtggtcagattgtgtatgcctttgtaaacaaggcaagatgactttttttttctttttttaaacccatagccaacgtgataaggatgacgggtcttgctatgacagatagtagaggtttaacatactcataaagcaagtatatgcagccaagtcatcaaatagcagtgacacaggcagtgggctgggcacggtggcacatgcctgtagttctattatacagcactgctttaaacaatatattttttagttttactactcaggaggctgaggcaggaggattgcttgagcccaggagttctggactgtagtatgctatgtcaactggtcaactaagtttggcatcaatatggtgaccttcgggtagtggggaaccaccaggttgcctaaggaggggtaactggcccagactggaaatggagttgatcaaaattcctgtgttgattggtagtgagatcatgcctgtgaatagccacagtactccagcctgggcaacaaagcaagaccccatctctccaaataaaatgaaaaaggcagtggatcaataactgcagaggtcttcttcctggatttcctctgccttttctcctctcctgcattgtcatttcctgtctttggtgggatcactcctatctgcagacaaatatcctctggtatggtaggtagcctacaaaatgcccgccaatgaaccctgtctcctggtattcacagccttagtcagttccctctcctttagtgttggctggatttcgtgactcacttctagtaaatagaaagtagaggtgatgggctaccactttcaagattaggttataaaaagattgtgacttctgtcctgagcactctctgcagtcctgttgctctaaggtaaagctgctgccatgttgtaagctgccctgtggccctgtagagaggctgccagcaagagccattgaggaactgaagtcctcagttgaacagccacgaaaagctgaatcatgcaacaccgcatgatctgcttagaggcagatcttccccgatcacaccttcagatgagaccacagtgctggctgacaccctaactgcaacctcatgagagaccttaagtcagagaca

SEQ ID NO: 917008 - DNA, 4001 bp, Homo sapiens
acagagtgagatcccatcccaaaaaagaaaaaaagagaaaagacagagaaaaaagaagaaaaccttctagaaagtcaagaagtgaaaacacccttccctactctccagcaagtaggcacaggcatttgactctgccctttttaattgaaaaatactcagacctgtgaccaggatggtctccatggctgttacaaagatagcaagcacatctcatgctgtgaacttgcacatcctaaattaaccaacaaccctgactgtaataatgaaaaagcaggtcaatctagaagtgaaacatttatatttgtcccaaggagattttaagaaacatctgggaaactgaatagcgaggttagccaaggttatctttcagtagaaaacgagaacaactttctaagagaacaaatgtctataacacattctcttcaaagtcaaatatgtaattttctcactctccttaaaaacattaaactttcagtggaagacgtaagtcaaaagcccatgaattgttgccgattgctatggtttccttttctgagtcatcagagacacctgtcaagaggcctcagcctctcatccagagcaggcttttcaagctgccaacccagtctcaaataatcattaccataaacacgggttcctattacacccgttgcaaaaaggcttaaaacgccgataatagcgcaccaatattatttcaacagttttgaccggcgcgttaaaatgaacttcaatgctgagccacattataaagggttgagtcaagctcctgattgtgtaagatagcatttcccttaaatgagcacttctcttctttcctcagaagctaggcttcttttcaaattaaagaaaatactccacccctcaaaaacctggcatattctcggttccctttacgcttattcacaccagaaacgctgaatcatgactccgaggttgtaaaagaaaaactatttcggctggggccccagggtccctggagaagcctaggctctgcgttacctctctctgcaccttctaaagtctagatccagagaagtctggcagattggagagcctctgggagcagccaagggtgcaaggcgggggctggggggctcgggagagttttctgctccctctcctgaacccacgcagccctgtcagctcaaggctcccgcctcgtctcatctgaacgaaacccttaaggggctgatacacttctcatctgcaaagctgcccaacagcctccgagaaattctctacttggaagcatcgccaccaccgccacccctccggaaccctctgggtccgcgctagtcccacttggtcacgatccggcaggcgaaggggtgcggaggcggtttcaccagcccgctcccagccctgcctcgagagagaagcccgctgagagggcagacagttgagaaactcgatcccaactccccagccggcgcctcccgaaccgccccgagagcccagattagccgggcagtggatcccggagcaaagtgccatgcacatcctggagaggagggaggcgtggagggaaagggcggcaaaaatgaaatgcccccaagtcagtcccgcaacttctcccggtccgagggacgggcggagggtagaggaggcagcggcggctagcgcgaggtgagggactcacttgaaggtgaggacgcagagcggccggtaggacttgtggctggtgttctcggccatgcccttgccccagaagtcgttggtgaagatgccccagcggagcggggcgccgggccgcacgtcggggttgttcacgatcgcccacacgtcgtcgtgcacgaactcgccctgcagggagcggccgtagcacaggcagcttgccccggccagcagcgccgcggccccggccggcgctagcccgcagccccgccgccgggagggtgtgcggtccccgccgccgcctcgggcagaggtggtcaccaccatcgcgccgccgccgccgctgctgccctggcctctcccgggcgtctggcatcctcccctaccggggccccggcggcgcgcggcgtctgcccggaggggggctcgggcatggtgctgcggcagctggacccgccgcgagctccccgcgctccgccgccgcctgcgccgcggagttggcccagctgcaaataaacagcagtccccccgcctcccccggccatcgccacctcctccgccccactgcgcatgcccgctcgctctctcttccaccgccccccaatcccgggacgcgggccggttcccccgcacagcccggcgccctctgcccccggcccgccttgcttgcaggtggaccggggttcgcggcgcgcggctgcccgggagctgcggggaaggacaccccaggttcccacttgcggtgtccggctgtgctcacccccacgcccccgcccccatccttctcccccgaatggggctgggaaggggcacatctggcggacccctcccgggggacccaggagggtttagcaggtgcgcagtctggaacccccacacccaccttccagggagaaaagtgccgctgcttcccgggaagttcccggcttttcagcacccgggacaacagcagcggcgcccggagagacgctctccacccgccccgcgctcgcgtccagtcgccggctctgtgctctcctgcccgggctttctctcacccgcccggcgcggcgtcccgcttggcggaggaacccgcggggatagggagcaccttcctcaaagccaggagaaggggtctccctggacaaggacatcctgctcgccctgcccgggtgtgttcagaggcgccaccggctctttaactttacagcccctttcttggcccgcacttacaaaaagtaccaggttcgagttttggtttgggcctgggagccgaattgtcttctgaaacatttcttattttattgtttgctcaagataatttgggagatgccaagcaaactactttttctatctagctggatcacttgggtctcattatttcctgggctgtgggcgtgtttgaacagggcggggaagaaggtggggatggggggatggggaggtgggggcgatttgtattagggcctctggctttggctcctaaacttcctgtctttctgaaagattgttttcttttttaaaatactaattttaataatatgtcccagagtgatgattactagaatttctccaggtctgaaaattctatttgttctttcaggcaccttctaaatttccattgctgagtgttagaagttatcaggaatttgacacatccagatagaaaaactgaaaataaaaagtcacccttttattctcatcctccccaaacccttaaaaagctcaccgacataatccagaaattgttcctctgctatgagtatttgtgtggctctttactataacaacttactttttaaaaaattttaagacatctgagcagttgaaaagtcaatgaattaagataaacttattgtaactcaaagtacgtttcacccattttcactttgtttatttggtgacttgaaattagtgactgagaaatgaaactggaagtcctggacatggatgttttcattcttccatcaaaatctttcacgcttggtaaccttaatataccgactttaatatctagacacacctgagtctatttccccgtataacacactacagcctttcctattcacctattaacttaataaaaatatattaaggagattctttgtgctacaatgtgctaagtataggattggaagacccaaagctgctcgtgtgtgtgcgtctgtatgtgtgtgtggttaacaccataaaagtctagctttctaagttaacagctgattgggatagtgaaattatctttgctgaaatcatagttgaggtaataggtcaatgtatcaatccttacctataattaacggaggctttctagagagaacgtcttaacccaaaagagtgactctaggccaggtgcaatggctcacacccgcaatcccagcactttgggaggccaaggcaggagcgttgct

SEQ ID NO: 917009 - DNA, 4001 bp, Homo sapiens
atttcggctggggccccagggtccctggagaagcctaggctctgcgttacctctctctgcaccttctaaagtctagatccagagaagtctggcagattggagagcctctgggagcagccaagggtgcaaggcgggggctggggggctcgggagagttttctgctccctctcctgaacccacgcagccctgtcagctcaaggctcccgcctcgtctcatctgaacgaaacccttaaggggctgatacacttctcatctgcaaagctgcccaacagcctccgagaaattctctacttggaagcatcgccaccaccgccacccctccggaaccctctgggtccgcgctagtcccacttggtcacgatccggcaggcgaaggggtgcggaggcggtttcaccagcccgctcccagccctgcctcgagagagaagcccgctgagagggcagacagttgagaaactcgatcccaactccccagccggcgcctcccgaaccgccccgagagcccagattagccgggcagtggatcccggagcaaagtgccatgcacatcctggagaggagggaggcgtggagggaaagggcggcaaaaatgaaatgcccccaagtcagtcccgcaacttctcccggtccgagggacgggcggagggtagaggaggcagcggcggctagcgcgaggtgagggactcacttgaaggtgaggacgcagagcggccggtaggacttgtggctggtgttctcggccatgcccttgccccagaagtcgttggtgaagatgccccagcggagcggggcgccgggccgcacgtcggggttgttcacgatcgcccacacgtcgtcgtgcacgaactcgccctgcagggagcggccgtagcacaggcagcttgccccggccagcagcgccgcggccccggccggcgctagcccgcagccccgccgccgggagggtgtgcggtccccgccgccgcctcgggcagaggtggtcaccaccatcgcgccgccgccgccgctgctgccctggcctctcccgggcgtctggcatcctcccctaccggggccccggcggcgcgcggcgtctgcccggaggggggctcgggcatggtgctgcggcagctggacccgccgcgagctccccgcgctccgccgccgcctgcgccgcggagttggcccagctgcaaataaacagcagtccccccgcctcccccggccatcgccacctcctccgccccactgcgcatgcccgctcgctctctcttccaccgccccccaatcccgggacgcgggccggttcccccgcacagcccggcgccctctgcccccggcccgccttgcttgcaggtggaccggggttcgcggcgcgcggctgcccgggagctgcggggaaggacaccccaggttcccacttgcggtgtccggctgtgctcacccccacgcccccgcccccatccttctcccccgaatggggctgggaaggggcacatctggcggacccctcccgggggacccaggagggtttagcaggtgcgcagtctggaacccccacacccaccttccagggagaaaagtgccgctgcttcccgggaagttcccggcttttcagcacccgggacaacagcagcggcgcccggagagacgctctccacccgccccgcgctcgcgtccagtcgccggctctgtgctctcctgcccgggctttctctcacccgcccggcgcggcgtcccgcttggcggaggaacccgcggggatagggagcaccttcctcaaagccaggagaaggggtctccctggacaaggacatcctgctcgccctgcccgggtgtgttcagaggcgccaccggctctttaactttacagcccctttcttggcccgcacttacaaaaagtaccaggttcgagttttggtttgggcctgggagccgaattgtcttctgaaacatttcttattttattgtttgctcaagataatttgggagatgccaagcaaactactttttctatctagctggatcacttgggtctcattatttcctgggctgtgggcgtgtttgaacagggcggggaagaaggtggggatggggggatggggaggtgggggcgatttgtattagggcctctggctttggctcctaaacttcctgtctttctgaaagattgttttcttttttaaaatactaattttaataatatgtcccagagtgatgattactagaatttctccaggtctgaaaattctatttgttctttcaggcaccttctaaatttccattgctgagtgttagaagttatcaggaatttgacacatccagatagaaaaactgaaaataaaaagtcacccttttattctcatcctccccaaacccttaaaaagctcaccgacataatccagaaattgttcctctgctatgagtatttgtgtggctctttactataacaacttactttttaaaaaattttaagacatctgagcagttgaaaagtcaatgaattaagataaacttattgtaactcaaagtacgtttcacccattttcactttgtttatttggtgacttgaaattagtgactgagaaatgaaactggaagtcctggacatggatgttttcattcttccatcaaaatctttcacgcttggtaaccttaatataccgactttaatatctagacacacctgagtctatttccccgtataacacactacagcctttcctattcacctattaacttaataaaaatatattaaggagattctttgtgctacaatgtgctaagtataggattggaagacccaaagctgctcgtgtgtgtgcgtctgtatgtgtgtgtggttaacaccataaaagtctagctttctaagttaacagctgattgggatagtgaaattatctttgctgaaatcatagttgaggtaataggtcaatgtatcaatccttacctataattaacggaggctttctagagagaacgtcttaacccaaaagagtgactctaggccaggtgcaatggctcacacccgcaatcccagcactttgggaggccaaggcaggagcgttgcttgaggccaggagttcaagactggcctgggctacagagtgagaccctgcctcaaaaaagaaaagaaaagagtggcctctaatagtagatttttatagaaagaaagtcttttttccttcctcaaattatccttaagtcatccttttccaaggaagagctctggctacccccttcttctcggagttgttttcttttttagatggaaacagtatcagagtgctccatgaccatggagagtagtgcaggacttgggactgagactccaaagagatcataaaaagaagagataaaggaaacctgaaagtaggattcctggttacctaatctttcctctaggttcagtggcatctttattctattttgctcagatgacaaatttgagattgacttaaaatagtgaaatgcttcaagtcttctcaaggacaactgatcagtgaatatttttaaaaattagttccttcgggcctggcatggtggcccacccctgtaatcccagcactttgggaggcctaggtgggcagatcaggtcaggagatcgagaccatcctggtcaacatggtgaaaccctgtctctactaaaaatacaaaaataacctaggcgtggtggcacgcgcctgtagtcccagctacttgggaggccaaggcaggagaatggcttgaacctgggaggtggaggttgcagtgagccaagatcacgccactgcactccagcctggggaccgtgtgagactctatctctaaaaataataataataataataataataataataataattagtttctttgcagcctcatcacctcctgattcaatactgctctgtgtggtaggaaaagtatagaagtactgatgtcagagagaggtttacattgatatgccagcccatcaagccatttgcttctctcttaaagtggaaaacatccatcttgactaataaaggggcccaaaag

SEQ ID NO: 917010 - DNA, 4001 bp, Homo sapiens
gcaggtgcaccattacacaaaattggagagaacagaaatttacctcactcctacagaccatttctcagagcatgctgtgtagttgctaaaatcagtatgctgcgtaaaagttaagaaaaaatgtatgtctaacagtggttccctatcaactagcctctggtaggcactacataaaatgcattaagacgggtttgctggatgttctggcacctattatcaggtgattttttaacagagatgtgaagatgcttttagcaggagaatgggcacaccagagaatacagaatgtggctaattacgacgagaagaagattctgccttcacctcccctcactgtcaaccactttgcgtaagtgctctcactgcctcgccctaaccctggggatccattcacttttcatagctcagagaggctgctgaaaagctgtcaaagtaaatctgtgctcactttttggatggtttaatttcaatggagcatgaaacaccccaggacggttaataagtttagccaggcgtgctgttatccctaatatattttaattatgcatctgttttaattgtaatcagattaagacaccggaaggacacaaattggaattttccctaatggatataggggcttttcatcactttctgaacactaataacgtttaaaagataggaagagacaccaacacaacggtgacattttccagaaatcgatgcagtttctttgacaacacagttcaggtctcattagccacccaaactaacctaagtgcagaagacaacttcagtctctaggggcgtcttcttctccaattagtacaaaagaaccactaacatctaatgtacaactcccaaacagaaatgagaaagccgaggcttttataaagtgctgcccaatggattggtgaaggaggctagggcggcgggagagaccatcagcagcattattttggctcaaagtaaaagtctatacacgttaaaagggaaagttaaagcagagaacgatctcccttttcacaattttggcaactatcaaacgtgtgttttaacttcgggaaataaaagtgtcccatcaataaaaggaaacgggacagggaggatctatcagggatcgaggagaggcttcctcccaaccagacgtaaaatcacttaatgtgctttgttgcatcaaggaatacctaagactttaatttaatacgttcattaaacagtttcccaaattgccgggatttccgctaagaaactcaagcgtctgccaacagccgagaagcaagggagagaacctgctgcaaactaggagcggaaactccctcggcccgcccagcgcgcctcacgtccccggtgtttgatttaggtgttaatgtttacgtgtcgcctaaaccatcaggtgctgaaccagttcctccaagacgcactttgagccttaaagagggaagcttcagagccactgcggagtgtgccccctgcagcccgtcgccccctcctctcggccccttacctgtcatcatagcagaaatccgcactcagggtgttgagatacaaggcgagccccagagcgctgctcaccaactctgcaatcatctctccaccgccttccctccggctcggctcccagcgcgagggcagcagcggcaacaaaaaacagaagcatcaatctccaccttccgccgccttctcctcccagcttcacttttccctcgcttccccaccctccctccctcgggtccttccaatccacgactcctctcctcctcctcgcgcccgtctccgcagctcctgcgtcctccccgggtgcgggctcacaccacactccccatgcccggcgcccgcaagcggtgagcggcgtttgggctccgcgtcccccggcggaagcgcagggctggtctttcgcgcgggtcgcgatccccaccctaacccatggcagtttggggcgtcctaggtgaggagtgggactcggaggaggtggaagggtgcgggatgggggcagagggaccggaccaagccgggctctgggaccagctggaggaagagagagaaagaggcgcgggtgggagggacaaggcgaaccgcctcccctcgccgcctcccgggcgcactgctccggtgtcgctcgggcggactccggccgccaaggcagctgctgcacattcaatgtttattagctccctcccagccccagccccagccccagccccagctcccttctccagtgaagtgagaagcggtggctggagactccagaagctcccgcgtggggttctcgacgcggccccccgcgcctgcgtgaccaaccctccatcccggcttggcccagcccctttctccacccagatcctcccggaaggctcctcctaccctgcccctcgggctggaggctcctcccaccctccccggcctggaggctcctcctaccagcctcccgtcctcttgtttctttcaccttcgatttcactctggaaagcccccgggacccaagggcgacggctggaagacagcccaaaggagtagatacagtgcaccctgggaggggaagctgggagaaaggaggtcgaggaggaggtggtcggtcgccccgctgctgcctggcagcgcctggcacggctgaatctcagccacagcgctgtgtgtgccaagagctgccaggcgtaagtccggtcagctggagagacttctgagaccgggagaggaagaacaggtttggcgactgctgcagcttcggttgtcacaaactcactggcgatctctcacgcacactgtgtgtgagactaaatgggggggaggaggtagtattggagagcttggaggcaacttaggaaggagagatttcagctcttagcctacggttggccacaatgtcagtggaaagacgtgtagggagagaaacgtttcctccttcagtaaggttaaaaagaaaggaccccaaaaagggaaagaaagacacacacacaccccgcagcaactgcccggggaccccttcgtggtttcagagggactgtcgggttgaccctgagaacacaggagagaaacctctagtgcaagccggtacagcattatacttaaacctagtaaggcagtaagctaatgccctttcctttccgctcggaggcaggactggatggaaagcatccaacatggtgaaatatggtgtagaatggtctgtgtagaacaagctctgggtactaaagttgcaagaccaaagaggacccagggctgcctgacacgcctcctcccggcttgttggctttctggccaggagagtagctccggtgcaccgcgatgtacactactgcagcgccccctgctgcatagtaaccacaaggtgtggaagacaggtctgttttgcatgcgggccgactggttccaaccaagagcagcacctaaccagcaagctctccgaaactgtggcaagaaattgagccccctgggtgtctagcagtggcctggaaagaaaataccgtggtctgggcttctgtagaacaaagctacatatttccctgatttcacaaggaaatctgagaaatctgtattggatacacacagataaaatgatgaatatttattaatattatacctgttatgccatccacagtagcacattttttgtgccctggacaaatatatgtaaacaaaaataaaaggaattatgtctttacaggtagggactgatcttttacccttttcctccataacctttgctcacttgaaaattttgaaaatcatatcagttagtccatcctgatgctctgtgtctctccaatgcacttacatgctgagatatatatagtatatataaaatatgtatatggtgtcctagaacactgaaggaagaacacatactgtgggatcagatgtttaagtttgagtgcatactctgctattactatttgggcgatctttggccagtcgttcaacctctttgtgactctgttttctaatctatgaaacagtgataataatagtacttatcttatgagtactgttattatgagtattaaagtagttaacctatgtaa

SEQ ID NO: 917011 - DNA, 4001 bp, Homo sapiens
cattgtcagaggtatttgaatcacaacaactccatcttgaataggggctgggtaaaataagggtgagacctactgggctgcattctcaggatgtctgtcagtcattctaagtcacaggatgagataggaggtgggcacaagatactgatcataaagactttgctgataaaacagcatgcagtaaagaagccagccaaatcccaccaaatccaagatggcgagaaaggtgggacgtctgctcgttctcactgctcattatacactaattataatgcattagcatcctaaaagacactcccaccagtgctatgacagtttacagatgccatggcaatgtgaagaagttactctatatagtctaaaaaggggaggaacactcagatctaggaatggcctaccctcttcccagaaaactcatgaataacccaccccttgtttagcatataatcaagaaataactataacaatccttagtctaccacctccaatgggggtgtatgcacctccaattctttcttggcgagatccaggagccctctcctggggtccagatcagaacacctttccagaaacaccatcccatgttaaattatgaattaagaacactgaacatgaagaatgtttaattcaaattattgagtaaacacttacaaaattaaaatataacatttaataaaaatagcaagattgaggaacaagcacttcacaaatattggtttcccagaatgtctgaggaggtgtatagaagttaagaatatgtcctccagccagagagatctgtgttcaatcacactatttaagttacttagcttctccaagcctcagtttcttaactcagatggaaaatgaggacaatgtaagcacctatttcactggattgtaaggaagaataaacaagataatgaatagtatttggcatataatctttcagaaaagtagtaaaattgtcattcctataaatctaactaatgtctttaaaattcatctcacaaaatcagtatctttttattttgtactgagctacttattttacccaaattgggggtttaaaaagaaactcattacttattttcgaaaggaaaatttactgtcaagtacagtaattttttttttaaagcagcgtttaaaaaaaaaaaaagacaaagcactggtccagatagttggaaatgtcatttagatttaagtctacagcttcttaggaaagttaggtagagatgtatcatactccagcatgattgtgagcagacgagcaggatgagcaaaacttgcacgagtaagagtggtaaacaccagagaaggcgctttcatggaagggcaccctaggtaaccaagcaagtggcaacaatagtacaggtgagtccttggatcccttctctctccacccccggcagtggtccggacaagtactaacctctcctctctagagccttgactttatactagctccacaaccatcaagccccacgatccgcgaaaggaatggtgctacaggtaaggcgggcggggtcgggatgccgagacctcttgtcaattcttcgctcgcccccaaacgaggatcacggctgcgcggctctcactctaactatcaagacagattctgatactaaacaaggctaaaactttttgttttttccttcttacagaaggcactaccctggacgccgcttgcaaacgcctgaagagaaggcagggtgttcccactttttcagaatgggaccaggccctacggccccaatagcagaagcttctctaacccaggactgctcccctcaattcctcccaatatgctgaccgacagctcgacctcacctgggggcggttccgccaggggatggcttaggaaaacctcaggaagagcagcccagcgagtgacgccactgaaaccacagtcatggtctacctcgttcaggccaccagtttgcaggcgcctgagccgctgctcctcccgcctctcggtccttccccgccgccccggtaccgtcgcagtcttacgcgttgcatgccgggagcgccttacctcctcttctcagggacttcagttcccagcatgcagaagcctcaggcagaactgcactctgggatttgaagtcctcgttccacgccttctcatcatcctgaacaccgagctctgggactccggcggagaatctaaacgtaaagcatcacccacggtcgtgaactgtaggctctcctggcatccgggatcttattctggccttggcggagttggggatggtgtcgcctagcagccgctgccgctttggcttgctcgggaccatttggctggacccagagtccgcgtggaaccgcgatagggatctgtcagggcccgcggccgggtccagcttggtggttgcggtagtgagaggcctccgctggttgccaggcttggtctaggtgggtggatccttgtaagcaggattagcgagtcactccacgctcaggttctttagcctgagggcccgtgtgccacagcatagctaccccgcccttccagcctcgggtccctaatactgccttgcttcggttccagtttccgccgcacaacttcactcattccaaatgttaatttctgcgttttttttcagccccaattctgtttctccaaatcagggatgattgtcggccttccacagaccctcgcgcttgccaggattagggtgttcgcgcgcattgtgggtaggggtgtggaggaagggatccagaaatcttaagtattaacttagattagtgttagcaaggaagccgtcacattttatttagccgggacactctgacagtttgtgccgactgctatttttgatcaaggctattttgcccacttgtctattttgtggcccaattgtctgttttgctaacatcagaaagttataatgaaataatctgcaaaaaatgtaaggtgctagaaaaccaataatactgtgtaccttgaaaatgctaatatacacctgttttgttacagaggtggagcacagtgaaagaattcaagatgccacctaatataaactggaaagaaataatgaaagttgacccagatgacctgccccgtcaagaagaactggcagataatttattgatttccttatccaaggtgcttaattggtcaataataatagatatatacattaacttatgattaatttattaataaaatatgaatttatttttttcagggacaactataattgtcacaatctggaagtgttcttatattttgcttgaaggttataaaatataaaacagttgcttttctgtttacttaggtggaagtaaatgagctaaaaagtgaaaagcaagaaaatgtgatacaccttttcagaattactcagtcactaatgaaggtttgtatgtagtaggttttaactataggtttggctattagtggaactataaaaatctgttcttatataaggtaatctttgtgaaaatacctggtaatatctacatcaccactaaaaaatgcaatatatttaaatgtgaattaagtattttagtgtataaaacattgctagtttctacttaaagtttctaaaagggtgtgtaggggaaatagaatgagtatgttgaaaagtaacataaggaaatatatcttgaggtccaaatgacaaatgcagacaatgactgctatagggatttgttaagaggggaaatgatttaagagatgtcagaagacttcacaaaggatcaatactgaggagtagtgttagataagtggaaggcaatgcagtggtaagatagtaagggaattctagagctgttggttaccataaataaatactgagaacaggaaatatgtttattctttatatttgaggaaacaaggtgcagcaagtttgtagcagactgtagagaaaacaaatcttgggtaagtactttgagataggttgttgagggccttaaaggtgtattttatgctatcagcaattgagaaggcagtaaaggttttcgaaacacaattgataggtacaaaaatacaccttaagaaggcaaaactgagtata

SEQ ID NO: 917012 - DNA, 4001 bp, Homo sapiens
tttattgagtgctttctatttgctacaacctattcccctgatggactgtcaaagctgtgggcagggattttgttctctgctgtaatcccagcacctatcacagtgtctagcccagagcgcacacttaataaatcaaatgaacacttaacatgtatcagtctattcaatcttcaaaacaacagtatgaggtcaagactgtgacacccattttggagataaagaaacgaaggcatggaaggttaggttatataagctgctcttgttcatgcaggaggtatgtgagggagccaggggccgcccccaaacagaaaacagaagcaggatgtcagggcagctggctggtggggagaccgtgggggaaggacagtgggaagaagggaagagcgggtgggactaaggaggcaggaggaggcagaagaagaagagtgagaccctgaccagagacgtgctgcctggggacctggggccgggaccagagcggagcagagaggaggggaaggaggattagcgagaaaagatttcaaaaaaagaggctctgagaagtctgaggagagtctggggagattgctggaagaaaggaatggtaggagaggaagagtataaggcactaaagagaggggaggtaggcgcagccttcagaggccgggcagggcagggaaaatctgcctgactagatgggcccaggacatctgaacaggatgattcccggaccaagacgtggaggacgatcaaggatacattgaaacaaggctgaggccagagaaagggacattttccagtgacgaaaacaactttctaccaacttccccaaactgaactgtagaataagaaaccaagggattgttgtttaggtctgtgagaagcagcggggaggggaagctggaggacaggcccagggacactgaccaggtgggggtaggactagctccctgggaaggctcagtcccacagcggctacctgcctagcagcaggcaaaagggtaaagaatgtccccaggtgagaggccggggcttggccagggcactggggacactgtccactgggttgccctgccccatccagtgtcccagcccattctcaaatacctcccaccatgagcatcccaaacccaccacaccagcccatccccactcctcaactcactcccccacttcaccagccgccaaaatcctgccctacagggtgtgctccaccaagttccacaggcagcctcgcctccccacggcccaacaccctccaggccagccagctgaccggagggacagaattcagaaccgtctggactccccgagcactaatcttcctactcccactcccttcttttccccgccaaatctgccccaccctgggcctatctcctgcccacattcccttggccgcccacaaacttccaccgctgtcaggggccagggcttccttttactctctccctttcaaacttctcccattcccctgcctcagcgcagcccctactccaaaaggcggatgaatggggaaccccacactggcagtggctgaggttaggacctgcaggcctgaggctggcgccaggaccaggcccgggcaggagaggctcggccccctcccggagagggcccacgccagccggaaggtgcctcgcccaccagcccactcttccctttgtccctggtctcaccagtggcagcagcaggtcaggcacggtggagaggcccatgccagacagctatggcctctcactcccccatttgggctcagggcagtgtggcagcggcagtgctggggcttcccgggactcggtctgtccaggacgtcccaagtgccttggggtgacagttgagggttgagactcgggcatagagatcacggcctggtcccagtgatcttgaaccccaaaggccagaactggagcctcagtccagagaattctgagaaaattaaagcagagaggaggggagagaaggtgggaggggaagagtgaggcagtgttgcaacagcgggacaggaagagctggaggaggaggccacaggaggcgggaggaggaggcccaacgttctttaactctttgtagtccagtcacaagcacaggagtcccagatctggctgccttgtgcccccaacccaccaatccgaccactcccaaccaaacaccaaggggcaataagccccttgcccacatcactagcctttcccagatggatcacagcagtgaaaagatccagagtctgggagtcaaattctctgggttccaattcagaatgcttagctttttagctaagaatgtgtcttggacacataaatgaacttctcagacacataactgaaactgtctggatctgttttccaatttgcagagtggagataacctgtctcctggggttcctgtaaggatttgttcagatgggagagatatagataagcgtccgacacatgataggtactccatgtcccttagtaatcctcccctttactccagagttcttcactagcctcctagtctccctctttcttgggaatttactgatccaatccaaaactcaaagtaagtcccaaccctcgttttctgccctgactgggtgcctgccattcctcaccccaggtctcatccagtctctgcctggccaggtccccccaccctgccccactgttgatcctggctctgccaccaatcatgcgacatcaggcaactcctctcctaagcctctgttggttccttgtttattaaacaggggtaacaatgtctgcccacctacatggggaaagtgatgccatgagaatcaatgagacgtatccacgaagctgccgtggaaataaagatacctccatcaggtgttcctagcatattcccagtgcccttttcctaaatattccaatacatcaattataactcaccttacagatcatcgactacaaccccctaggtttttttatttcttcgtttgcttgtttttcatttttgtttttgttttgagggtccgctccgtttcccaggctggagtgcagtggtaccatcgcagctcactgcagcctcgacctcccaggttcaagtaatcctcccacctcagcctcccaagcagctgggactataggtgcataccaccacgcctgggtaatttttgtattttttgtagagacagggtctcaccatgttacacaggcaggtcttgaactcctgggcccaaatgatctgcccacctcagcctcctaaagtgctaggattacaggtgtgagccaccgtgcccacccaactgcccggttttatagaggagaaaactgaggtccagaaacccaatgtgccaggaggcagagccaacagagaaccccagactcccgactgccggtccaagggcccctttggctatgagagacacactgccactttttctgtcactgagtcagaccccacatcctgactctggttactttatgccatcctcattgatgcagacatctcccaagagaatcctacaacaaaggtaccacatttacccaactatcttcttggtacaatgaccttccctacatccagccccgcccaagggcctgcagctgctgaggctgctagaaatgcaggcagacagagaagagggaggtcctagggctttggaacttgaaaccagagctcctcaccccttatccctctgagatgacctcccagccccaagtccaccgtcccctggctcttcctggcttcccctctgtgatccgcagatgagaatggagcttcagtgtccctcactgcggggggagctgactttactccaccccatcgtccagcttctggagaactgtagggttgaagctggattcagaaaggaagcagctcaccaccatcacaaagggagaccccagggacaggagaagcgaacccaaagcagtgttcttgaagaagcaggagcctcagaatcaagtgcaagtttccagtatgaagcagcgagaagaacctcggtctgctcatctaaaaaatgggaaacctgctggtacccttcacagagctagcttgatgcttaaatcaagcat

SEQ ID NO: 917013 - DNA, 4001 bp, Homo sapiens
aaagactcagcagatctgactgcagacctttgaacttgcaaacagcagcaggttccttcctcaagctgtgggctctgggctcaacccactttgcctcccaactgacctagtcaatggcagctgagcaactgacttcttcctcgaatcattggaacaactccaagcaaatccttgtgcatccacagggaacagtacaacgttttgaaacaaggcagcgaaagtaaacatcattctacttgctgctaagcccgtagctctctgcccagcacacttcctgtgagtttttttttcttaagtttcctccagatctggggatttattttgcttttaaatctcagcagtggaaaggcagaagaggaaatcccagatgagacactactatttggcagtcttaagaattatggttgtattgtcgttttggtttaactttttaccacagatattttcaaacattctcaaaagtgcagagaatatatacgtgaacttccttgtatccattactcagctttgacaattatctcccatgtttactttgaaggcaggagaatttattaactcacagagaagaggtttcttaatgttaccattatcataatggctagtggtttctatgttttaactcacggctgtccaaccttttggcttccctgggccacgctggaagaactatcttgggccacacataaaatacactaccattaatgatgagctaaaaaaaaagaggcaggggggttgttcatgcataattttcatgatatctgccaccatagattaaagtcctcgcattcaaatgcttcaacacggttgtttaactgtttaatatatgactgcttgcctgcctgtactgcctttgcccactggctttcaactggggtgatttttgcccccatggggacatcggcaatgtctggagacatcttgactgtcacaacttgggagtggggggattgctggtgggtggagtccaggtatgccactgaacttgcttcaatgcacaggtgagacctcccgaaacagaattatgtggctcaaaatgtcaactgagctgctgttgaaaaatcctatcttagctaatatccccactttaggaatgaggaaattgaagcttggagtggttaacttgccttttataagtttcaacccaggcagtctgaatcagggaccctgcctgcttaaccattaccctatatacacctacgactagaaccagtcccctgatttgaattcaaacacgtcatttttccagacagacaaaaatgaggcccagagaggggaagagacttgcccaaggtcacacagtggaggagtagggctagaacccgggactcctgcgtcctggtccagtgttccctccgcgggctttgcttctgcctctacagaggacccaactggccagcgctggggaaagggcctaggggaagaggttcagctaccatcccgctgtccgctggggcagcctgacccaggcacaagactcctgtggggtcacctaagggcgccagggagaagagcgagggagggaggaagaaggaggcaggacagctggctccagctccacgtgctcccagcccctggctgggagcccacgtgagggtcgccctaagaagtcgggggcgaggagagagggtgcaaagccccggcccgggctggacggagagaagcgcggtggagacttccctgcgccccctctgggcccgtacggcccacctcccacaccagagtgctgcgccgcaaccccttactccgcgtcctctgacccctgatccctgccctctccctcgggccaagccgtcgcatccctcggattcttacacgcgccgccccagcaacccggaccgcgcgccggggtccgcaccgcgcagcctagcccgccggcgccgccgccaaaaccccgagcccgaagctgttgcagccgccgcagccgccgaagccgccgccacttcagccactgccaccagggcagctgcgccagctctcctatccaccgcctaccgtcctctcaaccccgctggccccgccccatttccccttcacagcgtcctactggctaactgggctaccgtgatgaactctgattggccaactatcacgtccttccgcaggtctcgcccgccgccgatgcggtactccctgcccgcctccttaagaaggggcgggacgaagaatccacgccccttactcctcccttgttccccgccttactcgttgagtccaacccagagggagtcccaagtctttccattggtgaaaggtcaaaatggcggtgcttctgattggtcagacttcaggaggtggggacaactgagcggaacaataaattgaatggtgaaaagaaaggtcagtcagacaccgagtctcgccttctgagattggcgggtaacctagcaacgcagggaccgcggcggtaactgtggctagggaaacctggagcggtcagagcaggtgagtagccagttgggaaagggtcgcggatcgggggagatgtggaatagggttcagccctctgtcctttggctccctgaggaattagaagcccccgctgcgatctcgtctcagcttcaggaccctgtccctcagctcctgccttagtctggacctttcgctccacaacctgcagggagccggcctccattctgcccttctacctgcccacttcatggctccactccctcatccctaaaacgaggaggacaacagtcaagcagagtcatatcgtagttaacttatttcaagtcaaacatgggagctgtgggtgggaggggagtttataagtcccctcccatttcacccaacggccatacgttcctcggtgagcaggcaatctcacttcagtgtttaaattaggtagttttgtttgtttgttttgttgttgttgttgttgtttttgccgagcatggtggctcacgcctgtaatcccagcactttgggaggccgaggcgggcagatcacttgaggtcaggagttctaggccagcctagccagtatggtgaaaccccatctctactgaaaatacaaaaattagctgagcatggaggcgcacctgtaatcccaactactcgggaggctaaggcacgagaatcacttgaacccgggagacttaggttgcagtaagccaagatagcgccattgcactccagcccgggcaacagagcaagactctgtctcaaataaataaataaattaggtaatttttattacaccacttttgcctttatcctaactttggaatttaactcccatctccatccttaagatgtgatctcattgtacctactgaagacagagagtttcttgtgatgattaaatgaggctaagggccgggcgcggtggctcagcctgtaatcccagcactttgggaggccgaggccagcagatcacctgggccagcagatcacctgaggccaggagtttgcgactagcctggccaacatggtgaaaccctgtctctactaaaaatacaaaaattagccgggcctggtggcgtgtgcctgtgatcccagctactcaggaggctgagcgggagaatttcttgaacccgggtggtggaggttgcagcgagccgagatcgtgccactgcactccagtctgggtgatagagcgagactccagctcaaaaaataaataaataaataaataaataaataaggctgaggtgggagaattgcttgatcgcaagaggcggaggttgcggtgagccatgattgcactactgcactccagcctgggcgacagagcgaaaaaccctgtctcaaaaaaatatataaaaaaaaaactttgaggttcaaaagatattttcataagaaaatgaaaagatcagccacagacacagacatggaggaaatatttgcaaatcatgtgtcataaaagagttgtatatagaatataaaaataactcttataactcaataagaggacaactcaatttttttaatgggcaaaagagttgagtagacatttaaaaatcaaaaagacaataccaagtatcatcatgtagataaata

SEQ ID NO: 917014 - DNA, 4001 bp, Homo sapiens
caccagccccttaacctccctccctgaatcctggcaatcagcccggaggagagaacgtaaaaccactcagaggacgggaaggagtggaaagaaacagctgaactgacaggcatgagaatacaaaacaacaacgcaaactctgactcgaagcaggagagacatcccggtgcagaggacaggcagacaaaccagaatgacctgtttgcacacacggtaacactcccacatgctgatgtcacagggcccagacgctccctcgaaacagctggctgctttgcacgccacatcggaaatgaccctgcagggaatccaaggtttctgtttgctggagcacagcatgcagcagcgtcctggtggtgccagataaatagaaacagtttccatatgccagctataaagatgcactggggaggagcaggaaagaacaggcaggaggggaaggcttccacgacccacccctcacccagcaggcgcagggggcagcccggctgcgtaaaccactggggcctttctttggtgcctgggccagagatcgctttggataaaagggcccctcctgggagggagctctgatcagaaaaagcagagaatgactgttctcaggaagggtgatactgaggggcctaccccttttcttttctttttttttttttttttttttgagacggagtcttgctctgtcgcccaggctggagtgcagtggcgcgatctcggctcactgcaagctccgcctcccgggctcacgccattctcctgcctcagcctcccgagtagctgggactacaggcgcccgctaccacgcccggctaattttttgtatttttttttagtagagacggggtttcaccgtgttagccaggatggtctcgatctcctgacctcgtgatccgcccgcctcggcctcccaaagtgctgggattacaggcgtgagccaccgcgcccagcccccttttctaacctctctcctttttattttctttctttctttttttggagacagggtctcactctgttgcccaggctggagtgcagtggtgcgatcatggctcactgcagcctttatctcctgggttcaagcaatcctcccacctcagcctcccaagtagctgggactacaggcatggattgccatgccctgctaattttttgtatttttttgtagagacagggtttcatcaccatgttccccagtctggtcttgaactcctgggctcaagtcatccacccagctcagcctctcaaagtgttgggattacaggcatgagccactgtgcccagcctcattctcattttcttaaacacacacaacctcacacattctcaaatgcacacatacaccctcgcacatcctctgtgagacgaaacagaaccctggacacccaagttcactccagctgtgcctcctccactccccacagttcacgatcttaatccccagagcctcagtttcttcatccagaaactgggaccagtgccaaccgtgctcccagcatctcagaaacaaatgcgaatactcacaaagcactcggagccctccggaaaccagcgcctaccagaatgacaacgagcaaccgccccgccgcttgccagttgtcactgagagccccacaccatgggaaagagctcaaagaggagaggaaaataaaccagagtgacactgatgagttttccaggcacagcgttgccaccatgcttctgtgccggctggctcttcaaaggcccccagataaaaatctagcatgagatgctacgccgaaagaaagcaaaatgcacatccccctgctcaggccttctctttctgataattggttgcaagatggtatggaaggtggacccgcattattgacacacgttagtaaaggctccaaacccaagcagagccctgggcaaatgtaccaaccttcagaaaggcaagaactggcacagagccctcccagttgaattgctggcctccagcccaaaatctgtcctgccaaaggcttaagccaaaggaggaaagggaaaaagaaaggctcaacggggcagtaccacgggtcaagccctgttctagagggagggactctggtgtgaaagtggtcaggataatgccctgtgtctcctctaactctgtttccggccacctgaaagggacctaagtggccaagtccagagaggttcactgtcatccatgaggccaggcccagggagcctggaactggcaggggatggggcaaggaagcggagagcagttctataaatggagtgtgaaagacatggaaaggcaggaggggtgcagatcagaaacaggcttttgggagttaggggacagaggagaatgtaggcagggagaggggctgggaaatgagcacatcaaaatcatcgggggcagtgactgcagcctgagatgcccacttcctaaccgtccacatgaggaacacacaacagacatcctaaggttgcaaacattgccttgagaacacctttctaaactttttttattttatttttatttttatttatttatttttgagatggagtctcactcttgttgctcaggctggagtgcagtggcacaatcttggctcactgcaacctccacctctcaagttcaagtgattctcctgcctcagcctcctcagtagctgggattataggtgcctgccaccacacccagctaattttttgtatttttagtagagacagggttcacaaagttggccaggctggtctcaaaatcctgacctcaggtgatccacccacctcggcctcccaaagtgctgggattatagggatgagccatgctttcccatggagtgggattacaggcatgagtctgtgcctggcctctagtcttaataaatcacatgataattttggggagaaaaagggaggatgtagtatttttttttttttgagacagggtcccactctgtcatccaggctaaagtgcaatggcacgatcttggctcactgcaacctccatctcccgggttcaagtgattcttgtgcctcagtctcccaaatagctgggaatacaggcgcccgccatcaggcctggctaatttttgtatttttagtagagatggggtttcaccatgttggctaggctggtcttgaacttctgacatcaagtgatccacccacctcagcctcccaaaatgctgggattacaggtgtgaggcaccgcacccggccagatgtagttttaaaagactgaccacctacatgcaaacacatatggtttaatttgaggagacatttattcagcacttactgtataccaggcattgtgctaggtgttggattagaaaaggtgaaaccatggccctcgccctcatggaactctccatcagtaggtaatgaaggatcgtgactctggtgcactgagatctaaaatgggctgggatgacaagggccctccgtgggggctggtggccagtggcagggaggaactcaggggaatgccagggctggcatttcaagcatgagggatgaggaggtattcacagggtggatggggatggggtgagtggcacattctagaaacaaggatagtcattcagagagcacagagacttcaacagcagggcacgtctgagaaactgcagagggttctgtaattctgaagcttaaagtgccagagaccagtgaccaggatgacgcagtgggcaaaggtaacagccacgattcgcattcagtacttaccacacaccagacacggttgaaagggctttacgttaattaattcttctaagtgtacaaaggccctacaaacaagacttgattattatccccagtttacagagggtgaaactaaggcccagagaagctgagtgacttgcccaaggtcacagagggaggaaacgacgggcagccaagccctcacctttccctccactgtttccgcaaggctgggggtgtaggccaggcggaaagccatgctgagggcctggacttgagccactggggactaatggtgtggagcaacctgatcaggtgtgctacttggaaaaacacagcca

SEQ ID NO: 917015 - DNA, 4001 bp, Homo sapiens
aactgaaaaagattaacacttcattagccacttaagattttatattgcctgatgaagtaatgtctattaatcctgctggctaaagaaaaaaatgacagattccagtaactcaggtcacattgccagaaatgcagaataaaaagctggaaactttatttaggaatagaatgggaggaaacaaaacaaaaacaacaagctggaaactttcatttgacagacaatgcaaaattatgtggtctgttttatattctttatatgcaaatacagcattgggcagacatagaagtaactcctggcaaatggtgatttaatacaatcgtaccaatctactacatcctcatgaaactgagaaatgtaggtttgctttgggacccagtgaatagttatctgccattgtcttcttctgatttctctactggctttattttcacacatcagtattgccttactcactagatttatatataatagagatggagattttattatttatgacttgagggagggaagaagtttatgcagacattgacatttgacagtatgtttagtcattaaaagctcaaatgtctcagtgttcttaacatctgcctcctcctcaccacacaacacacagatcttgcatacagaagtagcattttttatataaaagggtcatacattaaccattaccctgagcttactttgttttccttctagcagttaattatgacttcaaaactcttcattgtaatatctcatccaaatattcatgatatttaaatgttaaaaaatctatttacattttggcctcatttttgcaaattgatttaaataattctacagaagttgccatgtttacttttcaacatttttatcagtaataatatgtcagtccaacgcagccctctggcacatatttggagctacgaaattaaaacagatgattctatgatacagactgaattggatttggttgataaactctgatagtacagtaataaaataccatttaatatttttaatgactaggacctggatacatttttatttcgtggtttttattaaatcccatgactactacctgaaagcaggatctaaaatcctgcaaatactgcttttttatcctgtagatattataaacataaaactcccttaaatactatagcaagtggtgtattgctttcattattccatcaagtaaactgaaaaaaattgagcaatgtgaaacacagaaaaacttttgaaaggaatccaatctttcttttattccaataacctgcacccataactaagaagagaaaataatagttctatgtttaaagaccaggctttgtaaactgaagggggtgtaggagacacaatgatcttctgaaaaccgtggaaatttatttaatttgttctccctactcctcctcctcataataaacggcttttcaaaattcttcacactccatttttttttttttttttttggctgtagatttaagacattgattcatacaatctctcattcttaatgttcaggaacttcttaactctctacttacaaactttgcggaaaaaaagttgagcacgcagtgattggcacactcgctttacttatggagagaagaggaagactggaggcagacaggaggaaagcagggtagacagattataaagaaggagaaatttgaggtgtgcgtgcttacactacaaaagggattcatatggtgaggagaagatggtcacaccctaaaaaataattctccatagtgccaggtacgtagtactcactgttgagctgccaagtagctgatgctcttcgggcactgctgaatccagggaaaaccctctccgtgcccagtatttactggaaaacatcatcattgctggctgcatggatcccggtgtaatattctttctctgcagcagggggtactagaggggcagtagcagcgctggcggagattgagaggaaggggcgtgcgatcagctgcctgcttggggcgctgtccagaaccctggtgctgaagagcaatgcgaatcctcccatccccgggctcctttatatgaatgactggagactgatgcaagactgattagaaagaaactcatttctggttgccgatggccacagtcagattacagacctgaagcctggggttatctgtgctcatagtgtgatttgtttcataggtcgagtagctttttgggcgggggtggtggagaacaatacataagggggtgttatttgtacaagaaaccatctatcctctgacgttagttctctcatctctcaagcctgccactggcaagttaacctcagtctttaagcaattgtgaattcaaagattttgtgctttctttccaaaattagaaaaataatttaagaaagatcagcactgctgaatgcttaaaccattttacggattttttaatttttaatttttatggataactaatagttgtacacatttataaggcacatgtgatattttgacacaagcgtacaatgtgtaatgatcaaataaggtaatcaagatatccattgcctcaagcatttatcatttctttttgtgttagaaacattccaattccactcttccagttattttaaaatacaaaagaaaataaattattgtgctcccgaacactagatcttatccctcccatcagcatattttttttactcattgaccaactccattttatgttaataagctttttctgacttgacatattctaattttgtgcatgcaaatgtgtgagtgtatatatgtgtaatggctttcataaaagggcttcttcttaatcctgtgatgcctctatgcagagttatatggaggaaaatgtattgcaaaggaaaggtaagggttcaatttagccacatgtagattacatatagctcagatactaatcctggaatcttccttactaaatgagaaataaaaggaaactagattcccatatatcagccattcattttaatactcttgtggtttttctctctactggaaatcatggaaatttaatctttgacatgaccctttcatataaaaagtgctacttaaatatacgagatctgtgcgttatgtggtgaggagaaagcagaggttaagagtactatgacatttgagcttttaatgactaaacatactgtcaaatatcaatgtcaactagatcaaatccagcaacttgacatgcatagattaatcaatattcttactattcaaaccttagaaagtcataaaattcaccaggccacaggaaaatgttaccaatctcctgaagaatgaaaaactcttgaccaaatgtgcttgtttgactgaaaatctaaacaaaatctggtgctggcactgcttgtctatatagaaaaaaaatttcaaaacaagtcgggatgaactaatattgactgaagtttaattgtttctggagtcttgaagagacataattattaattgatctaattctgaaaatattatttggcttacattttctgtaagggtcagctctaatcagctaataggagaagcaagtttaaataaggcaaatgaactaatgacaataatagtagctaatgttactgagatgtaatgaaagaaccagagatgtgaagggataaaatccactagatagtgtccctgcttggatgtggaaatgagggaaaaaaagatattaaaagtaatttatttataatatatatttagaatattaaagatttaactacttttgctcaccctggaaaccctattaaaacaagataaaaaattccttttcaaggtacacaagagtcgcataagttggaaaacaatggcaacaaaaaattagcagcttgaaagaagaaaaaactgatcaaaggctttgcagtcatgggaaagctgaaccttaagctatcaatgaagaagacttagaagcaacgcactttacatgacagaataccctaaaggctcaaatacctctggaattgaaggtagatgagactgaaaaagagtggttcaaagtgtgagaagcagttagacaaatcaaaacttataacaaag

SEQ ID NO: 917016 - DNA, 4001 bp, Homo sapiens
aagcaaagattgtcactccccctcccctttttccttttctggatcagcatggggaccaagacaggctccagggcctgaccctaccctctgagtctctgtggccctggataggctcaaaggtccctttctccagagatacctgcgatgacctttgtctgctcgaaaacaaccttctcagtgatgccagcttccctttcatctagcttctccccaatgcaggcgattactccgagtccctctgccagagcatgggccactttctgcccaatcagctgttgagaaacagacttggtgagacatccttcttggaaaaagacatcccttatcttctctcttggctactaacctcatctgactccccaaagacatgccttctctctgagtgccccaggaccacccacgtggctccgcagtctttgatcatgccagggctaaaggaagagatgaagccaaggttcagcagggagcccaccctgtggctttcccctcaacgaggaaagtgagggaagggtcccacacacccctctccacctcgatctcacctgatctccccagtaaaagccccattagtcactttgtagcagttctgcgcagccacagcaatcttgggatctagcttctgccgggcgaagtcgatataggcagtagggggagcacaaaccacctctgaggacaagatggtaccacagggggatgagactaaagaaagccttcattccccacaattcctaaccagtgccctggagccccccagccctcaccctcttcttcttggttctgctctcccccttttcaccccagcaagatgacctttgtccattttccagcccaggctgggtctgcactcaactcgaagagccttccagatacccctgagaggccacggccctcaccctgccctctgctcttttaacagctggggctccaatttcctcgagctattctcggcataggcacctcacagactcagcattctccagggagcaaccctgcttcccttctaaaatagcccatcctcacctcccctttgcaaggcaaggatttgtagcaaaaggagaggggccaactcctggggtttgtattgaggcctctggggaatgaacgagaaggggatgcctctttggatcaggcccgcggctctccgatttcggtggagggaggaaggaggatggaggagagcatcctttgcccgtgggtggcagagacctaactgactcagaggccttgcgctttgctgtttccaggttggggaaagcggtaggatggctcctcactcccaaatcgctcagcctgtttggcacgggctcggtcccttccgtggaaggcgggagtcgttcaggttgccgaagggaaggggtcagatctggggctcagggagcccgagcagctcggcgcggggacgcggacgccggcgaggaaggggaggagtctggggctacgtgcggcggcgcacggcgcgggaggccagggcgcagggagcgggaagcccacgcggcccagcctcccccggtctcccgcagagcctcgggctccgctcctaaccccgtcgcctggcgggcacagccccagtgcgcgccccggggccaccttcctccaggagacccaaaacgtccttacctgccccatagtccaaggggcatcatgtgctccgccctgccccctcgacgcaccgacggggctgcggctgcgaggcccctgcccggaccccagcggccctcgtcccacagccctgcatcaggtccgcgcggataccggcctcggggcctcggggcctcgggagagggcgctgccactcctgccccggccccggccccggcccggccagacccctcctcggcgagggcttaccggtgtcggccggcaccttggccgcgttcagagtgccgatgagctcccccagactctgcttccgcccgttcatcttccagtttcccccaacgaagaacttcctggagggcgccatggcgctggagccgaggcgctgaaggtcagtgtctgcgcgcagtcgcggccactgcccacttatatagagcgccgcgaagtggaactccgcctcctcgccgtcctccgccatggcccgcccagtcccccggagccctgccccccgcccgccctcctgccgccgccccggccgccgcccgatgatgcactgttccgacgttcccccttcttgtggcaacgttctaggagagtcgggggctcggtcgcctccgcctcgattgcggggctttcgggacaaggcgagacctgtgagctccggcgctcaggggaaccctcgcttggcgacttgagtcccccacggggccagaagtggttttcaagcggaactagctggtggcaacttggccgtagcccagatcgcccactggggcagagagggcccctctccaactgtgggatagacaacctccttcgcccatcggagcagctcatgcccgactgctgagcaggcacccttgtacccagggagtctacctgagtgaaaacttgcgggacaaatgcagggttcacagcgggaggggcagcccacacaggcataggccgccaggatcatcccaaccctcgccccggctggcaaggcctggcaggaactgcagggactgagtcccagcctgaagccagctagccagttagggacatttgggaaatcctccactcctgtgtgaataaagagagggaagggttcttcactccatctttccttggctttgtgtcggcatttagtcactctactccacctccccacccaaccccaattttcctagagctctagaaccagtgaaaagtggagacttgactttggcagggaggcggccagagttaggagttttcttaagcgccctcctgctaaccccaggaaggtaagcctctcccccaaggtatcaaacaggacacaatttagccgttgtacttttattcacatcgtgtattttggcattttccagagaaggacaaggaagagacagggtgggggaaagactgaggcaggagggcaagtcggggggtccctatttccctcacatccctccttgaccaaccacacaggggcaaacaaagggggaggggaggcacaggtgatcgctccactgggagaggatgcacaaagctacacccacgcgcacaaacgagacccctccctccacaccagggggctgggcggggcgacacagagaagcagagcactgtggattccgggggcaggggaagcaacaaagtctccttacagacaggtggccggcccctcccgtccccgtcctgctccatccccagagtctatcgctgcccctctgctctgcccagccattctcccacggcctccagcttcttccctgctgccggggacaaaaggaaaaagggtacagagcagaggggctgaagtccatccctcagcccctctccctcatgccaggtggtcttcccctgccctcattggtaaggggtgaggcaggctcttagctggccactctctggtagaagtagatgtagcccaggtccttgggcggcttctcggaggcacacactttctggtcattgtagatcacccatctggggaagtggggaaaacagaaaaggatgaacaaactgggcattcaaagtggcatcatgtagtctctcagacatggcccctggaagtgctctccacactctctgcccataccccaaatccacagcccagccaccatgtgccttaagggagcttcacaacctcacaagggtcacggaccctattatgtcttcagatcctccagtacctttacaaccaccctccacccattccagggaggcagggggttggtaaactttttctggcaagggccagatagtatttgaggttctgcaggctctctctctggtctctgacacaacgactcaactttcctgccgcagcgtgaaaacaggcacaaacaacacataaacaagtgtgtccaggttccagtgaaaatttatttacaaaggcagggggcctggccaggcacggtagctcatgcctgtaatcctag

SEQ ID NO: 917017 - DNA, 4001 bp, Homo sapiens
aggctcaaaggtccctttctccagagatacctgcgatgacctttgtctgctcgaaaacaaccttctcagtgatgccagcttccctttcatctagcttctccccaatgcaggcgattactccgagtccctctgccagagcatgggccactttctgcccaatcagctgttgagaaacagacttggtgagacatccttcttggaaaaagacatcccttatcttctctcttggctactaacctcatctgactccccaaagacatgccttctctctgagtgccccaggaccacccacgtggctccgcagtctttgatcatgccagggctaaaggaagagatgaagccaaggttcagcagggagcccaccctgtggctttcccctcaacgaggaaagtgagggaagggtcccacacacccctctccacctcgatctcacctgatctccccagtaaaagccccattagtcactttgtagcagttctgcgcagccacagcaatcttgggatctagcttctgccgggcgaagtcgatataggcagtagggggagcacaaaccacctctgaggacaagatggtaccacagggggatgagactaaagaaagccttcattccccacaattcctaaccagtgccctggagccccccagccctcaccctcttcttcttggttctgctctcccccttttcaccccagcaagatgacctttgtccattttccagcccaggctgggtctgcactcaactcgaagagccttccagatacccctgagaggccacggccctcaccctgccctctgctcttttaacagctggggctccaatttcctcgagctattctcggcataggcacctcacagactcagcattctccagggagcaaccctgcttcccttctaaaatagcccatcctcacctcccctttgcaaggcaaggatttgtagcaaaaggagaggggccaactcctggggtttgtattgaggcctctggggaatgaacgagaaggggatgcctctttggatcaggcccgcggctctccgatttcggtggagggaggaaggaggatggaggagagcatcctttgcccgtgggtggcagagacctaactgactcagaggccttgcgctttgctgtttccaggttggggaaagcggtaggatggctcctcactcccaaatcgctcagcctgtttggcacgggctcggtcccttccgtggaaggcgggagtcgttcaggttgccgaagggaaggggtcagatctggggctcagggagcccgagcagctcggcgcggggacgcggacgccggcgaggaaggggaggagtctggggctacgtgcggcggcgcacggcgcgggaggccagggcgcagggagcgggaagcccacgcggcccagcctcccccggtctcccgcagagcctcgggctccgctcctaaccccgtcgcctggcgggcacagccccagtgcgcgccccggggccaccttcctccaggagacccaaaacgtccttacctgccccatagtccaaggggcatcatgtgctccgccctgccccctcgacgcaccgacggggctgcggctgcgaggcccctgcccggaccccagcggccctcgtcccacagccctgcatcaggtccgcgcggataccggcctcggggcctcggggcctcgggagagggcgctgccactcctgccccggccccggccccggcccggccagacccctcctcggcgagggcttaccggtgtcggccggcaccttggccgcgttcagagtgccgatgagctcccccagactctgcttccgcccgttcatcttccagtttcccccaacgaagaacttcctggagggcgccatggcgctggagccgaggcgctgaaggtcagtgtctgcgcgcagtcgcggccactgcccacttatatagagcgccgcgaagtggaactccgcctcctcgccgtcctccgccatggcccgcccagtcccccggagccctgccccccgcccgccctcctgccgccgccccggccgccgcccgatgatgcactgttccgacgttcccccttcttgtggcaacgttctaggagagtcgggggctcggtcgcctccgcctcgattgcggggctttcgggacaaggcgagacctgtgagctccggcgctcaggggaaccctcgcttggcgacttgagtcccccacggggccagaagtggttttcaagcggaactagctggtggcaacttggccgtagcccagatcgcccactggggcagagagggcccctctccaactgtgggatagacaacctccttcgcccatcggagcagctcatgcccgactgctgagcaggcacccttgtacccagggagtctacctgagtgaaaacttgcgggacaaatgcagggttcacagcgggaggggcagcccacacaggcataggccgccaggatcatcccaaccctcgccccggctggcaaggcctggcaggaactgcagggactgagtcccagcctgaagccagctagccagttagggacatttgggaaatcctccactcctgtgtgaataaagagagggaagggttcttcactccatctttccttggctttgtgtcggcatttagtcactctactccacctccccacccaaccccaattttcctagagctctagaaccagtgaaaagtggagacttgactttggcagggaggcggccagagttaggagttttcttaagcgccctcctgctaaccccaggaaggtaagcctctcccccaaggtatcaaacaggacacaatttagccgttgtacttttattcacatcgtgtattttggcattttccagagaaggacaaggaagagacagggtgggggaaagactgaggcaggagggcaagtcggggggtccctatttccctcacatccctccttgaccaaccacacaggggcaaacaaagggggaggggaggcacaggtgatcgctccactgggagaggatgcacaaagctacacccacgcgcacaaacgagacccctccctccacaccagggggctgggcggggcgacacagagaagcagagcactgtggattccgggggcaggggaagcaacaaagtctccttacagacaggtggccggcccctcccgtccccgtcctgctccatccccagagtctatcgctgcccctctgctctgcccagccattctcccacggcctccagcttcttccctgctgccggggacaaaaggaaaaagggtacagagcagaggggctgaagtccatccctcagcccctctccctcatgccaggtggtcttcccctgccctcattggtaaggggtgaggcaggctcttagctggccactctctggtagaagtagatgtagcccaggtccttgggcggcttctcggaggcacacactttctggtcattgtagatcacccatctggggaagtggggaaaacagaaaaggatgaacaaactgggcattcaaagtggcatcatgtagtctctcagacatggcccctggaagtgctctccacactctctgcccataccccaaatccacagcccagccaccatgtgccttaagggagcttcacaacctcacaagggtcacggaccctattatgtcttcagatcctccagtacctttacaaccaccctccacccattccagggaggcagggggttggtaaactttttctggcaagggccagatagtatttgaggttctgcaggctctctctctggtctctgacacaacgactcaactttcctgccgcagcgtgaaaacaggcacaaacaacacataaacaagtgtgtccaggttccagtgaaaatttatttacaaaggcagggggcctggccaggcacggtagctcatgcctgtaatcctagcactttgggaggccgaggcagaaggatcacttgagctcaggagttcaagaccagcctgggcaacatagtgagatcccatctctatttaaaaaaaaagctggtggccaga

SEQ ID NO: 917018 - DNA, 4001 bp, Homo sapiens
ctgagccaccgcatcagagacgttggacttcagccatcctcggagcttctcgtgtacttcctgggcctagaacaagaagctggcctaagtaagaccttttctgcctctctaagaggaaaaatcactggcaccagtggacacttagtgtggtttctgactgagtcagagtaccagggctctgatccaagccaggccctggactggatgcccttggacaagtcactgtctctgggttcaaggtctctgtgtctttgaaataaggggttgccccatgtgggctgtgtctgtccaaacctattgaggcaggctgggatgagggcagggctcctgggcccggttacctgttggggtgttgcagtcttgccagtaccaatggcccacacaggctcataggccaggacgaccttgctccagtccttcacgttatctgcagggcagagatacagatggagggaagggtgaacaagaaagagctctccagccaggttctccggagtacgaagaacggtggcctactgccccctagtggacattgggggatttccaggtggcatctaccttggggctggagaagtcataggccccaagcaaagattgtcactccccctcccctttttccttttctggatcagcatggggaccaagacaggctccagggcctgaccctaccctctgagtctctgtggccctggataggctcaaaggtccctttctccagagatacctgcgatgacctttgtctgctcgaaaacaaccttctcagtgatgccagcttccctttcatctagcttctccccaatgcaggcgattactccgagtccctctgccagagcatgggccactttctgcccaatcagctgttgagaaacagacttggtgagacatccttcttggaaaaagacatcccttatcttctctcttggctactaacctcatctgactccccaaagacatgccttctctctgagtgccccaggaccacccacgtggctccgcagtctttgatcatgccagggctaaaggaagagatgaagccaaggttcagcagggagcccaccctgtggctttcccctcaacgaggaaagtgagggaagggtcccacacacccctctccacctcgatctcacctgatctccccagtaaaagccccattagtcactttgtagcagttctgcgcagccacagcaatcttgggatctagcttctgccgggcgaagtcgatataggcagtagggggagcacaaaccacctctgaggacaagatggtaccacagggggatgagactaaagaaagccttcattccccacaattcctaaccagtgccctggagccccccagccctcaccctcttcttcttggttctgctctcccccttttcaccccagcaagatgacctttgtccattttccagcccaggctgggtctgcactcaactcgaagagccttccagatacccctgagaggccacggccctcaccctgccctctgctcttttaacagctggggctccaatttcctcgagctattctcggcataggcacctcacagactcagcattctccagggagcaaccctgcttcccttctaaaatagcccatcctcacctcccctttgcaaggcaaggatttgtagcaaaaggagaggggccaactcctggggtttgtattgaggcctctggggaatgaacgagaaggggatgcctctttggatcaggcccgcggctctccgatttcggtggagggaggaaggaggatggaggagagcatcctttgcccgtgggtggcagagacctaactgactcagaggccttgcgctttgctgtttccaggttggggaaagcggtaggatggctcctcactcccaaatcgctcagcctgtttggcacgggctcggtcccttccgtggaaggcgggagtcgttcaggttgccgaagggaaggggtcagatctggggctcagggagcccgagcagctcggcgcggggacgcggacgccggcgaggaaggggaggagtctggggctacgtgcggcggcgcacggcgcgggaggccagggcgcagggagcgggaagcccacgcggcccagcctcccccggtctcccgcagagcctcgggctccgctcctaaccccgtcgcctggcgggcacagccccagtgcgcgccccggggccaccttcctccaggagacccaaaacgtccttacctgccccatagtccaaggggcatcatgtgctccgccctgccccctcgacgcaccgacggggctgcggctgcgaggcccctgcccggaccccagcggccctcgtcccacagccctgcatcaggtccgcgcggataccggcctcggggcctcggggcctcgggagagggcgctgccactcctgccccggccccggccccggcccggccagacccctcctcggcgagggcttaccggtgtcggccggcaccttggccgcgttcagagtgccgatgagctcccccagactctgcttccgcccgttcatcttccagtttcccccaacgaagaacttcctggagggcgccatggcgctggagccgaggcgctgaaggtcagtgtctgcgcgcagtcgcggccactgcccacttatatagagcgccgcgaagtggaactccgcctcctcgccgtcctccgccatggcccgcccagtcccccggagccctgccccccgcccgccctcctgccgccgccccggccgccgcccgatgatgcactgttccgacgttcccccttcttgtggcaacgttctaggagagtcgggggctcggtcgcctccgcctcgattgcggggctttcgggacaaggcgagacctgtgagctccggcgctcaggggaaccctcgcttggcgacttgagtcccccacggggccagaagtggttttcaagcggaactagctggtggcaacttggccgtagcccagatcgcccactggggcagagagggcccctctccaactgtgggatagacaacctccttcgcccatcggagcagctcatgcccgactgctgagcaggcacccttgtacccagggagtctacctgagtgaaaacttgcgggacaaatgcagggttcacagcgggaggggcagcccacacaggcataggccgccaggatcatcccaaccctcgccccggctggcaaggcctggcaggaactgcagggactgagtcccagcctgaagccagctagccagttagggacatttgggaaatcctccactcctgtgtgaataaagagagggaagggttcttcactccatctttccttggctttgtgtcggcatttagtcactctactccacctccccacccaaccccaattttcctagagctctagaaccagtgaaaagtggagacttgactttggcagggaggcggccagagttaggagttttcttaagcgccctcctgctaaccccaggaaggtaagcctctcccccaaggtatcaaacaggacacaatttagccgttgtacttttattcacatcgtgtattttggcattttccagagaaggacaaggaagagacagggtgggggaaagactgaggcaggagggcaagtcggggggtccctatttccctcacatccctccttgaccaaccacacaggggcaaacaaagggggaggggaggcacaggtgatcgctccactgggagaggatgcacaaagctacacccacgcgcacaaacgagacccctccctccacaccagggggctgggcggggcgacacagagaagcagagcactgtggattccgggggcaggggaagcaacaaagtctccttacagacaggtggccggcccctcccgtccccgtcctgctccatccccagagtctatcgctgcccctctgctctgcccagccattctcccacggcctccagcttcttccctgctgccggggacaaaaggaaaaagggtacagagcagaggggctgaagtccatccctcagcccctctccctcatgccaggtggtct

SEQ ID NO: 917019 - DNA, 4001 bp, Homo sapiens
gctacagtgagtgagttgtgatcacaccactgcactccagccggggtgacagagtgagaccctgtctcaaagaaaaagaagaccatactgtgtgccactgtgccctggcactaaaaatactttacaaaataaggaaatatagtctctgataaagcgatttagtggtagagaaaaacaataagcaaaaaaatacatataacttgagtattgtgatggaaaagtatactgacaaataaatgggggcggaatagaggcaaatctactttaggtagataagagtggtcagggaagaactttctggggagacgacatttaaattaagaactgaagtacaagagccaaccacgaaaagacaaagatagaggatgggaatgcggggaaatccatccaggcagtgggaagggcaaaaggcctaaaagcaatgaaagagaaagtaaaggcagatctggaagagcataataaaaaaggggaatgactcaagaaggtcttgtcatatcagacagaaagaatattggattcgattccaagctcaatggtaaaccactgaagggctttaaactagggaatgacataattcaagacacccattctgggctgggcgcagcagctcacgcctgtaatcccagcactttgggagggcgaggtgggcagatcactggaggtctggggttcgagaccagcctggccaacatggcaaaaccaagtctctactaaaaatacaaaaattagttgggcgtggtgacgggcgcttgtatcccagctactcaggaggctgaggcaagagaatcacttaaacccaggaggcggaggctgcagtgagctgagatctcgccactgcactccaacctgaacaacagaaggtgactccatctcaaaaaaaaaaaaagatattcactctgatatgaaatggcaactaaggaaggctgtccgactgatttcaggtgtgctctattccagcccactctggccaactctaaggccagagctcagatgtagcaggtgcttgcttttctagatgcaaggagactgggggtagcctgcagggtccccctctgggggtcaaggtctggctggttctgccagatttaacctctctgggcctcagattcttcaggcagaggactgacaatacttcaaagggtcaaggaaacgggcgaatgcacggaagagttgaggcacagaaaagtcttcaagcttataaggagcctgttgggggtcagctagatctctctagtccgcagaggggaccgtccctctgcccgaggcggcggagcttcccctgccgggtccagataccccaaggcagtttccaatcgcccccgtccccaggaaggtcggtgatggggagtgaagaagtaagcggcttctcaaataatagcagttgccaaacgcttaccgggaaaatcttttaatcccgactacaatcctaagaggtgaaagtcttggtccccactttagaggctacgaaagcggaaggccacctgagttttccacagcaccagcgggtcggagtgcgagctcggactcgggtccttcggcttcgaggccgcattaggccactcgcgaccccccacgccggcagctcgaggctcggactctaggcccaggccggcactgagcccagctccgcccgggacgcggtggtcacagcggcgctgcgaacgacgcccgcttcccggctcaccagaccaacctaggccgcgaagggggcggcgtcgccgggggctgccaaggcgccggttccctgaggagaaagcgcggcctcctccaggtgcctgagatgccgccgcgcgggcatcctctcctcacagccgcgaccccgggcccagagacccctcgcccacacacccctcccttgggatgctggacccttcctaaactggaggccacaggggatctccagccgcgtgccgccgctacacctcaccagggacgagaggagaaacgctgagttgacacactagctgcagacacggagcctcctctgtcagaccccgcactgaacaacggccctcagagctgcctcaccacttccgcccatcgcggaggagcgcgcccattggccaggggcggctccagctgtcggcccattggataacaccgttgtcgctcccagggccccgccttctgcgcgtcgattggctccctggaggcccacgggggcgtgtccctggaagccctggcccctgcacatctggaaccagaggcacgaagctgagctgtgagcctgttgctgagtttagcaactgtccccgacacaggctaataatatttgcatgaataattctgtacaaacattactaatatgcttaatatattgagataattaatggtatttgttcttttctcatgggccgttaatacttattagtcattcttattgctatgataatgcccttgtgcaagacttctgcagatctgtgaccatattttttgagcactttgcttttttgcagtggaagaatgagagcctgagatgcaggtttgagagctagtttctccacttgctgcctgaatggattccctgagcttctcttacctcatgtataataaaggagagaataattatataagtataaccaagcacatattacaaaccaacttataattatataagtataaccaagcacatattacaaacaatacagcaatttaaaattatgattccattgcagattataattgcaaaatatggaggccaaggcgggtggatctcttgagctcaggaattagagaccagcctgggcaatataatgaaaccatatctctacaaaaaaaatacaaaaattagccaggcgtggtggcacgcacctgtagttccacctccttgggaggctgaggtggaaggatccctcgagcccaggaggcagggctggagtgagccctgatcatgctaccgcactccagcctgggggacagagaaagaccccgtctcaaaaataatataatataatataatataatataatataatataatataatataattgcaaaatgttaatgagatagtactaagcaagaaaagcatctaacaggctgggcgcggtggctcacgcctgtaatgccaacactttgggaggcagaggctggtggatcacctgaggtcaggagttcaagaccagcctggccaacatggtgaaacaccgtttctactaaaaatacaaaaattagctggccgtggtggcaggcgcctatgatcccagctacttgggaggctgagacaggagaatcgcttgaacccaggaggtgaaggttgcagtgagccgagattgagccactgcactccagcctgggcaacaaaatcaaaactccgtctcaaagcaatatttataacaagataaaatatttagcttaaatatgcaatataacttgtgtgattccaaacatataaagtttaaaaccagggaaaattaacctaaagtgagagaagtaagtaactggttccattcagagggtatatagcctgtaaggagatatgagaaagattttctagaaatgtttatatcttgatcagcaaagtgattaacacagatggattaattagtaaatagttattaagctacacacctatatcttaagcactttacattgtatgttacattttaataacaaaacttactggagttcaaaagaaagcacaatcattaacagttaaaaagcaatcagaaaaaatgtgtattaatatgaattaagtatattaatgtattaagtatatataaagaaaaaagataaccatatagtgtgttcttttatgaataaggtgttttaactcagcataatgtttttgaggtttatccatgctgttgataatatcaagtctattccttttcagtgccaagtagcatagcacatggatatgccacaatttatactgacaaacattagagctggttctagtttttggccaggcatggtggctcacgcccacaatcccagcacttcggcaggtcaaggtgggtggatcgcctgagctcaggagttccagaccagcctgggcaac

SEQ ID NO: 917020 - DNA, 4001 bp, Homo sapiens
atccccaagttagaattaaaagtctaggctcaagagccagactccctgggtctaaatccgtgctttgtctgctcactcttggtgatcttgatcaagctatgtgacacacctgtgcctccatttccccacctgtaaaatagggaatgctgataatagcgtctacctcatagggttcttgtcggattgagtacatgggcgtgcaataagcactagaagtagtcatgtcaggaaaaggttaattaccttcctcaaacctccaccagagttagatgaacagcagagattcgaactcagttctattggattatgaggtctgagctctaaacaagtggtgaaaagctccacggcctctcggaaattttttataaaaatacaaaactacacaaatgtaaaacgcggcaaagacactaacaaggcatttgagactgacaactagctttcccaccgcttggccactggaatcatctccagaggcagcaactcataaacaaacaaccggagtcgccctgccttagcacagagctggcagcgcccgcgaggccacttatcgctggctctggccttggcaacctccacccccgtcccggtcctctcagcctatctctggaaaccactcttttcactccgaatctcaacttgaagtttggggaaacttgacgcagccaaagcccatcctctgctctgcacctggcaggagactaatagtcagggaagatgggcatgttgtgggtgggggtggagaacggtgtgtccctgacctgccctgacatgctaacctggatgcgctgttgtcttggccttcagcgccacgtattttccctcgacagtaacttggcaagcttttcatgtcactctggcatcgctcagattatcagctacccttcagaaaaagagccctgcgtttcgatggctaaggaactctgacaggaagaggagaggtcccgactagaggagggggcagcattcatcttttggcaccggtgagtcagtttgcgaagttggcggcagcgagaccccgaggcatctgggagaccccggagttctgactgccctactccgctttcgtttccttccccccacccctggcttcccgggtattggaagccagctgggtccccggggtcgcaggccgcccagaggttcgagccgcgcgccggggtggggcagcgcggggcaccgcctccctccataccttctctccccgtggagcacataggagctgcggaagaagcccaggagctcattctcgatgagcgcgttgtagataatcttcagattgtaattcctctgcgcgtccagtgtcctattcagcaccaccactaagacctgggtttgcgggtagaggaaaaaaccggctacagggacagccccgaacgcccggtcctcggccagctgcactttctccaccgccactcgggaagcgtgcagcactacgtagcgggtggcgttccggcacgcgatctccacgttgacctccccggagaaggtgaagttctccatgaaggcggtgagcatcagattgtagtgcagcggcttcaggtggcccgacaggcgcagctgcgtccacggctcccacggctcccgctcctcctccgacggcggctgggccgacgtggtccccggactggccaccccacccgcctcgggctgccaggagtccccgcctgcgtggtggttgcgccgggccgatccagggaggctcccgttgccgccgcgctccggaaagcctgaggggccaccgtcggcgcctggcgtggcactcgccccgcactcgtcgaagcgcaggctgagcagcacagcgagcattgtgaccgcgagcaatgccacgagggacacagcgaaggccagcacaagccgcttgtgtacggcgatgtggcgctccgtggtgcggggtcgcactcccactgagtctgcccacgggtcggagagccccctgctgccagcccgaagcgcggcgtcgtcttcccccatcgcggctgcgaagggtgagctgctcttctcggccccctcctcctcctcctcctcctccttcttcttcttcctcttctttttcttcttctttttcttctcctcctcttgctcccccagctcgccgtccagggccatcacaccgcctcctcctcctcccccgccccctctggcaccccccgcgggcgggccacccgggccacagccagagcaggcatcggagagctcacgcgggccgagggcgcgcgactggggatgctggcccgggttcttttaagacgggttctggacacaagcgacggcagcttccgcgacccccatcagccccgcctcactctggacaccgggctgtgagctctgggacgcgcccaacttggaaagcgtcttgcttgcccagcgcgcgctacttctcggacgagcacccggcggcggggcacatgctgcccccgcccctgcgcgcctgcggctcccggctctccctcccctgcgccgcgctctcgcctcgctttccgcgggagccttccaaccggttctcggctagggagaaggacgggagcggtgggaagagcgagggtgtagagagggaagttagggctttcgctttctccccccactccagcggcggcgttcggtcctctgggtggaatgtgctcgcagcagcagtgacggcggccacagcacgggaggcacccgagccatacaccctgcagctggagagaaaaggatggccgaggtgggagagactagagtgaaccagcaggaggaagtcccagggccgcgaagctacgacggagatccgtcctggaaaagccttctccaccctgggcactttaagcggcggtggcggcaaacggcaggaggttgcagacccgacagcgagactccctcattccagtcttgctctgccctccggagatgacaagtgagaaagaagtgtccggccgggccatccccttcaggtagatgaagctctgggtttgctccatatcccaagggggagagccgaagtgcgtatgtccgagcgcgtgtgcatgtgtgtgcgcgtgtgtgcgtgtgtgtatatacacaggcttcgggtttagattgccagggctactccagctgcattgagggactgaaactcccagagaaaggcaaaggagagggagcgcgcgaggaggcaggaaaggcgggagggaggggagcgactgagcggcagaggcaggcactgggagattagagagcttttctccgctctgtcacaccagacacccacagccacagagggggttgctgagccgcctgcaagaagtacattgtaaatcttcagcgcaacaagccccgcagtcacccctcttcctgactccttagccccaccgcgctccagggagagatccttggagcctttggctattaacatagagagcaaaagaagatcctgctagggagatgtggctgtgtcagatttcacatcaagctcgccagaggatttggaggattgtatgtaaattgaaataaattctccaaaacctgactacatatattacattatactgtgcgatgtgtccaggtgtgcagtactaaaataatgttagcaatgaagcattaaaatcctccggaagtaaaggccaaagcaaggtgatgttttccccataggataattcccatctttagattggagaaacgattaacacacaatgtctacagtgtaacattcaggaccaaaaccctgagactgagaaaagctgggcttattagaacggtgaacgaatacattccatgattggtcagtttttcatttcacctagccataattactttcttgcagctttccagtgttaccatgaacattgttttaactttgttaggatagttatcaatagaccagtttgctgacagcaggcagcatcaaaataggttcatagcccattggctggttatggactcttgtctgagtatattggagtttaaaattatactgcagagtatgtataagtatgtgggatatccaaccttcagaatttgtgcgaagaactctaattggaacaatattc

SEQ ID NO: 917021 - DNA, 4001 bp, Homo sapiens
tgttgtgcccagatcccttttcagagcattagttccctgagaggaaaaaaagaggtcctaaccaattgctttcataaatagtgaccccagtacagtgtatatgtcttttgcagcagaaatcaagaggtcaggcagctctgctcatcctgactagtttatcatcgtttgcatacaaggtatatttatgtaaagctgattccacgccaagtattgcaaccataatctcaaaaaaattgttcaattttagcacacagttcctgcaagataccacagcaggtgagaaatcatctcaaagagttcatcttttacaactgagaggaaaacatcgaaggaggaaataaaactcctctctcctaagttcctcatcaaatctgatggctatgttcacagagttagttgacaaaaatccagagtcctcaatttctggacttgcgaaatccttcaaggtgactgtcaaggtcaagaagaattttcaggcttttctttgccatggcccatgaactccagtccttcaataggaatctctttctcctttattgctttctggtaggaggagaaaacacattataaagacctacatgaagcttaagttgcaagctttgtaaataaaatatgacagtacaaaagtaaaatcaagctgattataaagacttataaccatgattcaaaccacatactttttaaaaaacaagtaccggtcaggtgtggtggctcacgcctataatcgcagcattttgggagaccaaggcaggtggatcacttgaggccagaagttagagaccaacctggccaacatggcgagaccctgtttatactaaaaatacaaaaattagctgggcatggtggcgcatgcctgtaagcccagctactcgggtggctgaggcatgagaatagcttgaacctgggaggcggaggttgcagtgagctgagattgtgccattgcactccaggctgggagacagagtgagactctgcctcaaaaataaataaaaaccagaagtaccataatgaataaatcaagtgtaagacctgagggagactggaaaaggagttgtgagggaaccgttaaaattaagtgaaatttgaaaaataatcatcactttgtgttagtgaaagacttaggttcaaatctgggttccaggacttactggctatgtgactaactgtaaatgggatgaagacagcaactacctcggggaattgctgtgaggatgtgttgggttaacttattggaagtgctttgcccggtgctgttcttaacaattcaaagcagttccacatccattgggccagaataaacatttcctggctgcagttgcggggactggtcaagagagagaaacaggctaacgaagggtttataacaacaaaaaaatgtgaccctccagtctgaattctgaagtataatcccgcccagaccccagcagtaatagtggaaaagtgcaccacctgcgaaagaaccaaggaaacctgatgctagtgaactcggattaatcacttcctatttctgggtgttagttttttatgtataaaatatgagtaactatgcccaccttgcgagtttagggtgaacaccaaatgaaccaaaggatgtgactgtgcttcttgaaaagcactgccccaatatttgtcattcggagagacacccaagtggcctcggtggtgatggtaggggagcgagctcctgccactggcctcactgcgacttttctccacccttccagtccagtcccaatccccgtaaaatacgatgagtgtggtgggacacagcgccgagaatgcagggcctgggaacagaggcgggagggctcacctgaacacactgctggtagcgcttgaagaggtcggtgcacgggtccccggagctgtcccccttgagaaatttctcggcgaaccagcgattgaagcactggtcgtactcgcgcttcatgtccgtgcatgcctcccccacactgttcatggcgacagtggtggcggcggcgacgacggcgcactctgatgtcatcactctcaggcgcgtcgctcggcgttacgcgcgggcgcactgcgggggccaaggaaggaagaaatgtggtcgcggttggtgtggctgggccttcgggcccctctgggcgggcgccagggcttcacctccaaggcggatcctcaggtaaaggccagggccatctaggcgggtggcggagcaagccgggaggcacttcggagcgccggtgacccacactccccgcctcatccctcctccagggcagtggccggatcacggctgcggtgatcgagcacctggagcgtctagcgcttgtggacttcggcagccgcgaggcagtggcgcgactggagaaagctatcgccttcgccgaccggctacgcgccgtggacacagacggggtggagcccatggaatcggtcctggaggacaggtaaactcgcggctgcagccccgaagccttgaccgtggcccgttcgcagccgtttaatgtgacgattagcgaacagttttccagggggttaaagagtgttagcaagattcaggaacttgcccacagtcacctcgcgagtcagtggcttcactcttccccttgttcattactgatgctctcgctagtgtaagtggaaacaaaacccgaactgctaatcactgcctttgtttttttttttgtttgtttgttttgtttttttttttttgagacggagtctcgctgtgttgcctaggctggagtgcagtggctcgatctcggctcactgcaacctccgcctcccgtgttcaagcaattctctgcctcagcctcccgagtagctgggattacaggcgactgccaccaggcccggcttattttttttgtatttttagtagagacgtggtttcaccatcttggccaggttggtcttgaactcctgaccgtgatccacccgcctcggcctcccaaagtgctgggattacaggtgtgagccaccgcgcctggcctaatcatcgcctttaaggccctactccatagagtccctacctactcactccaacgtactcttctcagtactctccttggctaccttgactgcttctccagcaagacaagttcttttcctctctagatctctgcactggcccttcgtttttttccttcctctcagtatttgcatggctgcctccctcttggcacaggtctcagcttatcttctcagaaagggctctcctaaccactccaaatcccttctccccttctagttagtaactcatcctattgggttttttccctaacattttaatggacttttgttcatttgttatatctcttttattaaaatgtgagctcattatgtagttactgttttattcctgccttgaatttttattttatttgtttttgagatggagtctcactctatcacccaggttagagtgcagtggcatgatctcagctcattgtaatgtccacctcccagactcaagagagcctcccatctcagcctcccaagtacaggaccacaggcgcgtgccacttggcctggctaattttttgtatttttgatagagacgggattttgccatgttccccaggcttgtctggactcctgagcaaaggtgatccacccatctcagcctcctaaagtactgggattacaggcatgagccacagcacctggccgtgtttgattctttcaaatgtcttctctactttgcaattttctttttcctttgggacggggtctcactatgttgcccaggctggtcgcaaacttctagactcaagagatcctcctgcctcagcctcccaaatagctgggactataggtgtgcaccaccacacctggctaatacttaaaatttttgtagaaacggggtcttgccatgttgccccatatggtctcaaactcctggtctcaagcaatcctcctgcctcagcctcccacttcctcaagaaagtttttttttttttttgaggtggagtcctgccccatcacccaggctggagtgcagtggcatgatcttggctcactgcaacctc

SEQ ID NO: 917022 - DNA, 4001 bp, Homo sapiens
ccagcactttgggaggctgaggcaggtggatcacctgaggtcaggagtttgagaccagcctggccaacatggtaaaaccccatctctacaaaaaacaaaaacaaaaaaaaattagctggacctggtggcgcgcgcctgtagtaccagctactcaggaggctgaggctggagaatcacttgaacctgggaggtggaggttgcaatgagccaagatcgtgccactgcactccagcttagtgacagagtgagactctgtctcaaaaaaaaaaaaaaaaaaaagaaagaaaacaaaaattagctgggtgtggtggcaggtgctggtaatcccaggtactcggggtgaggcatgagaatcgcttgaacctgggaggtggatgttgcagtgagccgagatcatgccactgtactctagcctgagggatagagtaagactctgtctccacaaaaaaaaaagaaaagaaaaaaaaaaagagaaaaagagatggggtctcactatgttgcctaggctggtctcaaactcctgagctcaaatgatcctcctgcctcggaggagtgttggaattacaggcgtgagccaccacacctggtcaccaaatgttcatagaatgttacataagacactattctaagcactggggtcccataagaataagacaaagcccctatcctcaagaggctatcatcaaactatagacaggtaacagactcaagccaaggtatatacatgttataaaagaagtgctgcaaagtattaggagaacacagagcaactgattgtgacatggggaactggaaaaggcttcagaagaagtgatatttattatttatttatttatttattttttaaagagatgggatctccctctgtcatccaggctggtctccaactcctggcctccagtgatcctcctgcttcagcctcctgagtagctgtgattacaggtacaagccatggcacctggcgagatgacattttgctggaggaaagggagatcttctaagagcaaagagctttccaggagctgggaccaggactatcacagtaagtaggagacagcaggagtgagtgcaaaaccccaaaaccccacttttacccttcctagtcccctactcagccatggaggccgtgttaccatggctccaacaggtacctgtctgggcagggggcccaggccccacattttgacccctagggctaggcctgagctcttccaaggggttccgaggctgactgatccccaccaatctttgtgatgtctctgcctggtgcctggctttcggcctggggcctgctgaatcaacgagggggcgttgaatattgagcggtggtttctgcacccatctctaggggagggagcggggacaaaaaggtgaggtttagtgttggggtgcattactggtgtgactactgtcttcccccattaggcccctcttacccttggatcttggttctcctggtccacggcgcacgatgtaacagtggggaaaggcgtgcgtttctgagagcgtaccggaatcttgctaggggtaggagatacaccccggaggaggggatccttcgtggcttgccgggtggtcatgatggctacaattgagacggggaagaaggcaggcagaatctaagatcaaagatcaaccagttctcggggcacctgtcctgccatccctgatacctccgccctaatccacgcgcccacaagcccccggcgcctgcaagaccgctcttatgggtgctatctccagacaccccgagcctactctttcgccctcgggccccaaactgccctcctccctatgaacccagcagccttcgttcccttcaagacccccgtgccttaccttaccgaggcccctcagggcctacccagcttcctccgcttttctcctgaccctctcgggtgctgctggagctactttctcagtttgtaaaatacgccaagctcttgattggcccggtcgcgctcccgcggaggcccgcgtagccagactcagccgtccaatccgcgggcatcgcaggaggggccaaaagaaggaccaattgtcgaaccgctttctggcgaggaaaaaaactgactcggatcaatcagccaatccgagagtggagcgccgctgggaggcggggaaagaggaaggatggggccgttccgaggccggggaaggcgtagccacgggagctctcgcgaggcctcaggaccggctaggggccggccattggcaggaccgggcgaggtcgcggtactgagggtacagttgatcgttccgattgctgccaacggtgttgaaggctggcccgagcccccgacccggcttgaccatagcacggcgccaagctttggggacgccattccagatgcccatagaaaatatctgcgtccgggcgcggtggcaggcgcctgtaatcccaacactttgggacgccgaggcgggaggatctcttgagctgagtttgagaccagcctgggcaacatagcgagaccactcccacccgtttctctacaaaataataaaataataataataatccctgtgcagtggtgcgcgcttgtagtcccagccgctctggaggctgaggcaggaggatcgtgttgagcccaggaggttgaggctgtagtgagctgtggtcgcgccactgcactccagcctgggcaacagagaccctgtcttaaaaaaaataaagagggaaagagagaacatctgtacgttgtctccgggataaggaactgccttcaaacgggcggagagggctggagggaatcgaactgagcctaacaatatgtgtgctccttggagcctcacaatccagtgaggtgtctgatgaggtgtctttcattttacgggtaggtaacaagactcattgtttttgaactcagttaccacagcaccagaattgaatggctactcacagctggggatttccttgcctccaggttgccttttgcagatctagaggtctggggagagggggctcacctgctggttattggtgggcaaggctgtgagactgagagatcctagaatatcctgcttaagatggaaggggtaacccctaacgggggacaggaaatgaacaacacttaacagaactctggtggattttccccaccaatcacagaagttattcttacacaagccagaaaccgaggagttactccttaactcctcccactccctttacatatcccatctctcattcactctcactagttttactatttatgcatttttgggacagggtctcactctgtcgcccaggctggagtgcagtggtgcgatctcagctcaccgcagcctcggcctcctgaggtgggaacctcagcctctcaagtagctgggactacaggtgcctgccaccagctaatttttgtgtttttttgtagagacaagatctggctacgttgtctagcctggggttacaggcgtctttcccagcactttggatggcccaggtggatcgcttgaggccaggagttccagaccagcctagacagtgtagcaagatcctgtttctataaaaaaaaatttaaagatacgtaaggtatctttactaattgtatgcatctttaaaattcatctactttcaggctgtgcgcggtggctcacgcctgtaatcccagcactctgggaggccaaggcagggggatcacctgaggttgggagttcaagaccaggctgaccaacatggagaaaaccgtctctactaaaaacacaaaaattagccggacttggtggctcatgcctgtaatcccagctactcaggaggctgaggcaggagaatcgcttgaacccaggaggcggaggttgaggtgagccgagatcgcaccactgcaactccaacctgggcaacaagagcgaaactccgtctcaaaaaaaaaccaaacaaacaacaacaaaaagatcatctactttcggctgggtttatgactgtaatcccagcactttgggaggccgaggtgggcggatcacctgaggtcaagagtttgagaccatcctgaccaacattg

SEQ ID NO: 917023 - DNA, 4001 bp, Homo sapiens
tggttatatgggtgtatggctggacagatggctgacagatgggtagatgagtagatagatattttaatgagtggacaatggatctatagattggataggtggacaaaaaagtgtaaagatgggtaaatgaatgagtagatgatagatggataaatggatggatggatggatggatgaacagatgtataaataagaagataaacaaatggaaggctggatgtgtaggtgaagagatggacagacaagtagattaatgggggacagatgagtacgtggatatgtaggtgaataaaaaaagatgaggcgggatgcggtggctcacacctataatcccagcactttgggaggccaaggcaggtggatcacgaggtcaggagttcaagaccagcctggccaagatggtgaaaacctgtctctactaaaaatacaaaaaaaattagctgggtgtggtggcgggtgcctgtaatcccgctactcgggaggctgagactggagaattgcttgaacccaggaggtggaggtttcagtgagccgagatcatgccattgcactccagcctgggcaacagagcaagactccatctcaaaaagaaaaaaaaagcagatgaatgaatggagagttagatgagtaaatagttgtataaatgagtgggtggaagggtgaatgggtaaatgggtaaatggctgagtttgcatttgtataaatgcatttgcatttgtataaatgagtgggtggatggatgcattgtataaatgagtgggtggatggatgaatggatgaacagacaaatgtcctatggaagggtggacagaggggtaaatgggtagagtaatggatgatggattaatagatagatggatgatgaatagatggatggatgatggatagatgggtagatggatggatggatgatgggtggatagatagatgatatatggatggatggatagattaatggatagatggacatatggaatgatgaatagacgagtagatggacagatggaaggatgatggatgaatggatggatggatgatgggtagatggatagatggatggatagtagatagatggacagatggaataatgatggatagatgaatagatggacagatggaaggatgatgtataaatgaatagatgaatggatggatgatggatgatggatggttggatagatggatagatgatagatggctggatgatggatggatgtatggatggatgatatatggatggatgatatatggatggagagatgaatggatcgatggatagatgtatggatggttggatggatggatggaggatatagagatggagagatgaatggattgatggatagatgtgtggatggttggatggatggacgaatagatgggtggttggatggatggatggacggatgatatatggatagggagatgaatagatggatggatagatgtatggatggttggatggacagatggatggatggatgaatcgacggatgggtggataatagatagaggggtggatgatgaatgggtgaatggatacagaggaggagaccacaggccaggaagctaacaatactcactctatgatcttcttcctccacctcttgttgtcactggagtggtgacgataggtgccgtagtcaaacagtgagtccatgggtgctttcttgggcccaggcaccaccgaggactcatatagggtggactccagcagatcgatggggttgggcacccccttgcggaaggcgccctggaacttcatgcgcagatttggtcgcccatcgcctgggccagcagggcgactggcatcagccggtgagggcgaaagggagccatcctccccctcaaacagattggccagggaggagagaggaaaagcctccccacctggggtgccactctcatccccggggagctcagccacctccccgggccccgcgcgggggccttcgctggaatccgccatgcctgccccaggcccgtctgcactgctcagcctgcaagggaatgaaaggggagtcaggcagaacccggccaggggcgggggctccaggaagccccctcccacgtggacaagcagcagtgctgccagctgcttcaaagccaccgttgtaatgacaggggcacagggaggccactcccagatgtggttggccgccagcctcaggcgggaactgcaacaggagcctctttcacgaacctggaaacacaaattggccccaggtccaactaccctgggcattagctgaaagagggtggacttcagggtcaagctgggaccccatacttggatcccagaccctactgctgaccaagaaagccagctttggagccccagagagccaagttcaaatccaggctccacacttagtcattccatgacattgagcaagtcgacatttcatagcctcagcttcctgatctgtaagatggggatatccaagcctcatggacagaacatgcagtccagtggccagtgcagtgcagtgcctggcacgtggtaagcacctgctaaggcagaaccattaaccgtgggcttcaggcacaggaggggctcagaaaatccatgtggacttgctgtgtaggccggcagtccttttcctcatcaaacactgtcatgatgaacccattttacagaacaggaaactgaggctccaatacttgagttgacttccccagtgcacaaactctgctccccagtgcaaagtgctgatccctccctgcacctttgctggtcaactcctccccactggtgttccagctcaactgggctcctctggaaagccctccctggcctgcacacactcgctcccaggatccatgctcctctcctcagaagctttatcccagctgttcacgggatggttcgttcccaggctgtgggtgccaggaggcaggaaatgtatctgtcttgtccatccctgagtcctcacacaaatgaaaaactttatgacaaagatgtcatttgttcccatttctcagatgaggaagcagctttcaaaggcagcaaacagcttgcaggaagaagagctggacttgaaccatgtctctctggctcccgggtccagtgcttagccaggagccagggcaagggaggggcaaggccccactggttggctgtcagtgccctgctctctgtagcatggtgccagccaggcagggctgggcaccaagggtgagtttcctggaactcttaccaccccacccgggaggcaggggcatgtctgaaaagccctctcttgtacatctcacccttcccacccaatacgcacgtagaaaaacaaataaactagttcccaccttgtttgttctgtggcttccaggagggaagacttggaccagagaggtggggacacagcaagaggcctcccttagtgggcgcagcaggacacagagggtcagagctcccactgggggtgggcttccctttggacaccaaaagggagagacagcctggcctttggagtcattcaggcctgggttctaatcccagctctgctatttacatgtagtgtgatcttaggtaagttacttgagctccccaagcctcagtttcctcctctgcaaaatgggtacaattgtagtcacttcttcatagggttgcaggcagtgggaagtgaggtcagatatatccagtgccacttctgggattaaagtggggttttggctcagtgcagcagctcacgcctgtaaccccagcactttgggaggccgaggcgggtggatcacttgaagtcaggagttcgagaccagcctggctaacatggcaaaaccccgtctctataaaaaatacaaaaattagccaggcgtggtggcacgtgactgtagtcccagctacttaggaggctgaggcaggagaatcacttgaacccaggaggcagaggttgcagtgagccaagatggcgccactgcactccagccagggcaacagagcaagactctatctaaaaataaatacctcaggtaagttgcttagcctctctgagcctcagtttcct

SEQ ID NO: 917024 - DNA, 4001 bp, Homo sapiens
cagatgagaaaatggtagatgaatggaaggttggttatatgggtgtatggctggacagatggctgacagatgggtagatgagtagatagatattttaatgagtggacaatggatctatagattggataggtggacaaaaaagtgtaaagatgggtaaatgaatgagtagatgatagatggataaatggatggatggatggatggatgaacagatgtataaataagaagataaacaaatggaaggctggatgtgtaggtgaagagatggacagacaagtagattaatgggggacagatgagtacgtggatatgtaggtgaataaaaaaagatgaggcgggatgcggtggctcacacctataatcccagcactttgggaggccaaggcaggtggatcacgaggtcaggagttcaagaccagcctggccaagatggtgaaaacctgtctctactaaaaatacaaaaaaaattagctgggtgtggtggcgggtgcctgtaatcccgctactcgggaggctgagactggagaattgcttgaacccaggaggtggaggtttcagtgagccgagatcatgccattgcactccagcctgggcaacagagcaagactccatctcaaaaagaaaaaaaaagcagatgaatgaatggagagttagatgagtaaatagttgtataaatgagtgggtggaagggtgaatgggtaaatgggtaaatggctgagtttgcatttgtataaatgcatttgcatttgtataaatgagtgggtggatggatgcattgtataaatgagtgggtggatggatgaatggatgaacagacaaatgtcctatggaagggtggacagaggggtaaatgggtagagtaatggatgatggattaatagatagatggatgatgaatagatggatggatgatggatagatgggtagatggatggatggatgatgggtggatagatagatgatatatggatggatggatagattaatggatagatggacatatggaatgatgaatagacgagtagatggacagatggaaggatgatggatgaatggatggatggatgatgggtagatggatagatggatggatagtagatagatggacagatggaataatgatggatagatgaatagatggacagatggaaggatgatgtataaatgaatagatgaatggatggatgatggatgatggatggttggatagatggatagatgatagatggctggatgatggatggatgtatggatggatgatatatggatggatgatatatggatggagagatgaatggatcgatggatagatgtatggatggttggatggatggatggaggatatagagatggagagatgaatggattgatggatagatgtgtggatggttggatggatggacgaatagatgggtggttggatggatggatggacggatgatatatggatagggagatgaatagatggatggatagatgtatggatggttggatggacagatggatggatggatgaatcgacggatgggtggataatagatagaggggtggatgatgaatgggtgaatggatacagaggaggagaccacaggccaggaagctaacaatactcactctatgatcttcttcctccacctcttgttgtcactggagtggtgacgataggtgccgtagtcaaacagtgagtccatgggtgctttcttgggcccaggcaccaccgaggactcatatagggtggactccagcagatcgatggggttgggcacccccttgcggaaggcgccctggaacttcatgcgcagatttggtcgcccatcgcctgggccagcagggcgactggcatcagccggtgagggcgaaagggagccatcctccccctcaaacagattggccagggaggagagaggaaaagcctccccacctggggtgccactctcatccccggggagctcagccacctccccgggccccgcgcgggggccttcgctggaatccgccatgcctgccccaggcccgtctgcactgctcagcctgcaagggaatgaaaggggagtcaggcagaacccggccaggggcgggggctccaggaagccccctcccacgtggacaagcagcagtgctgccagctgcttcaaagccaccgttgtaatgacaggggcacagggaggccactcccagatgtggttggccgccagcctcaggcgggaactgcaacaggagcctctttcacgaacctggaaacacaaattggccccaggtccaactaccctgggcattagctgaaagagggtggacttcagggtcaagctgggaccccatacttggatcccagaccctactgctgaccaagaaagccagctttggagccccagagagccaagttcaaatccaggctccacacttagtcattccatgacattgagcaagtcgacatttcatagcctcagcttcctgatctgtaagatggggatatccaagcctcatggacagaacatgcagtccagtggccagtgcagtgcagtgcctggcacgtggtaagcacctgctaaggcagaaccattaaccgtgggcttcaggcacaggaggggctcagaaaatccatgtggacttgctgtgtaggccggcagtccttttcctcatcaaacactgtcatgatgaacccattttacagaacaggaaactgaggctccaatacttgagttgacttccccagtgcacaaactctgctccccagtgcaaagtgctgatccctccctgcacctttgctggtcaactcctccccactggtgttccagctcaactgggctcctctggaaagccctccctggcctgcacacactcgctcccaggatccatgctcctctcctcagaagctttatcccagctgttcacgggatggttcgttcccaggctgtgggtgccaggaggcaggaaatgtatctgtcttgtccatccctgagtcctcacacaaatgaaaaactttatgacaaagatgtcatttgttcccatttctcagatgaggaagcagctttcaaaggcagcaaacagcttgcaggaagaagagctggacttgaaccatgtctctctggctcccgggtccagtgcttagccaggagccagggcaagggaggggcaaggccccactggttggctgtcagtgccctgctctctgtagcatggtgccagccaggcagggctgggcaccaagggtgagtttcctggaactcttaccaccccacccgggaggcaggggcatgtctgaaaagccctctcttgtacatctcacccttcccacccaatacgcacgtagaaaaacaaataaactagttcccaccttgtttgttctgtggcttccaggagggaagacttggaccagagaggtggggacacagcaagaggcctcccttagtgggcgcagcaggacacagagggtcagagctcccactgggggtgggcttccctttggacaccaaaagggagagacagcctggcctttggagtcattcaggcctgggttctaatcccagctctgctatttacatgtagtgtgatcttaggtaagttacttgagctccccaagcctcagtttcctcctctgcaaaatgggtacaattgtagtcacttcttcatagggttgcaggcagtgggaagtgaggtcagatatatccagtgccacttctgggattaaagtggggttttggctcagtgcagcagctcacgcctgtaaccccagcactttgggaggccgaggcgggtggatcacttgaagtcaggagttcgagaccagcctggctaacatggcaaaaccccgtctctataaaaaatacaaaaattagccaggcgtggtggcacgtgactgtagtcccagctacttaggaggctgaggcaggagaatcacttgaacccaggaggcagaggttgcagtgagccaagatggcgccactgcactccagccagggcaacagagcaagactctatctaaaaataaatacctcaggtaa

SEQ ID NO: 917025 - DNA, 4001 bp, Homo sapiens
catgcacaccttgctagatgctcacaagtcaggtgtgggagctcctccccggggggccacaagggaaaatccttcttgccttcacacgcctcaggctacagcgaagctgggattggaagcatctcactgctccagtgcccagcccagagctggcacaggtgagcttgcagagagcatttgctggaggagggagtaagtggcagaggcccagttggcaccagataaggcaggaggaacctccacagccccttccccagatataaggtatctgggtttcacctggggaatcccagccatcctcaccggagctcatgtgaaacatccctcctgggggcatcacaccctttttgttcaggcaaccattccctggttacctccatttcaaaacagccccaccttgatcttacaaagtgaaccgccctgaactatgactgccatttgccatttgtgtctgggaccccttccgcgtgcaattcaccaatcaaggtgggtgtccaggctttctggttcccatcattcttcaaacagaatgaactagagaaatgtggaaatggccaattgacttttttcaccctctttgttaagaaaatgtttggggcaacgacaactggttaaacattgatggcagccaacagtggctgtgccaggttcctggaaggtcatcggtcctcacgacagccctgggggcttgccctcaggcaccccagtattacagaggagagaacacaaaggctcagacagctaagggaccaggccaaggtcacacagcaggggactgcagagcacaccccgggccccacacaggcccgctcttagccccgcagataacccaggcctgacctttctacccttgttcccccaaaagcccacctcgtcaccctcctcaggagcccggggagtcccgacttaccctctgcccttgctccggagccaaagtggcaaagcttaaatcctcaagcggttcttagcatcccagaacaaagctcccacagggtatctgcctaacatttcaggggttcacggcccctctgcccccagcagaggctcttgttttagaagctgagccagaacagccacagggcccacctctgccctgccacttcccaagcaccccgggggcaccaggccctgtgtgcagagctggccccaggacaggccacctggtgtggtgggaagggctttggggctggatagtccctgggtttaaatcccaattgtctagatccccgacctaagcctcagtttccccatctgcaaaacagagaggacagacagagggaacagctggggcaggctggagcagtgggtggctcgatgaatgcatctgtggttggtgtttccaggcaagcggggagtgtgggagtctctctctcccccacccccacccccgctacccacccccaggagccacccgcccccgggacgtcctgagagtccagggcagaactagaggttaaagattttcatgcctcttggaggaaacagccgtctctccgggactcagtaaccaagaagaagcctttggaagctccagactccaaattccctccgacatgctcaggggccaagggcaaaccttaggtcccccgaaatccctcttccaagtctcctaaggtgggctgcaaggctccgggcctttggttccctggcttggggtctcagggaaccgaaccgccctccccccagacctgctaccccaggccccacgttggtgcccatttcacaggtgataaaaccgagacccaaagagccggtgtccggcccaagggcacttagctgagaggctggcgcctgcggaacctggtgccttccgtctcccgcgcccctggcccgcattttggagcctcgggaccccccggagccggacgggccacggagatgtccccaggggcgcgaggggacctcggctgagccgcccctcccgggcccgggccccacttacctccgggacggctgggcgccggcggccgggagatccgcgcttcctgaatcccggccggcccgcccggcgcccgtccgcccgcgggtccctcctccgccggctcaggttccagccgcgcgccgcccccggccagctccccgcccacccgccggctcgcggaccccgccgagcgcaggccctagaaggggcggcccctactcgcaccccgcccgcccagcgagggcctcccctgcgggggaggtgcagggccagggcctcagtttcctcgcctggaaaatgggtgtcgcgatccccggatagagcggcagacggtctttggagagggctctagttggaatcggctccgattcgatcttgctccgtgacttcgggccgccctgggactgtgtcctagtctctaaatgggcgtcccggcccagtcctccacgtgtttgctcattcattcattcagcagacaatttcctccgaggcgttgaaggaggtccctaccctcgggtatggcccatagagatggttcaggggtaaataaatgtgagctgctctccttggtcttcacccagtgcttactgcgaagcctgcctcggagtaggccatcaatgttttgttgctgttgtttttgagacagggtctcactctgttgcccaggctggagtgcggtggcgtgatcaggaatcactgcagcctcaaccaccagcgttcaagcaatcctcccgtatcagcctccctagtaactgagaccacagacgcctaccaccatgcttggctaattttatttaaattttttgcagagatagggtctcactatgttgcctaggctggtctcaaactccaggctcaagcgatctacccacctcggcctcccaaagtgctgggattagaggtctgagtcaccgtgcctggctcaatgcgtttttgtttattttttttattattattattatttttgatacatgttctccctttgtcacccaggttgaagtgcagtggcatgatcacggctcactacagcctcaaactcctggcctcaagagatcctcccacctcagcctcctgagcagctgggagtacaggcatgcgccaccacaccccactaatttttatttttttgtagaagggggggtgggggagggcagccggtctacaactcctggcctcaagtgatcctcccacttcagtctcccaaagcactgagagtataggcatgagccaccacacctacccatgtattttcttttatcagataacaaaggtgggccccaacacatagccataccctctacccagcactgagtccacttgaatacctccacaggatgggcagctcacttcctccagggtggttggaaagcctagcaggcccacagcttggctctgtgactctctaacccagcagccctatgcaagtcccttcacctttgtgcctcagtgcctctacatccccctgtagagtggggcatacaaaagtcctcacctcacagtcgcagtgaagatgctgggagcatccaggctgtgcagagcccttttttttttttttttgagacagagtcttactctgtcgcccaggctggagttcaggggtgtgatctcagctcactgcaacctctgcctcctgagttcaagcgattctcctgcctcagcctcctgggggctgggattacaggcatgcgccaccacgccaggctaattttttgtatttttagtagagacagggtttcaccatgttggccaggctggtcttgaacccctgacctcagttgatccacccactttggcctcccaaagtgctgggattacaggtgtgagccgccgtgcccggcccagagccatgccattttcatcattagtgttttcactaaattgagctgactcagggactgtggggtagctccttcctcctcagcttgaaaatagcagcatctctcctgaggtccaacagctggaaagtgaaattttagaattgctgggtggggaggcgaaagagagagagagagagtgtgtgtgtgtgtgtacccctgaataggagtgatgtgttcacctccagcgtgaaacatttacaaag

SEQ ID NO: 917026 - DNA, 4001 bp, Homo sapiens
accacaccaggctaattttatttttttttagtagagacgaggtttctccgtgtgggtcaggctagtctcgaactcgcaacctcaggtgatccgcttgcctcagcctcccaaagttctgagattacaggcatgagccaccacgcccagccaaaaaaagtttaaaattttaaaaacagaaaaaagctcacagaaaaagtgcataaagaaaaatattttggtacagctgtacaatatgtgttttatgctgttattacaaaagagtccaaaaatttaaaacatgttaaaagtttataaaataaaaatgttacattaaactaaggttaacttattatcacagaaaaaaatttcttataaatgtaatgtagcttatgtgtactgtgctttaacgtctactatagtgcaccatagtgtcctaaggcaggccttcatattcactcaccactcactgactcacccagagcaacttccagtcctgcaagctccatacatgataagttccctatggagatgtatcgttttttatcttttatgcctatttactgtactttttctatgtttagatacacaatacttaccactgtgttacaactgcctacagtattcagtccagtaacattttgtaacggtttgtagcctaggagcagctggcaattccatatagcccaggttgtagtacaatataccatctaggtttgtgtaggtactctatgatgtgcataagccaaaatctcctaacgacgccatttctcagaatgtatcttcctattaagagacgcatgaccgtacaggcaaaaactacacaactctgaaagattaagatgtctaaagtcagccgggcgcggtggctcactcctgtaatcccaccactctgggaagccgaggcgggcggatcacctgaggccaggagttcgagaccagcctggccgacacggcgaaaccccatctctactaaaaatacaaaaaaaaataaaaaataaaaaataaaatagccgggtgtcgtggcgcacgcctgtaatcccaactactcaggaggctgaggcaggagaatcgcttgaacccgggaggcggaggttgcagtgagccaacatcgtgccattgcacgccggcctgggccacagagcaagactccgtctgaaaaaaaaaaaaaaagtctaaagtcagacagtgtgggggccccacaatttgactcctgaacaatctgactccaaagctcacacaaaccctttcagctccaggcaacaagaaacaccgtaacagtctggtttgttaatcctgggatactcaactgctttcaaataagacaaagtcaaggccaaggttgtcatttaagccagatttccacttaggactgtgccattatggtcactgaagagcagtctaactttatgctccccagcgtgaccgccccaagagtctgaggtcgagctctagtactccgccctgcacccctccacacacacacctgtttgaggtccccgccacaagtctccagagctttcttgcaatttacaaaggagtagcctgttttccgccgcagcttcatgaggagctccttgctggaggccgaggcagacagacggggcccagcataaaatgtgtgccttggctggggcgactgacgcagaagagacccagcctagatgagataagaaagggatgaggagcaggaagcagcaaactccagagggtgaagggtacacgggcagggaagcgaccttagggagcggacagtgtgcaaaggggggtgcaccggggctggactgggcagaggcaatgctgtcggggaaggtgagatggagtcaaacgaggttgggaggaagggaaaggtacaggcgcacaggagagctgcagggacagcaggtcggtaccagcaccaggacttctcaccgggtagctcccggtccgcgcgaccagaaacacgcgcagcgaccgcagcagcgacatctctctagccgcgataaacaccctccggcgggcgcactggtgaggcaacaaacctacggcgcggcggaagggccagaattctccagcggaacgcaccaaacgagtatggtgccacctgctggccggaggaacacagtcctcgcctctacttgatttcttgagacgacacatttcatacgggaattaccccccacctcccaccccaggtaaaataacagaaaccaagaaataaagtcgtcacaaaacaacaacacaagaaatgtgggtaacattttatgtttattttcaatgcgcatttatattcattatccatttatgactcacaacaaacttgtgtggttggtgaatgggttcgagaatttgtccaaggtcacctaggaaggcaggggtggaatccattaaacaaagcgagtaaatatttattgaatgagcacaatatctgttgaacacctgttgtgtgccaggaactgtgttaggcttcaggggtttagacaggagtaaaccacagccctaccctccaaggtaatttaatggtgagaaaatgagaatcacaaatgtccatgcaagacaaattaaggtcccataagatgaaccttatgggtctcagggagaaagaaatcacattcaagcaagaggctcaggaaagaggcaaagaataatgaagattttgacaggtggcaatagcctttcaggcagaggattatcataaagagtgtgaaagaagtcagaaaactttagtgtggttttagagaacaaagagtacatcttttgtaatttggccagaggtccaatacacgtagcaaaggagtaggaaatgcaataggaaggtaattttggatcacatggacacagactaagtaccaagcagaggagcttgttcttgcttctacaggaagtgaaagctaatcagagctaattttggaagatcacaagagtttgcggaatggactgaaggagaaagcatggaagcagggagtccagagaaggtgactatgtgcctaagcagtaagtaaagagagccccaaccagaagtaccaatgtgggaagagaaaagaggttaaggcaaaacacattaggaactgtgttaggcttcaggggattagagattaggaaggaaggactgatgaagctaaagaaaaatcaaagatgaaaagaacttagtactaggtacagtattcttctgcacacaatgatgttccgtgatcaaggctctaactctggaaagcatgaagaaatacagtccaaaggacagctctgcagccttagcttcagagctaggaggacttgacccagttagagccatggttccactagactctatctctaaaaagcaggaaatgggtggtttgaggcttcttccttctcagctcctgagtaaaagttgggttcttgcacaatagatttttaaggcttaattctttcttaaaaaaaaaaaaaaatcctaggctagcacagtgggccatgcctgcaatcccagcactttgggaggcaaggcgggtggatcacttgagcccaggagtttgagaccaccctgggcaacatggcgaaaccctgtctctactgaaaatacaaaaattagccgggtgtggtggcgcatgcctctagtcccagctacttggggagctgaggcaggaagatcatctgggccttcagaggttgaggctgcagtgagctgtgatcacaccactgcactccagcctggatgacagagtgagaccctgtctcaaaaaaaaagaaaaaaagaaaaaaaaatcccacagaatttttttaaagtccattctgtgtaaacagcaacaggaatggaagtgatcagtgacagtctgtctacaatcactgctctcacatcccatatatctcccttaccccctaaaaatcctggataccttaccatcctccttctctgagaacaggagccaggaacctccttggtgttctaacactagtgctgccagaactctgggattccttgtaagcaggcacctcactgcacctgcccaagagtatctggggtaacaaagagggaaggaggaaagtgagagaggccagggaaatccatc

SEQ ID NO: 917027 - DNA, 4001 bp, Homo sapiens
ccgcttttggtgagctcacattgtagtaggatgtggcaaagctaagttcagacaggtcgcaagtgctaggaaggaacaatgatgtgatcatggctgggaggtggctactttagatgggggatcaggaaaggcctctctgaggaagcaaaacacagttgaaaacagaatgataatctggaaagatgccctgatttggaccaaagaagaagcagacccagagaggtgatgtgaccttccccaggcagggagctgagccgggacctgacctgggttgccggcatctcccatccaaggatctttccttttacaaacactactaaacagctatcacatacaaagaagtctcagtgacaggtgacatccgagggtggacaaaccacccaactacatcctggaattcggtgccgtctgtgcatgacttttgatgcctccctccttcttcagcccagtccagcgttggccctgggtctgaaggcactgtaacccaagagatagaacttggtggtggacaccccaggcctgtgaccttggctgggaaagcttcttcatctcctatctccctggctacaaactgtgaagggtgctccttactgcttcatttggcggcataaaaagaaaagcaagttggtggttataaatgtcctgggctcatctgaagaaaggctctctggaaagtcaaggtgctctaggcagacttaaagacatcaacgccagttttcctcttgttctgcagcactcacacaagaactatggggaatcacacaggcctgtacatattttacacacgagtccaaaggtgggtataaaattcctgctatgctgaatatagtgggaaacagcacacaaatgcctccctctgctacccacaaaccaaacagctctgggccacctaagccctcgccagaccaccaacttggcccctgtaggccagtagtgccccttaccctaggagtcttaactatcatcaaagcatttccaggcattaattggagcctccagtcccttgggagacagatggggccagtggttattagtcccattttgcacaaaaagcaactgagccccagatgacctatctgtccagggaacaatgctactgacacagtgacaaccattaagttctgattcaaacctgtctccagcctctaactgctgctttccactgcaatccagctgcccacaaattgaacacagactatccactttggcctaataccaccctcattctcttcttcacgctcccccacacacaccctatgccccagagtgcacttatgagtttttccagaagctgcctcttctcctcaccccccacccccacgctcacctcacaatacttgccacgaactggagacctctggaacacttattcctcctgcacacagcagcttagactcaagttaagatgctgtcccgccaagcccaactgggctgcctccctttcatactttccaccaattcacacatgtgcacactgcacatatggctggtgaaaaggatacaccccagaaccttccatgccttctttccacacggagccggccaactgcacatgcagggatgggcacgaaaacacaggtgacagggcctacacagccatgttgtcacaaatacacagacgtgcccagaacatgaggacatccctgcacaggcagacaggccctctgaaagcaatgtgcaccagatacagcattttggtgtagccatgagaggcagctactcgaattcagggtggacaaagaatgacattttcaagaggaacagacatgccccgggcacgctggacggcacgaggccctcagaggcccagagctctctcccaaggcacaagtgcagaaaggcagactcatgcgcatagttatggacaccgtgttgcgtgtcccatgcagacaccaatacctgctcacatgccccgcgagtgtcccaggcattcctgcctcctccactcctcatccccagccggcttccctctgcccgcccgggggaagctcgggacagtctagctcgggactgccggcggggcgggcagcggaggtggaggcgcctctcctggacccccagccccctcccgcggcgcccccactcctcgggcgcgcttctgcacttaccctgccaggggctccggaagcggcgaagggagctgcgcctagagagactgagagcggcggctcccggggccgcccagccgcccaccgcccgcagccagcgctcctccctcccagcccgggaaggtcagcgtgtgggcagcccggcccgcgcccctgcgcccactgaggcttcctgccggccctctagtccccgcctgcccagcgctcggccgcgacgccccggcgccggctctcccagcccagccggcaggacgcgcccgggagccccgcacgcgagctgccggctctttgtttgggggtttgcctctctgcgattcagagcacgcggagggaattaagtcagagtccgaggcagctgtgcggttgccggggggatccctaaggggggcggggcaaaaggacggactagtagggcggtggagcggctttcaaactccccgcgctccgcagctccccgcttaggtctccctgccctttacgtttgtcggcccctgggagaggttggcctttgggggtttccagggaccctagggacaagcctgtctgataagagagaggttctccatcccccttcctcaccagcccccatcactgccgtgtccctcttagagtcctgtggagcatcagctttacatttcctgggccccggggagaatcaaggtctctctaatctgaagcaaaaaggaataacagagagtagagcccatctgttcctgctgagtccctgtgaaggtgcaaagctggccctaacgggactggccctaacagtggggcatggattatctatttcccaaagtaacaagggccttgtgcttatccaaccgtgttcttttgaaacttagctgcagtgaggaagattacccatttaccaggttgctagatcagggaagccactggaggcaggggacgctgacaaagccactgtaccgggagcaccaacgttctaaataccccagctggctgctgagaagggcttcgcggggggccacacaggaaggagatgattccaatagtcccgtgagatgaggaccttaactgggggatgaatgcggaagctgcagcaaaggagagtctacagactgtgtggtgtaggaggagcacactggggctgtaacattgtggaagtctggaggagaacctggagtgatgtgactgagtttagtgtggagcaagttggattggagaagcaggccaccttcttccaggggcagatatccagcaaatgcaattggaagggtgattctggagttcataggagagactgaggcaagggatgtcaattttggaatcatctggaaagaagttgggccgacacaagaggtggagggagagggtagaaaaggtacagagaacagggctgaagacagaatctaggtctaccgagaaggagcccatgaaaggaacggaaactatcaggagaaaccataagggaaggtcaggactgtgcggggtgtcaggactcaggagaagagggaggttcaatgggggccggggcccgggctgcagggacaccacggaggagggcgcccaagaaaataggtttagatttagaaagaaggagatctctgggctagttcaagataactatttgagtggtggcttatataaaccaggttgccactccttggggcggggcatctgtatctcggatccaattggttgatggggagatacaaaggttcacctctttgcttccattacggagggccctgaagggccaccccagctccatagcttcccaagggatccgccgaggcctctgtggaaagcagcacagttaaagttcattctctgccgaatcctgtttccctcactctctcaaggtgttgttcccaagagcacgtcccaggagacctcccacataccatctccatctctgtgcagagtctgttt

SEQ ID NO: 917028 - DNA, 4001 bp, Homo sapiens
tttaaattatatcactgccatatgaagaataaagcagttgttgaaaaatgctcttaaactaaaatgatttcactacaacacattttcaaaggaatattagtcttgtcagataacaaagaacaaacagttatctctcattctttcattctctcaataaatatttattatgtactctctaaaggaaatatgcattgttaagccaatatgctataaatcaaccacacctacaaattgtttttaaaatttaaatgaaatgaagttaacatgttcaaaagaaacaaaagtctactcaggttaaagagtcataggcaaaccaacatactcaatctgaagttaccgtttctaggaataatgcaattaaaatggacttctgctaaatactacatggttgataaacaacagtgtcaagttaaatttacttataatctacaaatgtattagataactgctgccttttatttttgattagttatattctagcgaaattatgactaattgataaagttgtcctttcttccaaagtaaaaaatcgcatgacaatataggagatctatcaccatgaattaatttatcttcagaaaatctttcactgtttttcttttttgctgtcaatatttgacaaagtaagctttgagaaggaaaggaactaaggcattatttccaaaattatttgattatgaaaactagttattcaaaattaattttgaaattattaaaggatttataatttttagaagtctggatagtttcacaatcaaaaataaaactaatcttaagattcttatgtgaacttcaacacaatatgaaagtctattttaaatgaacagtttgaggttcgaacacagtagctcatacctataatcccagtgctttgggaggccaaggcgggaggattacttgagtacaagagttggaggctacagtgagcaataattgtaccactgcactccagcctgggcaacagagggagaccctgtctctaaaaaaacaataaaaaatagataatttcaatagtctataaatcagcaataaaaccaaacttaaaaaaaagaacaaattccatttgagcatggactttgataatgaaaatactctgaatttaattagacctgaaaccaagtgtagtttattttttaaaatcatctttcctgaaaaggaaactaacatgtgtgcttttaatatgagaaatctattaacgtctcactttatattattagttcttatgttgatgcaattcaagtttattgttaccaggaaatgtagtctattttttttccagaggctcagtgaaatatttgcttttagcttattttatagcagataccttttacaattatggctacttccttttagaatttaatgccttatttgcaaactttaaaagaaaattaaagtaaaaaatatgttattaattaaaatattattttgtaccctatgtatttgctccacaaaaaactttaataaattaagttaaaattaaatagcatgacataaacttagaaattaaggttttatattgaaatactgtgtgacaatatttttacagtaaaataactccagaaaataatttttcaaatttctcacccacatcccttcagttagaggtttttgatgggcattgattgatgatttttttcttttttcctttttcttttcttttcttttttaaaaaactgttgtcatggaaggcaaacaacttattgacttctcttccatacttctatgtcccacaaatcactgttcaggattaagggtttgtggaatgaacaccttatacatgggcaaatcaccagatggaaatataaatatatgtagctcagaaacaatttaaaaaatttaaaagtgagattacatctacttgggtaattataacaaaatttcattttattaagtattttccaaagttacttaaatattaaaatctacctgtaaaaaaccgtaagctcctcatccagtccctgaaatgctgcgttcgtttcaatttagaatcgagattgtttgtccttctagagcacctgtagggaaaaaccggtgtctcttccttgtgattggctgttgccatggatacgctttgtgtagcggctatgggcgctgtcttacaacaaagccaaggaatctcgctgctgaggggtgagccggggtcttaagactgggattcccgttgagggaggtgaacagctgtgggagctcaggccgagccgggactctctctgcctggccagacttccagcaaagggagagaccgcgggtcaggggatggctgtgcgactctgcgaagctcgaggctcccttccaccctggagatttcgagaactcattcaaaacttaaagagatgtcttggctatgtagggatcattcgatggttactcactcaccgctccccacaaaccaattgacgttattttccttccttccttcccttcttgtcgccctcctttccaccctttctttttctgtctctctttctttcttttttttttggtaatatataatttatatgaaccttataaagtagatttctctcccctttctttacaggggttgaagggggagttccttaagcttttctacttttgacagctttagtgaactccaagtgattcgttatcaacttagagcactttaatgtagcccatttacagtgagacccatccatgactgcacgtcatatacagtaaccactaactgcaggtggctactgaggacttgaaatgcagctaatcctaactgagatgtgctgcaggtgtaaaacacacaacagatttctaagaattactgtccaaagaaagaatataaactctttgcaatgatattaataattaattttgttattacacgttgaaatattttggatatattgggttaaataaaatatattataaaaattaattgcacttctcttttgtttttaaaaagttgctaatagaaaatttaaacttgcgtaagtgctcaaatatgtaattggacaggggtgatctaatgagccagtagatgaacagagaaagtcatgtaaaggaaatgactcttacctccaccatactctcctgcctctctttctatataaagtttagtatacccgtgcattttgctttgtaggcataaaaaaaaaatctagctttccttctaataaagctttttaaatgcactttgagttccattgcaggataatattttgccctggttctgtctggagttccatttcactttgtttttcttttcttttctttcttttcctttttttattttattttttatttttgagtgagtgagtgagggtggaagttatgggtagaactgattttgagatgattgagtagagtgaaaggaggaattaacgaaagggaaagaggatggaaagaaggaatgaagaaaagaacaagaagacaggtggaaaggtcaggcccttgagtaaagaaagaaaggtttaaactagtgtcatgaaaaataaaatgatagctgactagtacgttttcaaaccttttttgggactaagaccaacagtgaaaaataaaaaacagaacattaacaacaacacatattacattgcaactcatgcatacatacctacatttatatgtattaataactgaaacaaaaattttataaacaattctgatctttattatatatagtaaaattatataaacatataaatcaataagagtattagcgtacaattacagttgatcattttgtagtcaaagtttaaaaagaatgattgaagagataaaacaatgtttggtgtaaccataataaggtgtgataaaagtttgttaaattaaaacatatttaaataaatatgttggattggtatgacaaattagagaacacataatttttagtgacatattagcctcttcattttttaaagcagttctgtgctttattatgaagaataatggacgatgatgatgcaaagctcaaagcagaaatagaagctgaattggataaactcagcatttcctccttggaaaaagaagacattgagagtgatgcaaaa

SEQ ID NO: 917029 - DNA, 4001 bp, Homo sapiens
aagaatgcaaagttgtgaatgtaaagttgctagtgactaatacctatgccgaatgtccctagaaactttactgttatctgaccagtgtcctacaaactaaaatcctacttggctaattccccagcctctatccacccccacctcccaccaacacagccccaatacaagagggcttgtagagagagaaacaatgacattcaaactaaatttgccaacttgggcattgtccttacccagtttcctacctcccctggctgctgcaccacccccaacacactcactgcagtgcagaaatcataatcttgttgatacagggttgtgaggttgaataagccacaacaatcaaaacttctttccagttcatcccgagtcttgttgctcatgacccaccaagaagcattgatgacatctgtctgaaagatatgggtagagggaaattaagtctccctacatcctgttatcagttcaagtgcctcaatttccctagcccagcaaaggaagtcaaacagaagcataacggtgtgcaacaattatagacacgataaatatctaccttttgaggttctctagatcatcctcatggaaaattaaccagacatcccagaggaagcaaatagcccaagaggccagaagcagtgcacctaaggatgatctttgggtagttggggccagactaaggaaggagttcgaggttaagaggaaaattttaaaaagcaagtaagtacttgaaagggtactgtcttacctgtttgcttcggttaatagccagacatgagcaagagattacaaattggaagatgaagaccaaaccaaggatgatcatgtactgagaggaaaggttatggaaaaaagtcctagattcctttatgtttcatctataataactgtctggtctcatctgttcatagaacttacaccaccatgtcaaattgaaagcaataaaatcagctcttgtttcgtagattatgggacagggcagggcaaggagacgtgtccaagatccctgaggtcccctacccttctaacatcttccttagatgacagccctcccaagcccccggttgcccccatcacttcaggtcaggatacaaagaacagcaggacttggtggtggttgacagcacccaccagtccagccactgcaataaggagaaggaagactcccacagcaatgactccgccgatgatgtggatgctggacaccagacccaggcccttgccccaagcagccactccaatgagcaacaagctcaccagctacgaagaaagagcaggatacatctcaacaattctagcatgcggcacagcccaaggccatacaagaggacttgggagcggggcagggggaaggaataatggaatagtgtgtgaatgggagctggggatggtgctatccgcaccgggagcatccctaggcactcccaaaggttagaatggctaggatggcggggagggggtggcagggatggtagtatgaatgcaaaagatgaaccctcaggatcatcctatcacttccagtttggaagaaactgaggttcacaggaaggaggtatggaacttacgcccacggccttcagttcattcccccaccctcagacaaacccccttaatcaaccggaagtctcctctctcccacggaagtccccaggaattccctcgtcgccggaagttcctgggaatcttcccggaacccccatacacccctctccccaccggaagtaccctagagattctccccacggggcctttccgccttgaagcttcccccacctccaaaacctcaccatgtagaccacgttgagagcgcaaagcgcattcttggagcaggcaaagccgccacaaaccatctccccagctctggggacccaagtggtcccaaggacttggggggagggtattggggaccgtcttccaggaccccgacagcttctgtctctttaaatcgaggccagccaaacccaatactctgcgcctgcaccgtccctcccctgcctctggattggcgaaatgcgtggctaatcctggacgtccaaggcctgcatgccaatcaacccgcattacgtcaccgacccgccttctgtccctctccttttgttttttcattgggcgaaacttaaaactaggggcagggtttctagagactctcttagggactacagcctaaactccaaaagcttaggttgaaagctgagctttctgtggtcggagttaggagagggctaattcccagggagacggctctggaggaacttaggtgaaggggagacggcgggaggggcgggtagggggccgctctgagagctgggcaaaaagggctccgcccgtagaaggagggcccttccccacccccttccccctgttctgcagtgacctcacgatgacgccattgttttgttattgcgtcacgctcgggaacacccaaaggagccacatattgagcttatttagcccggccgcagagtccgcgggttggacacagcaacacccagcaaatcatcacacgtttgtgtgtcctctagtacccatgtcctgttccatatctcctcctaaaggggtgtgaatataccagaaattcagtgtggaaatagcggcctcaggccagcgcattcctgtatgtggcattgccacaagtgcacagaggggtgtgctcagcattttcagagtacacgcctgatctagggcttgcaaaaaaacggcaggcaagaggaagagtctcatttacataaatataagtggaaggagcctccaccttttcacttgggggtaggctgatcaacaactttattatctagtaagtgctttgacaaaccgtccttctcacgggggtagggaaaggcataatccttctcttccccaggagaaagaaacagtaggaacaaaaaagaaaaccctccaatcaactcaacagaatgatttaagtttgtgtgtacttagattctatagacttactgccacagtcagattgccacttcctagctgcgtaacctttggccaggcacttagaaactgtctgtgcgtgtttcctcatctgtaaaatggggataaataacaacacaccctacctcttgggttgtaagaattaaatgagttaatatatgtagaatacttagaacagtacctggcatatagtaaacactcaatgttagttattacttttcaggtcattttacaggttcctgtgggcaattccaacctcaattcccttatctttaactacacagtatttatataaactcttacagaaattaataccaaaaaggtatgcaggagaatagatgtttgacagggcgagagaggtgtttgggtcttgaaacaaggtaattaagttattatcattattattattttgagacagagtctccctctgtcgcccaggctggagtgtagtggcgcgatctcagttcactgcaaccttcacctcccgggttcaaacaattctcctgcctggctcagcctcccgagtagctggattacaggtgcccgccaccacacccagctaatttttttgtatttttagtagagatggggttttgccatgttggccaggctggtggcgaactcctgaccttaggtgatctgcccgcctcggcctcccaaagtgctacgattacaggcgtccggtggaaacaaagtaattaggtcaaactacccgctacctcctacctcccaccccctcactccccacctccatccccttcctaccccaagtcccatcttcattgtctccttcagttcctcatctaccttcttttctttgaggtcctaaatcaagggcaagacaatgatattagaaggggaactggttgacaagcattttggttgtgtggtgtagtgaaaagggtatcaaaattataaccaatctgggctttatgtgcttggtaaaaaataaaaataaaaatgtaaaaataaaatcagaagacctaaatccatgtctttgtttcacctcttaatggcttctctgagccttagtttccttttatgcaaatagggataaataatcc

SEQ ID NO: 917030 - DNA, 4001 bp, Homo sapiens
ggattacaggcgtgagccactgcgcctggttgtggttacattttttcaagaattattatgtttcagagatatatactaaaatgcttacagacaaaattatatatctgagatgtgcttcaaaataatatggggtgggggaagtgaatacagtaaaaatggagaaagattggccatctttctgtggccacctgggctggccaatggagttgattacctatcctatcttctttagtgaatattcaaagttctccaaaaaaaaaaaaaaaaaacaaacaaaaaaaaaactagaaacaaaacaaaaccaaagaatacaggtctttctttttttgtataacctgctcccaatgtttaatcaatttaagtatctcaagggaagaaatgtatcagaactaactaaaaaactggcatatatgtagcatgagctacattaaatatttgcaaaagcagcccatttttttaacctaaaaacagcagcccattttttttgccttctttattttacttttttaaatatttacttacttatttaaaagtcaccaatatatccatttgtactcattagcactactgatcattgaatggaaaatcagtctatacaataaagctgtattcatgtagttaagtttaattaagttcatcattattttaatagaacagaaatatagcaacacataggtatgagatgtctgtttactaaagatcaggtacaaaaacaaaaccagagttctttcatccttggagtggataaggtagcttttaatccagtatacaaaatacttttttcatttaaatactttgtgctatttccactgattgacatttaaacaatctttaattgtaccatatatgctaaaaatgataaggtcaatgtcccaacatcccagcctgctcttttcataccttgtttttccattatctattgatagatatcagttatcaatttgttggttatgtctatgtcaatggactttcaagagaaacataacaaattgctaaaatacaaatcctgtcaattaaaaggtagggtgatgacacatcaaaatactgactttaaaatgccaatacatatatatatccacggtcttagtttgattttcttatgatttaggaattttatcatttccccctcaagtttttcatgacccattttttttgtctttgaggctctgaaaatgatctttattgtcccacaccctgcgattcacctgttcaaacccagaagtgaagggcgggaatcaggacccgggctccggatggaatcagaccatgtttttaccacagagtccttaaattagggaggcctgcttgatatacaactaaggaaaattgtcctttaattaaggggcatttgtgttcctctgtgatttttttttgcagcaatatgaaaacatttatgaaatgtttatcctcacattctgaagtgcacttttttgagtccttggctcattttcaattactgaaataaccaaagaaagaacaaacaaatccaaacaagtacatggaaaatacattttcccccttctcttatttctctagtgtacagtctgttcttgtttatgatatttatatcaagatcccctttcttgcataaaattgataattaaaaggaaaacacttacccagaacaagaagttgaaggtaaacatagaatattttatacaggcactcacacctgccatttcggaaaaggattaggaatccagatgccgtgaatttaactattcgttacaggcttgtcctgcaatatgctctggagcaacttgcctgcagagatttctgtatccacggcttcagagcagaaagagaaagcaaagaagtagagggaggaataaaaagttattaaactggataaaaaaattaacccacacatttaaatatcgcaaaggctattaacccacacatttaaatatctcaaaggctattaactcacacatttaaatatcgcaaaggctatctccaggcaagtatgttcctttgcttgtcatagctcctggggcactgggccaggatatttatgatcctttctcaaaaactgcctcctctaaagtaaacagatatcaagtgaagggaatggcactggatcaggcaagagaatggcacagtgctactaagttcttggctttcagaaaccactgcctgacttccccgccctccatttcaactatggggaaataaggttgttttgttctgagttaaatggacattgtatctctactcatttttgcattgcattttctcaatactacaaaattccttctaaatgcaataaaatgcatttagaaatctgcaaaatatcaaagcttagacatagcaacctgttatcattaaacctagaatagtaaaataaccattacatgtatctgccctccaaaacatctaaatttatttcaaaagaattccagagctgccgtaaatacaccacagaaattgcagagggagaggcagccttgcctatcatgataagaccatttgctttttatctttatttctttatgatacaaagggaaagaaatcataaagtggcactgactgcaacattgttttcattttataatgcgtagtcattctgatagcttggtttgtttttaaggtggacactgtaatttccttcctctgataaattgtatctagcaacagctgttctccaccaactcagtttctggattccaggtcctcccggacaaaaaaattcaaaatgggaaggtggtcatggatcagtgaccatagattttactatttgtttctagtgctaatagaaggcagctgtctcaggtaaaggcaaaatgctccgacatcatcagggaggtgtggactgctttgtgtaaacagcctgggtcatgttagtttccacatcctgcctctcaaagggagttcttctccccctaaataaaagaaccctctactttaaaaggttgttgagaaaattattctttagaatctttgctaagttttacacgataagcaagcatgaactccttacaaaagaaaaatattatttctaattttcactggcatacaatgtttttgaaacaattctactccctgactacaaatacaatatattttaatgcattatcaacaataatatatagcgttaaaggccaaatttaggattaattccaaaaataatggcttaatatataaatcatcactaaaattgtttgtgttctctttcctactagaaaatggatagtttcacaaccttctattgagatattttgtatatagaataatccaaggctgaaagaataatttcagattgaatgaaaaccaaaattgattcatagtcccagaaatgattatttatcagaggctaaaattaaaaaaaaattacagatttaaatgctgctttgttgaaaagaatgtattgaatactaccaaattttagtttgaaatagatattttggtggatgctgaacatccttaaaaagaatactgtgtagtctttagttgaatcactcttgaactctgtaacacaaaaatcaatggatgtgtttgtacaggagaatgactgtgtaatagaacccctagtctaattcaaaacctatatgaaacagttcactcctggaaattcctattcctattaatgttataatcacacaacactctcccaggctgaatttgtacagatattttgtatttctctttctttccatccaatcactcttactggtctgtgtagctcctaaattactgtcaaaactatttcttccatctcatccttttgcatttcattattcagtcctttatcatttcttacttgagctgtgtcaatagaatgagaattaatttccctggcagtttctcccagttcctctctgccttagcactttaaaattctttttgagaaatacttattgattaggtaatgataatgatgaaaacccaatctaaggatattttccttttacctacaagataaagttcagattccttaaagtagcatttacagcacacagcaaacaagtcctccacccactttccagaattttgtccctccc

SEQ ID NO: 917031 - DNA, 4001 bp, Homo sapiens
gaccttagataagatacttattctctctgagtatcattttcttaacctataagaaggcaattaaaagtaacaaacttcagccaatgcggtggctcacgcctataatcccagcactgtgggaggccaaggcaggtggatcacttgaggtcaggagttcaagaccagcctggtcaacatggcaaaacctcatctctactaaaaatacaaaaattagaaggcgtggcggcacgcgcctgtaatcccagctactcgggaggctgaggcaggagaatggcttgaacctgggacgcgggggttgcagtgagctgagatcctgccactgcactccagcctgggcaacagagtgagactctgtctcaaaaaaaaaaaaaaaagtaacaaatttcacaagattacgtatgaattaaataaaattatatacagctaatgtaacgtgcatagaaaaaacttggccaactataaattactttatcaacactagttattgttattaatattaaatatctgttcataggtttaaaaagctctgccagaatattaaaatctgattaaaccagaccaaaaaaaaaaaaatcctactctcacctgttcagggacttgcacacagggcgtcttcagtgagtgagagtagaactgaattacacttcaagttttatctaccccaatcctctccctccaacccacagcccagctgcatcagccatgccaggaccaagccgagggtaggaagccggtgtaattgtctgcctctctggctgcattccttagctaaatataaatgatttgtccaggctattgtttgaaattatccataatccctctcctcccctccccattacttatgatggcaagctggctgcgtatctctatagcaaagcatatattcaacattctctgtggctattttcagtaaagagaagggagctggcaggtatatatagggatcctcgcatgagtcttcagttttctccactagtccaggaaagcttcctggaggaggaaatacctgagtcaccccagggaaaaggacagctgcaggtcagaagggcacgcgcacataatgagagactgggtctctgaactaagagttaccaggtaaggcaggtaagcccctgccttcttaccccccgttttggtgatgcgagaaaaaggtagctcaggggatcccatactagcccaagcttccccagacaaaacaggcatttgggggaagatgaagcagtgactcgtatatttttcaaagagggaggagatccaagactccagttccaagatgtacaagtacaaatattgctcttacaacaacaagccggtttcttgtttggatctttttttaaaaaccacaagaaagttttttgaagtcccaaacttgaatgcacagatgggctagatctccaacttcgggatgtgccagagtcctgtcactcggagtgctgatcttccagcagtggcccagggagcggtcgcgggtgccggggggctgcaggccatatcccagccctgcccgaaggccccctggccctctctggggtccttgtatggactgtcccaagcggtgcacggggtcacacagtcggaaacccttgccggccccgggttactccctttctgaaacggtcttcctcggagccatcccctggaggaccccacttcgctcggtgcccgggccccgcacccaccctccccttcccggcccgcttcccgcacggcgcctactctgttcctcgtcctctcgtcccaccgccgccctgcccacactgcctcccgtgggcgcccccggccgctcccccttctcgggtctcggcctgggggtgcccagcccgcccggcgccggctcaaggccgcgcgactccgcacgctctcgagacccgcctcgccgcccgccgcccgggccgcactcaccgcgcccgcaggacctgggggtctccgctctgctcgcgctccggcaccgccgccgccgccgccgccagcggaaacagggggcggggcctgcccgggaatggcgagcctgcggggcggggcggcccgggggcggagcggggaggggcggggcggagcggggaggggcggggcggagaaggatcgcagggctgagcggggcgccagcgccagtgcccggcactgccccgggctgggtcccctgcgttagaggaaggggagcccggggacggggcacggggcccgcgaggcacgggtgctctctcggggttccggaagcctccctccccgccccgccgcccgcatgcccggaccggccgctcctccgaggtgctatgatcccgccttccccctgcggcgaacgggcctcttcccggggtaggggcggggaggtccgggcctggcagtgcgctctcctgggctctgcgcccacacggcacccaagggccttcctggcccaggcctcggctctctccctcgcgccaggctgcctggcctcgccaccccacccccacacctacgaaccccttccctggtgtttcgggcggactgtgcgagatgctgacagcgcgggtgtgtgttggagcctgcctgagacacctcccgcagaaagggccatgcctccccaggagctggcggcctccaagggcgactacagggcaccgtgtgcctgaggggtgcgctaaggcaggagaaactccagctaggcatgtctggcccgggcgctttttcaggcctggattttatgtgttttttgctttttgttttgttttgttttttcttgagacaaggactcactctgttgcccaggcaggagtgcagtggtgcgatcacggctcactgcagcctcgacttcccgggctcaagtgatcccgcctcagcctccagagtagttgggactgtaggcgcgcaccaccacgtccggcgaagtttttgattttttttgtacagacggtggtctccctgggcccaagctggtctcaaactcccgggctcaagccatcctcctgcctctgcctcccaaagtgctgggattataggcccggattcttaaagctagaaggcctaaacttgtttccaaagagcactaaaacgccatctcttctcatcattactgtcatcaaaaatgtcttctaggccaggtgtggtggctcacgcgtgtaatcccaggactttggggggcccaggtggaaggattgcttgagctcaggaactcaggaattcaagaacagcctgggcaacatagggaaaccccatctcaaaaaaaaaatgttttaattaaccgggtgtggtggcacacccctgtagtcccagctgctccggaggctgaggctcaggcgttggaggctgcagtaaactaggatcatgccactgtactccagcctgggcagtagagggagaccctgtctttaaaagtgaaatttttttaaattttaaagaaactgtatgctgtgcttcccacgtgccctaccattgcactaagcttgactggggacaagtttttaaaacctggctataatcactagggtcacttttgctttctgctaattagactggaagtttccactcatcttctgggcccctttccgtcacacacatgcaaccttgtttttgtctattagactaaacccataacccatttccttctgatctccctttccccacaaggaaaatattctccttctacattttgcttcatccaaagccctgttcaatgcccctataacaaagtcttcccaaggaacccccaccagccccaatctctccagtcactgcggcagagttgggtacatgtacccagaaaaggaaactgggtctcagacagggaaagagatatactaggattgtctgccagcaagccaactcactggcagaccattggacgcagcctggtgagggagtagccgcagggcttgggagccagacacacctgtctgaatcctggctctgcttttatcggctgggacctcttcaggcctgttttctcacctgtggaatggggcataagaataccaattatggggatgggcatggtggctcacacctgtaatcccagtacttag

SEQ ID NO: 917032 - DNA, 4001 bp, Homo sapiens
gagtttagacaaggtctgccttctgcattgctgcattgctgtatttgctgtgcctggtgctagcctgtactgtctgctacattatttaacagagcaagctctatttccagcagctgcctacatgatctcattgtgctgttttgccagttttcctcctctgaccccgcccgggaccatgtgcctgaattgaaatgaattaattaagatgcactggaacaaaagacaacgggatgcggagtataattcttctttgtctgtagcaatttcattacttttttttttaaaaaaaaaggtttttccagatcttctccactgtaaaagctgaaaaattatccgtatcttaacacacacacacacaaaagttcctaagttagaaacaagcatcacatgaaaaggtaccaaagaataaaagcccagtggaaggataatgaaatatttatttaaaacaacaaaatagtattttcatcctgagattctctacccatcacataatattcatattctttgcatccaatagaggttttcttctctgtggtctttagggctaccactttcattgtctattcgctgatgtggtgggggcggggcgggggggcggcggggaagggcgtttccctgggtcctgaccatcagggtaccctggggctcacaaagtgggctttctccctcgctgaacgtgcagtccagacagacagacagacacacacacacacacacacacacttcagtcggtcagggcagggcgtcccacagacacacacacacacacacacacacacacacacacacttcagtcggtcagggcagggcgtccccagaccagacattaaagagcttgtgaagtgaattatgattttgctcaagaaaaaaaaaagtcatctaacttataatagtgaagaaaacccttttggagcctacagttccgcaatgatgaaaggtttttttgtttttttttcagtcagctcctgacagaagaggttcagtgagggcgaaccccgcccagtggctccaacgccatagaagccagaaacaaacaaccccgcccctgcgccgccctgacacccgctgccgggggctccggcagaaactcaccatgttttcccgggaatgtgtgggtatctttccaaaacgccaaagaccgcggagggtcttcccacgctaaccctaggctgcgctttgttcccgttccccctcccacgtcccccagctcgcccaacgcccccgctctttttgggtgcctcctcctctcccggtccccagagaacaacgcgagacagaaagtggcccctcagcatcagcgaaaccgtgcgcacagacacggggcccagccgggacgccccagacccctcggtcgcggcagacgggctgcccgcggcccccgaaagtctctcggataacacaggcgcctaggcgccgcctttgttcctccccagcgctctgctgcgccctgggcgcagtactggcccggttcctgcacccgcactgcggcggcggcggggcttgaggatttggggctaagctaaacctcacaaaacataccaccaccctcgcccagagagcttacgaaagaaaagagcttaaaggttttccaagtagagcctgggggcgctgactccacccaacggccacaaagagccgaagccgattctcaccatggttgctgcttcgcgactgccgagctgatggcggagacgaagaggagaggttgttgcttcttacagcgcgactcttaggcggtcgatgtaagagaacctgcggcacataggcggatgcggctccctatatacaactcggtcaccatggggatgggccggggccttttcctgttggtccagacccccaatctgcccagagaagccatgacaggagactggtgattggtgcaagcgacgtgggatgaggtaatctctcccccacccctttttctctagcatccgtagactgtttgcatcctttagacaaagagaccgtgcagaagcagtcggccgagcatccattatggggcggggttggggaggggcggaaggagaagaaaggggactggggttagaagactttctgttgcttaaacctcaaactgcagttaaaattatctatgtgaggttttttccccctacccttaataacaatttatgtttagattaaatatttaaaggaaaatgactgccagcccctccctcgtagtatattaaactcgactacattttgttagggttcaacatctctaattgctttaaacgtaaagtgggagggaaaatcggcatgatgctcgaaatggcctgggtatatgtgatttttttaatttaaaaaaagatttagccatacggtcattccaaatggtttctcaggttcaactaacttattttcagagcttcttctgcaggcacacgcacacccgaatagctaaacaaaactggaagatggaaagaataaccatattaaataaagaagcgaacaaatagttctaacatggcaataatcaagagcaagtgaacgtagagtagttataatggtttactagaggtattcttttatgagaagtctatgtaacacattttgtatggtacattgtcctttggaatgaatcatctttcctgatagaaaattgggaaaatacaaggagaaataattgagctcagaagttagtactacatgtgtgcagttacatatctgaattggacttttgtctggaaagtaacaagcaaaataatagtaataaccaatacaccaaattaaaaagaagaagagaataatataatgtaaaaagaattttgcaatgtcgcctccatccacagacaactgtgaaacatcagctcaataaacgcatttcctttttatgtagttcttatgtcaatttggtaaatatcctcctgcgagtgggcttctaactgtgggaattttagccggcctcacacccttgctgttcagctagagactctggtggttgctcagttgtcccttgggacaaaaaggctttgctttcacccctaggaaataaattggagtaaaattatcttgatatttaggaagcctccattctcagcaacgatccggagtaagtcactggacttcgtaccactggatgttggtgatgaaatttcagaggtaaataagtttggccactaaagttgaaaatttattttttacaaataatttttccttttggttttcagagacaaattttcagggtctgcagcactactcacacagtgctctgcggaacccattcattcctgctaggctggcaggctaagaagggcgtgggagggagggacttgagaatacagctgctgcaggttgtggtgtgacaatggcgaccacagatttttctagcctgccatccacagttctgctttacttgatcaattttgcttcagtaatattctctggaaaaaaaataatatccaaaatgcaaaaatcattttatctacttattgtatatttcctaggaaaaaataatcctcaacatcatcttatctccacttctttagcaaaaaaaaaaaaaaagtatatttcagaagagacaggaggattaggtatttgaatgcttctttcagaacccagaaatatatttaacaaaaataagaattaaatggcataaggaagcataaggattaataagtagctcattcaaaatactttcacaattttaataataaaatatatcagacactattggactatagtaacatgtacaagtctttttggaatgagaagcagagtttgaacattattttctttacaatataaaaagattaattaagaaatatgtcacttatccaatagtctcagttctttatgcaatttccaaaggattaaataaaagagaggagggttcacgtggttgattctttgaaattctatctcagagccattctgttccttatgtaaatgagggttattccctccgcttgggcatatgtaacaagatctaggtcagaaatagactatttaggcactgataatctcaaatatataaacaagagatcggggaaataact

SEQ ID NO: 917033 - DNA, 4001 bp, Homo sapiens
tacaaacacagcccggggcacgtgcttgccagcgcccgtctcactgaagaaggtgttgaaggagtcatctcctcccccaatggtcttgtcacttggcatctggccatcgggctggatgccgtgttccaggcagtagagctcccagcaggcattgccaatctggacaccagcctggccaacgtggatggagatgcactcacgctgcgggaaggaaaaaagatatcacaatttaaaccaatctattgatgactgtcaagtggaacaaaatactcatgcaatctttatttttttagagataaggtctgtcgcccaggcttgagtgcagtgatgccatctaggctcactgcagcctaggctccagtcatccccccacctcagcctctggagcagctgggaccacaggcacagaccaccaagctggctaattttttcattttttttgtggagatgaggtctggctgtgttacctaggctactcacgtaatctgaaaacgaatttccttttctaaagcgatcttttctaaagatccttttctaagatgtactacttttgagaacagctacactatagtctacgttgcttttaatgaatgttaccttcccatcctaaaccgggaaggcctccttccagaccaagacagctcagtcacagcttcctcctttggaggaccaagacaggaaggtgggcatccatccagcgctcaggccccagaagcccactttagactaggtggtcacatttccgggcagctcctagcacaggaagcacgtggccagaccagcgcagaagaaatgtctgtccgcagggacaaggggcggggctctgcggcacaggatgaatgagcaattccgggcgcgcgctcttgcgccccccggcggtgctgcagaggcacgaaatggccacgtctgcaaaggcgctgcccaagccgcccatcctcccttgcctgccggcatcgggctcagcctaacacctccacagcagtctgagcgcagtaggagattatcggcggcccagatctgggtcaagatccgatttccgttccctcaaaatcccttactgccaccacctgctcccctgaattcctaacgcagcagggagagacaggtggcctctacagactgttgtgtacgaactgtcgtaatacactggtgtagagcggtacattgacagggagctcttccgcagtcctcttattgctttcatcaaaaaaagaacactcaggttaacaggagacacgccctgtagccctagtcgcgtcgcgacccagagcgcatgcgcaaagcgcagtggcggtttcccgcccaggagcggcgggaaggtaacggtcgcgcgtgcgcgcttttgtctccagctgcttcccacccccgcttttcgcgctcaagaggaagtgagggctggaagagtccgcgcgcgcgtccacccaaggcggagtaagggcatgcgctggaaaggactgcggggactcgagggaccgcacccaggacacagttacgcgacaaaagagagctccggatacggcggagggcagcccgagccccccatcccttccagagtccgagaagaaatcctggcgcccctcgacctttccgggcccccgctatttacacacaccgaggtctcaccactcccgccctggcctctcgcctcgttttccgccctccaaacggacggctctgaggccagcccttcccggctgtatacagggccccagcgccccgccggctcgcttttccctgcttccctgaaagcagccgggagccgcacggcttactcaccatagtggctagggattaggaggcgaaggcgacaggagcagacaccgggtcccggttaccgtccccgacaagctaagagtcgaggtaagtaacgcactagggcggggccggcgctggagcctcttaagtagcggctgcggaggggcgggcgggcacaggcggtgccgcggtcgctggcccctcctccggccccgcgcgcccactccgcgcccggcctggccgccgcagaggcgggctccgagccccgagccccctcccctcgcgcggccgcggggtggggtctgccgcgcctgcgggcaacgcgcgccagtactgcagtgtgcggcgcatggctgcgagggcctgccgaggggcgggcgcgagtcggaaagacaccgaccagggaatgggcgacgaggcttgccttaattcggaggaaacccaggacttgagagagccatacaatttgaaagacgaagcaccgtgaaatgcagaaagttgtggttcggatagctcagctgattaatttcatgttgccacagtttgtcagtgagttttgcctttttattttctcagttcctttaaaggcagtgcattcggtacttacctgataatgtgaaaaacgcgagctttagaaaaccgaataggtgtacatggtttactgtaatgacttgttctccaaagtaagagtaccaaacgctggaagcaaatagtatttcagtcattcgaagagtagtgcccaagcatttaacattgaagctgttaaaagggcaaagtaggccccaattttagatctaagccatcaactttatggaacagtcctaagggctttttgaaaaggagatttaaaaacacatttcagaggtggtagctgagttgaagaagtgaggaaagacttggatagggaggaaatagtttgacactgaaggatgttaggaagtagggattccttgtgcaacttaagagttttgtaaataagacggcttggccttgtgtcaagatacatcaattggttatagcttagtgcttggaggcccacattataggagtagactagttctccctccgccccgcccctggaaaatctatttcaagaccataaaccacattgctaatccttggaaatgcagaaggtggttaggtttaaaatgtggctttaaaatggtcctaacagaaacgtattgatgttactattcagaatatctgcccagtatacgaggaagaaaaaggttaaacctaaaacactaaaaattcatagttcatattcagttattagcctatgaagatttggtacagccttcatccttcattttagacaaataacaaatctatatggtttataagtgtattttgtaaggagttatatatatctatatatgtgtgtctccacccatctgaacctgacctgcaaaccaagaggttcttgtttatttccgatagttttggtagtcttgttaaaggcatttgattcaaaatccaaatttgcatacatttttccaactggatagaggaggcaggaatatatttgaatattgttctcacttattttgtccctcttcttattctttaaaaaaaaattaagcctgtcaattttagcagtgggggttgcatatcaattttagtgatactaatgttaataagttctgataacccactaccattggaccacccccactcttattcctaaaacgaatctgaaaataattagcttgctttaacgggaagaatgaatgttagggaaccaccctgctgaactccattttgctgtcggctctgaataaagctattttatccagaaaagctatctctggacaaatattttgaatagttcagtaaccgcaataggtttctgctagaaccattttgaagccaccctttaaccctaaccaccttatgtatttccaaggattggcgatgtagtttatggttttgggatagatttttctgggggaggggagaacctcccttctagctctctgcagattatcagagccgccactgcagggatttgctcccgtgggcctatatgtctccccagataccttcctaaaactattagcttttatctgtctgtgtattcccctgttgtgaatggggaagtatttgagggcttgtttttttaggttcttgataataaatacctcaggtttcacagagtaatcaaactaaaagaaaacttcttttttatttcattttatttttttgaccgaaactccatctccaaaaaaaaaaaagggtatattgtt

SEQ ID NO: 917034 - DNA, 4001 bp, Homo sapiens
aattggtctagtgttaactggataagcagctcttacctctcgttaaaaaacaagaaaatttaaccagtgttcacctaaaccagtccgctgccgctctcctgctttttaaagggtctcactactttgtgaatcccacttttaccagtatctttttggtactgcttgaaaagaagcaataagttgttacagtgcgacatatacatgtatttacatttgatttttatatttaaattcatgtacgtatttttgagataaggtctcgctggagtgcagtggtgcgatctgggctcactgcagcttccacctcccgggatcaaaagatcctcccacccctgcctcccgagaagctgggactacaggcacgcaccacgacgcccagataatttttgtatttttagtatagacggagtttcaccgtgttgcccaggctggtctcgacctcctgagctcaagcggtcctcccgcctcggactcccaaagtgctgggattacaaccataagccatcgcgcccggcctaagatagttgttttcaatacttctggaagctttatagaaaacactcaagttacgtataatttcacgtttcttgaaaactgaactaagaacacgtggtactagtttactctggggtttgcgggtttttttttgtttttggacggagtcttgctctgtcgcccaggctggagtgcagtggcgcgatctcggctcactgcaagctccgcctcccgggttcacgccattctcctgcctcagcctcccgagtagctgagactacaagcgcctgccaccacgcccagctaatttttttttttttttttttagtagagacggggtttcaccgtgttagccaggatggtctcgatttcctgatctcgtgatccaccagcctcagcctcccaaagtgctgggattacaggcgtgagccaccgcgccgggccgggtttgcgtttttttgagacagtttcgctctgtcgtccagactggagtgcagtagcgcgatctcggctcagggaaacctacgcctcctgggttcaagcgattttcctgcctcagcctcccgagtagctgggattaccggcgcgcgccaccacgcccagcgtttttttttgtttttttttttttttaaagtagagacggggtttcaccatgttcgccaggtttgtctcgaacaagtgctgggattacaggcgtgagccactgcgccgggccaactctggttttataagaaaatatccttttgtggacgtgtttttaaacccggcttaagtagaaagcttcagctataaacctaccactagattaacaccagaaatgcaggattaggcaacgtgaaagttaattattcccttccaaggaggtgcctgcctccattctcaagtggactggcgcagttggaagctctccccagggcagggccacaggtgactcagcagcgagtcactgggcgctggagagggggagccaggaagtgctgcaccgtcggtgcgggagcgcacgagggcctccggggcccagtttgtaaggcagtaggaaggagaggtcgcttgagaaaacgtggggagggatttttagtttaagttcttggaggccaatgagcaggctccctgaccttcctccctagggcagtagcgggccctgcggggaaagccctcactaggatcaagagggctttccatttccactgatggccgcacccgggccaggttttccggcccgaactggtgtctgccaagtgaactcgaccttccagcccggccgccacaagccaggttaaccggaggggcccggggtagtctggagctgtcctgggcgcggcccgaggtgcaggcagtagtttccgggcccgccgtcccctgggacgcgcactcttccccagccccgagggaaccccactcaccatgactagaacttgaaggggtctgcggcggtgaaggaggcgaagggacggcaacaaggatctcccactaacagactaccaaggagtccgggggagaagtagtgaaagggtggccggccccgaagggccttatatacccggtccccggccacgtgtcgggagggcgggccccagaccccgccccgtgccgctgcggccccaccttcgagccctggcctgcgcccggccgcacccgcggagtgggggcgcgcggcgctgattggcggattcaaaagttcaaaccaaactcgtcggaaggagccaggagcaggaagaggaggaaggggaggaaggggaggaaggggaggaaggggaggaaggggaggaaggggaggaaggggaggaagggcaggaagggctctggggctggagaatgggccgggacagggacagaggtgtccactgggaggagggagcaggccggacgtctgccccgtccccggtgggtgcgggggcgtcaggtgggcaaaaccccagcgaggggaagctccaggtaagagggcgaccgcgcccaggagggaagcccttactgcaccgccccggcctcgcccccggtccccgcggctgcgctccctacgccgccggggaggcgccgacgccgggaccaggctgcgggttccgcctcggagtcctggctgccgggcaccccggctgggcccgcgggcgcccgctcccctcgccgctgagggctgtccagagagagggcttgctccccactctaggtctgaatcaccacgaacgcgccttaaactctattcccacctttttggttgcttttccttacgtcctctttaaatgagcctttggcttctaacagtctcctcccgataggcgcaaaagcagttttttcagttcattaggataatgaatagcttacattttttgattgctaactatgcagagtagttggctttttttttttttttgagacggagtctcgttctgtcacccaggctggagtgcagtggcgcgatctcagctcactgcaacctctgcctcccgggttcaagcgattctcctgcctcagcctcctgagtagccgagactacaggcgcgtgccaccacacctggctaaatttttgtatttttagtagagacggggtttcacagtgttagctaggatggtctcgatctcttgacctcgtgatccgcccgcctcggcctcccaaagtgctgggaatacaggcgtgagccaccgcgcctggccgagtagttggcttttcatatcacatgatcacatttcatccatatgacaaactctatgaattattatccctagtttacagatgaggaaagtagagctccgaggaattaaacccttcaacactaacttgtactgcgtcatactaaatgtgcctctctgaccatctctgccaaggtttctcagaagcgccttttatttctgttgtttttgtttctctgcaactctatcatgttatcttagctcatgaattccttgaccatctctgggagatacagagtttatggaaatattgagggaacaaaagtgaattttctggccgggcacggtggctcatgcctgtaagtccagcactttgggaggccgaggcaggcaggtcacttgaggtcaggagttcaagatatacttcaactcacacatacaaaatggcccttgtggaacatatgtgtagagattttagtcttagtagagcttttcaactttttcattcattccccagatatatttagcacagtatccgagatgcttagggaatatgtttgtgagcaaaactgatggctctgcctcatggagagggaatagggaagatagggaagtgggagtgggatagggaagaaaaacaaccaacaggcctggcgcagtggctcaagtctgtaattctggcactttgggaggcgggcggatcacttgaggtcaaaagtttgagaccagcctggctaacacggtgaaaccccatgtctaccaaaaaatgtgaaaattagtcgagcatggtggtgcacacctgtaatcccaactactcgggaggctgaggcagaattacttgaacctgggaggtggaggttgcagtgagcagagatcgtgcc

SEQ ID NO: 917035 - DNA, 4001 bp, Homo sapiens
ttaaaagaaaagaaaataaaatttaaagagctagtttctttcggaagaacaaggagggggccaggcgcagtggctcacgcctgtaatcccagcactttgggaggccgaggtgggcagatcaccaggtcaagaaatcgagaccatcttggccaacatggtgaagccccgtctctactaaaaatacaaaaattagctgggcgtggtggcgcgtgcctatagtcccagctactcaggaggctgaggcaggagaatcacttgaacccgggaagcggaggctgcagttagccgagatcgcaccactgcactaccgcctggcgacagagagagactccgtctcagaaaaaaaaaaggaaggaaaagcctcttggtcccaatttcaaagtcaatcccgcatcccgtttttttttccccaaaaaatctgagtcatatcaaacatctggtactcatgaaatttactactttaaattcatggaattaaaactgagcgcccacaactgaacaaatattttcggaattcaaccagagatgctgaatactaactttatctcctctaccacttacacctgtaaatgtagttttcttcctcgacttgggaaaaaaaaaagcacagtgaacaaatttcagagtgcagctatcacctcaatagaacttgacgaaaaaggaaaatacatgttctttacccccaacaactttgtgacaatttttaaaaatggtttaaaattgtttaaatatctactagtggaaatatcaaactaaatacttacacgtcaaatcattttttttttaaggtgacaggatgtcactgcgttgcccaggctagcgagctcagtggcccaacacaggagtttggaactcctgggctcaaggaatcctccctcctcagtctctcgagtcgctggaactacaggcgcgcaccaccgtgtccggccaaattttaattgattgactgattgattttattttattttatttttttctagagatgggggtctcgctatcttgtccaggctggtctcgaactcctgagaccaagcgatcctcctgccttggcctcccaaagtgctggggataatagacgtgttccaaggcgcctggccccaaatctttgtcttggtaatggaataaaaagcggggtatacagttggcgtgtagggcttaaatcctcagatgacgccaaagtttctaaccaatgatttcaaacggcttcccattaacttctcattaacctagcgaacaagaaagtgacacgctgagattttggatccttttttttccgaggctctccctctggcagagaaagaggcgcacaaacaaggggtgtggcccactggcaaatcagtcagaccatcccgaatcagggacaaacactggaaagcagagaggaaaaagaagtttcgcgtttccgctcctcggactctgctccagaattcagctttacccgtccgaagcagcggcgtcagaacaagctactaaacatcacccgcaccgcctcccgggaggggctgggtcccctctcggctgtgacaccgccgggcagtgggagctgagcggggccagcgcctctcccccgagggaaacccgaggcccagaggggccgagggagcccgtcacgaaaactccagaagttcctaagcagggacctgaaccaaaggtctctgcccacggcgcgggatgtagtgccgccgctccacttgagaaaggggtccccacacgggagtagggcgagggggtcgcctcccgccgccgaaaccagtccctccctgagtcgccaagtcccgagtcccgccctctccccgcagggctcccggagaggacctccgccttctcgcttcgcccctccgcctcgctcaggaggagacctgccacggccctgtctgacctgtcgccgctgggactgagccggcagcgcgaagcctccatgcccgccaccgaggaagcccccaccacgtacacactcttccccgccgtcgctagagtggctaggctggcacgccgccgcgtcccgcctcctggcaaccgcgttccacactgtcgccgccgccgattggtccgtgttctcgtggctcctgtctcattggctattgccggggcccaacgatgcgggagggttgctaaggggcgggaggcgagcgggagttaaacgcgcctgcgcgggggtggggtgacgcgagctaaggcttggtcctctggagcgcctcgcggggccggtactgagcgggaagactttgtttttgcctgggcctcgcccgccgcgcggccagcaggcgagtccggtcagaggagtctcctataccgcaccaaccgccacgcacgcaacggctcctcgcacccccgccatttttaccgagcccacccagagcgcttcccgaggtctgccctgtgaggatgtacagacctctgccgcttcccattctggcccctgccctgataccagcggccttcgtggaccccctctggtaccctctccactccatcagtcactcccagtgaaacgcatcttccataggctggccttgaacttcaactgcacagaacttaagcttcccctactccagcccaagcttttaggtcattcctagacctgctctacagactcccctaaagcacacgagggaatccagagactttaattttttgagacagggtttctctctcgcccagactgcagtgcagtggcccggtctcagctcaccgcaacctccgcctcccaggctcaagcgattctcctgcctcagcctgtggagtagctgggattacaggcaggggccactactgcctggctatttttcgtatttttagtagagatagggtttcaccatgttggccagactggcctcttaactcccgacctcaaatgatccacccgcctcagcctccgaaagtgctgggattacaggcgtgggcccgtcctggagactctttccatctacctttctacctcctgtgggccttcctcaaacatccatagcccaccgtgagagcccctgtctaaatgtgtactcttgtctccaataaatcccgtccccaaatgtcagtccctttctccctaccgacatgcacattatagtccctacaaaacatcctgagtcctgacaagtcactgcacaaatggctttatggcgttctaaggtcaaagttgtttccacattggttttgaacctacaagttagtactttaggaggcacacgctgagagtggaccgttacactgcctgggtcagcgtgcactcactgtgtgacctgtgcatggttcattctctgcatcaaactcccatctgtaaaatatacagtaatccctgcttgatctagttggggctggacctgacacagtaggtccagctgaatgaatgctaaatgaatgggtttaatgagatgctacttgtctgagtaaaaggccgagacattcggttgactggggaagtccttctgcattaattacaataagtaatactcattgaaaactttccttatttacacacagttgaacagttattctaagaaaccattttcccaccctatttaatattgacagatttcttcagttagaaacaaaaactcaaaacacacgcaatcctaaagaactcatctatgtcccccttatctcccctcatcttatgtagtccctaaaacagggcttgctgccctttcttcttcttgccttttcagcagatgagtcaaggttgcagaggtggcagtcaaccatagagtcacagagtttgatttttttccatccatcaggtcgtagaagctgccactgagcctgacaagagttggtactcaaaaatgcagaatgaattagtttgaatgaggtgattaaggattaatgagtagtggttaaggaaacaaagaccattagtggatggggtaatattgctgtattactgatggaagcaggattctctaaaaaaactttctgcagccatttacttacatacattttaaagagttactacaagatattttaaaaatttaaacagttaatacaagaaaaatatgaagtga

SEQ ID NO: 917036 - DNA, 4001 bp, Homo sapiens
aagatttgaacttgcttcatattaattaatagttcaaatcactgacaacacacagtaagtttaaaaatacaacagccactaatccaggaacagaaaatattttaaaatatttaactaaccattttcaatagatattttcagaagtctgtactttccatttctggctctggcaaagatctctttaacatcttcacttgctgtggaaaaagataaagaaagtaaactttttatacttacatataaatactttcctatctatattggaaaagttaattagaatacaaagaaaaaatctggagcatgtagcatccttattatcagtattataaaactttaccgcataaaataacgaagactgtatacaattaagaaatataaatattagcattttaaaagtatgttaataattctaatctgttttagctacataattctgtgcagaaataacactggggtgaatatactgaagttactcaaacccaataatgagcaaattacaattttgaaaaacttttcttgctcttttgaaaaatattgaaaacctgctttcattctctaattcagtttcaagcttatgacagacactccttcatcaattcactttctgtattttcccgttaaaaacaacagtatatatcaaatatcctaacttgtttaaagaaaaagacaataaaatgcattcagtcttaactctggttatatttttctaacttgcatttctcaaaagctagattaaactcattgaataaatatgtatttaataactaacccttgtgttcctattaaagcttcaatttcgttctaatttcgttcctgtgttgtctattagcagcaagaaccactatgtaagtaggtagtgcttgctataaggctcaagcatgagagtcaataactacatatttatatatcgaaattaatgcggataaataaaacaaagttttcagatttgagactattttgcttctgcgtgcgtgcagggggatgtgtgcggtggtgtcaaaaatctttacgaataaaacatacaattaagtgttcatctgggagaaagactcgctattaacagtaagagcttgagtttacactagaactcgttaagtgatcgcgagtaacccggggatatattatttgactcttgatgaggtgagtacctgcaggctgcccaatttcaaaccaggaaataatggaggtcagatataactgcatattgaactgtctgcacgcattacatgcaaccatacagatcagtttcccttggggagtatctaggaaaaagatcaaaacacacgcttacactcgagatttctcagaacataactctcattttcctatttggagagaaaatgcgggagagttttgggaagcacccctactgatgtgagaaagattctggcatggttctttttgtaatcaaagtcctgtaatattctcctttggaccatgaaaaagaaaactcgcctggttctcgacagcgtactgaagccccagtcgcctccactgtcccagctcttccctacgtgaccaaaagggggaaagttgggcgactgtcggggacggtggaaggcacgcccccttcaaccaggccgcctcgaaagccaatttccttcgctcccccgaatttcggatcaatctgcaacgtgacggcagcagggaccgggctggaggaggacgcaggccggcagcgcccgggaagcaggagcgcggagaggcgccgaggcccggctcgccccgcgagaccgacttccggagctcccggcccgactccagccctgccggtcctgcagccctcccggctctcccggctctcccggaagccccttccctgcgagtcgcgccgggcgctgttaccttggatgccggtctggtgggacatggcggcggccgctagctcccggctccggcgctgagtgcagccagcggccccggccggcggccccaggaagtggctgctcctccgccggccccggcgcgtcatccgcccgcgacccgcggccgccccgccccgtgaggttgactgagtgcccgagcgtccccgccgccccgccgcccttcctggccgccgggctgcggtccagcccccggcctcgctatcctagttctctgcttggggtcctgcttctgctcttgccgccgcctctcccgcttcttccgggggggacatgccgcagaatctagactgctcagtgctccgacgtctgctctctgacaaccccgccgacgccgccattcgctgcctcagcaaaggggtgctcaaaaacggaagtgatcattttaccaaataggcattttccagcttaaaaaagatgtgcacattatttttcttggtttactcttcctataatcgataccgtttagtgtagaaaagccttctccttgctccattgttttgaaagaattaatatagactgcctctcatcaaatttttccacgattttaaattaagttaatctcagactgttaacttttcttttcagctggacacatttagagactcagtgtatctttctcttcactccggaaagagacagccactaagagattagctgatttgagtatccctctgtggtcgattataccattgcaaatcctgctctgctttaggttggcagtttattatttaatccagtaattattcaaaattcacttggacagatttgtaaggtagcagcagatattacttaaaaatcttttcctttcctgcttttacaaacatgtagttccttcctgaaaggtaatgttagttttgtggggggtttggtttttttttggtactgcttctctactgctactaggtgggaagctagttcttatttttagggccttgaagtgacacatacacaaaattataatctgctaatgaagaaataatttattcaggtcaataatataagtgcaagttaatcactgttccagtactatacgatgtatttttcatgagtgatgaacaggcctgcaattgtttttctttacaagaatcacagcaaacaaggttatgttctattgcctgttatctgagctctgtttttcagacatattctcatattcaggaataaactaaatctgagttttatgacttgtatggatttaagaaatgtagggaggagtttcattctaatcaaattcttcctgacacaatggttcaccctgatttaccagtttttgactacattgctgagcagagagaaaattgcagagttgacttgcagtattttgactgattcatgtcctagtgcttcggggaaattgcttaaggaagttggcgttgctcaaaagtatagttgagcaaaatataatccttccatattcgtgcttgggaaaggccactgtattctcagtcctgaagaagaggaatgtctagttaggttgggaccaccctgacagccaccagaaagtgcttatttactgccagtacaatagtttgacttaaaagctgcaagcgtcttgggtaccttgctctgctctagccacaaatattttcccacttttcttcatctattgtgtctccatttagtgaacatttgccagagctgtcatgagaataataccttagatttgtatggtagtttacagtttacaaataatatataatagacttattttgagtaccaacatcctgtgtgacgagctgaaaaaaatagcaggttttgttttttaactttaagaggtttggaaattgaaccacagagttgggaagtcagcaggtttcaaggctaagacaagtgtctgtaagaaacaaaccatttgaaaacaatgtatgcagataagagggtttattataaggatattggaggatcttatagatcttgacaacttggttgtcacctctgcttttctcttctttttctccaaataagatctctctgcttgtgcagtcaaaatggctgaatatggctaccctacactttccaaattgacagggttgtagctgcatgcagagattacatagctcttctaagtccaagtttaaagttcctaagagaaagcacgtgaatgaccctgcttgg

SEQ ID NO: 917037 - DNA, 4001 bp, Homo sapiens
gaaagtagaatgatggataccaggggctgggggaaacggcaaatgaaaagttaacgagttggcatggagtttcagatttgcaagatgaaaaagttcaggggatctgcttcacaacaatgtgaatatacttaatactgctgaaaactgtatacttaaaaacggttagggtcagctgggtgcagtggctcatgcctgtaatcccagcactttggggagctgaggtgggcagatcacctgaggtcaggagttcaagaccagcctgaccaacatggtgaaaacctgtctctattaaaaatacaaaattagccaggcgtggtggtgcatgcctgtaatcccagctacttgggaggctgaggcaggagaatcgcttcaacctgggaggtggaggctgaggtgagccaagatggcgccattgcaccccagcctgggcaacgagagcgaaactaaaaaaaaaaaaaaaacaaaattgttaagatggtaaattttttttttttaaccacacacaaaaagaatgtagctaaagaaaaacagtaaataaatggaaggacatagatatcaagaagatcctgaggatggcacatgaaacgtcaatttgggatgcacctgctcaaactccttcattgtactaatggccacaaattagctgcctgacctggaccttgcctgaccttgctcctaccctgttcctttattcttcccttcccctaatccaagtccttaactccagcaggatatacaggcctccctatctctagcatggtctcaccggctgcttcccctaacaagaatgttctcccttcagacacctctaccaaatcctacctcatctatgggagctgccatccccacttggctgtttttaccactccttttagcccttcaccatatgctgccttgtaactaaactgtaagcctttgaaagaggcagatcctacagcatttaataattctagccattgggcaaggcactttttggagcctcactttctcaagcctataaaaaaggtggaggcggccatatgactatgaccagggcttttgagtcagatggcctcaactggtatcccagctcttccacttactagttgtgtgctttgggtaagttttataacctctttgcttctcagtttcttcatctgtataatggggtttatgataaatctctcagtatggctggaaacatgaaccaagattattacccatgtctagtgcttccaaaggcccctctcatgtcagtgcttagtaaccactagccattattggcattatccggacaatggagaagagactgggagctttctcttctggaagaacaagtgaaaggataaagcgggatgatggtgggagaaatgtgcccaaaattcaaggggatggagaaagggggccgggaaggcgtgtcggacaagattctcgatggaggaggatgctgggagtgggccgggggcttctggagaggtgaaggggcacccccggactcggctgtcggtttggtcgcttcccccgtaacctttcattggaaacacggtgcttgtaggaagaggacgccctaacgggccctgagcgaaatcaggcgggtcgctgccgagatctcggttcggtttccgacaggtttccgggcaggtcctcgcggcgggcccgctcctccttccacctcccacctctctcacagccagcgggcggggcagccctcggccggccgccggcctccgtctcccggggtgacctgggggagcgtttctggggtctccagcgtggcgcgcggtcagtcactgactccagtgaggggcttcaaggccagggctccggggcactttatccccaaccccggccggaaggcccgcttcggcccgtcgacctggggaccaggccttcgccctcggtcgtacctgacctacggcggccatcgccgttcttgcctttcgtctgcagctccgttggggcggccgccgccactgccttgccctcggcgcagcccatgtcgcacaaggccctgtgggaactgacggagccgaaggacgcctggcggaggccgcgagccccctgccggccgcgggtcggagaacgcggtgggcggggcgctcggtgacaacagcgaagtcatagcccgtgtatcttcttcaaggtcgtgaattttttttttttaacaggaaagaacggtcgctaaaggtaaattggaaaatgcagaaatggaaaggagaaaagagcgcaccacccaaaatccttatccttcggctgggcgcggtggcttacacctgtgcactttgggaggccgaggtgggaggattgatcgcttgagcccaggagtttgagaccatcctgggcaatgtagagaaaccctgtttctacaaaaaataattttaaaaaatttatccttcacacaaactacttttgctgtgtttactatttctttccagtttttcccctctatgcatagttttgcatccagcatttcacttaatactagtattttccatactatcacatagtcttgtaagcctcccagataaccacctggcttccactgtcacttcagtctttgcctctttgaccgtagatgaagcatacactgaacatcgtagtttctttttaatacactttattttttagagcagtctttttttttttttttttttgagacggagtctcactctgtcacccaggctggagtgcagtggcgcgatctcagcccactgcaacctctgcctcccaagttcaagcgattctcctgcctcagcctcccgagtagctgggactacaggcgtgtgccaccatgcccagctaattttttgtatttttagtagagacggggtttcaccgtgttaggcaggatggtctcgatctcctgaccttgtgatccgcccgcctcggcctcccaaagtgctgggattacaggcgtcagccactgcgcctggccttagagcagtcttaagttcacagcaaaaagaccatcctatttgaacagaaatctgatcacgcccccctcaactctacccccaccctttactttactctattttatttttaccagcactgagagccttctaacttaccctatattctctgtcacctgctcccactccctccgccagcctccccacgacaccctgcccatgtaaacgctgccaaaatagaacctttgcatttttttcttgtatcttggccttcagcttgggccaggtggcctcccccacctcttgaaggaaagcagggaagaagcgggaaaatattaatttgaataattataataatgtaatagtccatccactagagctactggacgattacatagcctattattagatgtttagtttgttttttatttttaaaaattatgaataaggctgcagggaacatctttgtgtttatagttttaaggctgtcattacacgttgccaaaattgcttttttggaactgtggttcccatttgaactcctactagtaatgaatgagagtgattttttttaacaccaaaccacattgcggcacatcaggtgcacagtcactgttctctatcagtgcagtgctctgtttttccttctttcaattaactaacatatggtaagcatccaacttatgcctggctttgtttagggttacaaggtgactcaaattccctggtctcaaggaacttccaccccagctgagatttagtgaacttgtctggtcaccagatgcgtggcaattgtgtgggccctttgttttcatttgggtttgtggacaagcttatatcctgcttctctggagagcagcccagagtcaaaatgctcttggaaaacactgggtgtttatttgcttaaacacagaaaacaaataaaactgaaccaaaggctttttttttttttttttttggagatggagtctcgctctgttgcccagactggagtgcagtggcacgatctcggctcactgcaagctccgcctcccgggttcacgctattcttctgcctcagcctccctagtagctgggactacaggcgtccaccaccacgctaattttttt

SEQ ID NO: 917038 - DNA, 4001 bp, Homo sapiens
tcagagttctagtcagggttaaatcattgcactactccgctaaaattaaacgtcctactttcccggtaaatcccgaattcagaaaagcttcaaaaaagaagcttaatacacgtttatctcaactttcacaaaacacctcccagtttgatcttgctttcaactctgcatctatactgaatgccaaaatccaacttccaacgtttccttgacatttgaaaccgtggagcaaaattaagaacactctgcctacctggtgcattcttaaaaagaatcctgaagcaatacacaacgctacagatgaaactaggcactaatggtaaaatttcacaaaggggtgaactcagtggaacatacagattccacagttacactgacatgaggcctattcattagacataaatcacgccaacattcaaaagtatagctgcttatttgggaggccgaggcgggtggatcatgaggtcaggagttcaagaccagcctggccaagatggtgaaaccctgtctctactaaaaatacaaaaattagtcgggcgcggtggcaggtgcctgtaatcccagctactcaggaggctgaggcaggagaatcgcttgaacccagggggcgaaggttgcagtgagcccagatcgtgccactgcactccagcctgggcgacagaatgagactccgtctcaaaaaacaaacaaacaaaaaaaaccaacaaaaaacaaaaaacaaagtatagctgcttaattgtaataatagtagctaacatgtctatactgcttcacatatatttacatttcaacttcacaaccactctacaagtaagtattaccaggcccaacttacagacagggaaacaggtacagaaaagctaagaaacttgtccaagctcaaggagctactcaaaagcagcggcaggattcaaacccaggcaatgtggtcgacgcgtttaatcactgtcctgtactgcctgagagagtgaggaagccctggggtcgtcgtcgccgccccatttaatagtctgtgtccagctgggcacgccacttgatctttctgagccttgctttccctacttgtaaaaacatggagaccccatgtgttttgccaacgtctcaggatttctgaggattaaatggtgtgaaaattcctagagaagcattcttacatagttatactttcttaatattctcaaggatctgtcagtccactcaacacattgtcatctacatttcaagactcggactctgtaagaaacgatacaatacccattttctccgctgttctgcaaactgtctctacaaagaccaagaggaaggaaaccgccagcctacaggcgccggcctcacctaccacatgacatgctgaagctttgtgtgaccgggtcgaaaccgcacacgccacgaagctgcctgggtttggaaaagcctccccgtctgctcagacacgccttaaaatatcttcccttccccgagacgcacactgctgcacccaggcgcaatgctgtcgtccccgccggcaggccgtcccccgcgtgctcccatccctgggctcgcggctttgtctggtttcacccgacgcagagcttacaagaatttgagaatgatgaagacatcaggccctccttcaggactcgaccacctttcgctctgctgcaaatgccggagtgaagaaaactgaggtgaaagggttgctgtttcctaatggctacgagaagccacgccctgcgccgagcgggcgggctaactgccagagtcagaatgacaaagcagaaatccactcctcgtgcagccctggcaacctatgctaattgcctcgtaagctgagagctcctaattgggtgacaccacatcctctgcctgctcatagccgcccccaacctaagaacagagcaaaaacaatttaaggcaattctggaaccaaatttggaataagtgtgtttttactgaagaaattagactatgccctaaggcagtagctacagaactttgctagctgttgtcatcacgtgagggtctttagaatcctggtgcctggctcccacccctagacattctgatgtcattggtgtggagtgtgacctgggcctctgcgtttaaaaaaaaaaaaaaaactccaaaggtgattgagttggcagcaaagtttgggacccactgccttaaggtcatggattagtcagtttggcagttccctaaaggaagttattaggcttttgaaaagaaatgtctagttcatcctgactaatcctgaaaagaaatgacaaattcttaggaacacacctaacttcccctgagagcacctcttccttattagattctaagtttggtatttattgttttttttaagaaaaactcagagtgtcttttaactccagctgcacccagccacctgcagctactaaggtgagccatgctctctcatgcttccctgctcttactcatgttcttattcagcactgtgcactagcaggctatgaatatttgctgaataaatacataataactgaatgaaggaaggaaggaaggaatgtctttcccacttctttggataatgccagattgaagcactctcagctgagagcgttgcgggctcctaacagccagcagaagccacactccctctaaacaaacaggcaaccactgccaggtcctgccaggcccttccaaggtgaaactcagaggcttgatttagcttcttcaccctctaaatgggcacacacacacactacacacactaacttgacacttcccctgtaaggtgattattgacatgagtgtttgattattgacatgagtgtttcacctgattctggagtccctagaacagagaatggatctagtacgtgggtgttgaggaaacaatgtgatttaaggaggaaagaaggaaaaacatgaaaagactgggtctaagggagaacaaaaaacatttactcctggctcccaagccaagttctgtattaataattttatatgcctttatctcatttagtctaccgaatgacccatgaaccagggtcataaactcctcattcttagaaatatattgaaaatacaccttatttcaaaagcatgacttaggacacagaaggatcatttaacttgaaataatgtactaaaagcaagtaataaggattgatttgaagaggcttgccattaaaagcatcttgtatagacagctcagagtgattataattaatattttctaacggcattccaaaacaggctagataaggcattttaacttcacattgttcctaagtgagcaaattatagcaaagatgcccagagtagcaccatgtagttatttttctttaaattaaaatcaccattttaaaaccatcttcttttctttcaaatccttcttgctgctgttaagagcccagatgccttacccttgtcgtgaattctagaggaaaaactccttagttctatttagttgctggttaatggaagaagaacctcatcttcttccaccatttctcatcatgcagcaatttatttatttatttgtttgtttgtttgtttgtttgacagtctcttgctctgttgctctggctggagtgcagtggcgcatctcagctcactgcaacctccacctccctgcttccagcgattctcatgcctcagcctcccaagtagctgggactacaggcatgcaccaccacacctggctaattttttgtatttttagtagaaatggggtttcaacacgttggccaggatggtcaaactcctagcctcaagggatccgtctgcttcagcctcccaaagtgctgggattacaggtgtgagccactgtgcctggccgtagcaaatcataaacataaaatgttttaatcatacatttcgcatctcttgactgggctcattcttccttttcagaattatcttccctccctaagggcctagtccttcaaagctcatctgaaatgtcacctcctctgggagtcttcctggattttcacccagtgttaattgctccttccctcttctttgtcccccaaatacctaataataat

SEQ ID NO: 917039 - DNA, 4001 bp, Homo sapiens
caagggtgatggtcttgccagtgagtgtcttcacgaagatttgcatcccacctctgagacggagtaccaggtgcaaggtggactctttctggatgttgtagtcagacagggtacgaccatcttccagctgttttccggcaaagatcaacctctgctgatcaggaggaatgccttccttatcttggatctttgccttgacattctcgatggtgtcactgggctccacctcgagggtgatggtcttaccagtcagggtcttcacgaagatctgcatcccacctctgagacggagcaccaggtgcagggtagactctttctggatgttgtagtcagacagggtgcgcccatcttccagctgctttccggcaaagatcaacctctgctggtcaggaggaatgccttccttgtcctggatctttgctttgacgttctcgatggtgtcactgggctcgacctcaagggtgatggtcttgccagtgagtgtcttcacgaagatttgcatcccacctctgagacggagcaccaggtgcagggtggactctttctggatgttgtagtcagacagggtgcgcccatcttccagctgttttccagcaaagatcagcctctgctggtcaggagggatgccttccttatcttggatctttgccttgacattctcgatggtgtcactgggctcaacctcgagggtgatggtcttaccagtcagagtcttcacgaagatctgcattgtctaacaaaaaagccaaaaacggccagaatttagcggacaatttactagtctaacactgaaaattacatattgacccaaatgattacatttcaaaaggtgcctaaaaaacttcacaaaacacactcgccaaccccgagcgcatagttcaaaaccggagcttcagctacttaagaagataggtacataaaaccgaccagagaaactgacgcctcacttatccctcccctcaccagaggtccggcgcctgtcgattcaggagagcctaccctaggcccgaaccctgcgtcctgcgacggagaaaagcctaccgcacacctaccggcaggtggccccaccctgcattataagccaacagaacgggtgacgtcacgacacgacgagggcgcgcgctcccaaaggtacgggtgcactgcccaacggcaccgccataactgccgcccccgcaacagacgacaaaccgagttctccagtcagtgacaaacttcacgtcagggtccccagatggtgccccagcccatctcacccgaataagagctttcccgcattagcgaaggcctcaagaccttgggttcttgccgcccaccatgccccccaccttgtttcaacgacctcacagcccgcctcacaagcgtcttccattcaagactcgggaacagccgccattttgctgcgctccccccaacccccagttcagggcaaccttgctcgcggacccagactacagcccttggcggtctctccacacgcctccgtcccaccgagcggcccggcggccacgaaagccccggccagcccagcagcccgctactcaccaagtgacgatcacagcgatccacaaacaagaactgcgacccaaatcccggctgcgacggaactagctgtgccacacccggcgcgtccttatataatcatcggcgttcaccgccccacggagatccctccgcagaatcgccgagaagggactacttttcctcgcctgttccgctctctggaaagaaaaccagtgccctagagtcacccaagtcccgtcctaaaatgtccttctgctgatactggggttctaaggccgagtcttatgagcagcgggccgctgtcctgagcgtccgggcggaaggatcaggacgctcgctgcgcccttcgtctgacgtggcagcgctcgccgtgaggaggggggcgcccgcgggaggcgccaaaacccggcgcggaggccgctgcaccgggagcgggtgggcggcccgcgttccttagccgcggctccgcggcccctcccctcagcccccgcggtcccctcgggtcgcgaaccccgcgttcggcggacgtggggcacgcagcgagcgccttctgcagagtcggggtctccctcccctccctcctgacccgccctggcccaccctgcgagatggacgggtctttatttttgggtcacatttgaggtaatgacggggcttcctttgctcagcccccttcaacctccctgagcctcccaggccggtcgcggggggctcccggggccgcgggacaaggacaatgactcggcagatctcagggcgggcgtggccctaaagctggggaacgctcgagaactttccaggggagacactgcagaggagctgggtgtccaggttaaatttggaaaaaagaggcggaaaccccacacagttttattttagctggaacgcaaggctgagcgaacgacatccttctagactgttcttccaccttcctgtacattctgagggccaggtatggaaaggtcctacttgatgccaacagggaggcatggaaatttctctggtttcaatgggtacgattattgtaagcaggatccattcaataatcggacccatttaaaccggagattttaaaagacaggaatagaatcccaaccttatttcagtgcagggtagggtgtcaaatatgaaatgtaattctacagggcaattctattttggtaaaagaagtggggagaaaagcatcaccagccagctttttaaatttttaccacaacctattttgtgatccctacgtgtcatttcttcagtatattttttaaatgttttaaaatatacgaacatggtgagattttttaaatgtgtctttttaaagtgtacagtgaaaagtctccctcatgccctcaatttcccagccactgttccttctggactcttctacaaatagtccctgtttctacaaatgtattggaggtagggaggctattttgatttctacccttaaaagcttcaaaaaaaagagaaaaagaggctaccaactgaaaaatattttgccattaggaaaaggctgcattcttgttttaagttatgaacattacattatttaaacggcagacttaaaatatgcatcaaagcaaaatgaacctgctatatattttctatggtaacccatgtttctgtgtatttatgaaaatccaagatctgtgcattgttcaaaacagactttgacatctccaatttttaacattttaaagagaatgaattcatgtgttactgggaaattaaaacgaataataaaagtgtcattttccaggattggcaggataccccagtgatttccaatacacatttctgcaaagtttttgttttttgtttttcccctacatttcgggaaggagttttgaagggattaaaaagctgagattctttctgaggtgaccaggcctggctttcaaccacgccctggttgcttttggctgttactctgctgcaagccttgtgattcatgttgtttaaaggctgagtcaccagctttgtgacatagcttttttcagagtccaaaaggtacagagaaaaaacagccctaactgcagaggcaggggcgggagaggaggacaggaggaggaaaaaggaagaagaggggatgagggtagggtgggtaatgggccaaaggttagctgcaaagagaaaccaatgttgtctctagcagaaaaaaattattgaaaacatcccagcattccctgacttaaatggttattgaagcaaacagaaataaacctttctccaaagtcactgaggtgacagggaagaaaatggcctcccaaaacgcaggtgtctgatgtttctctacaacaatggttctcaacaaggagtgatttgctctttcaggggacatttggcaatatctggagatattcttggttgtcacaactcaggggaggttaggggatgctactactaatactagcactgttggtagacaccagggatgccactgaacattctatgagggacagtcccccacaacaaagaattat

SEQ ID NO: 917040 - DNA, 4001 bp, Homo sapiens
acctttggggaccatgtgactgcattataactaaaaccacgttgtacggacctgccaatacatatgacaattaaaactccttggacagaatcctagataaatccacacacaacaaatttcggactatgaagattcacattattagactccagtgctccctgacaatctgttctacttctctcatttctaagaatttctaccatacaaaaacgtcttatttctctacatcagcacccttaggtcagtgacatctccctcatctcagatatatttaaatgcaattggatgaagcagtatacagtacatcatcctcgaagcctaacaggtcttccacttagtatgcatctccccacagatttcacaagaatgagcaagattaacatacacgttcaccaggttatatcaagcaaaatgatgctgcaattgagtcactttaactggcgcatttagtcacataaatgtgcaactaatttccttcataaaaaccgacacaaaaatttaaggtttagttgttgtgatgacaaggaatatctcacgtctgaagacttgtcgatatttccttaagactttacaaaatcaaagaatcgaaaatgtcatggttccatacatacttgtcaaaacacagtattcataaacagccaattaataattaaaacgcacaaaattgaggggcaaaagatttcacgagatcccccacagaggccaaggtaggaagatctctgaagccaggagttttggaagccgcctgggcactatagcgaggcctcatatctacgaaaaagagaggagaggagagaagaggagagagaaagagaatcccccataactgcggccctcccccagccttgtgttaaaactatttcctcggaacagctctgaaagagtttgccaaccagagtaaaatcacttcgcagagataaacgagcggaaacgtattcagaagagagagatcgcggaagcaagggcagcggggcgcggggcccccacgtcccgggacccaggcagccgcggcaaccaggggcgagcatgtgctgaccgcggcaggacgcgcgggcctcccagagccacttcccggggcgcagggccccgcccggcctgaccctcccggttcattcattctgcacccgcggttgccgcacctccgcggccccgtcggggcggagaagaggggcttggctgccgagggaccttgtcgggccacaatccccaccaggcgcccgagccccgccgcgattcccgcgcgcccgcggcctccggcgggggggtggtctcagaagctatggaggcccgcgcccaagcccagagacccccagccttgccgccccaccctccgccggggcgtgggacagcactccctggcccgccgggcagccgcctggaagccccgggtccccgctgtccggctgccccgccgcggccggaagtctccccggcgccccctcctcagcacccgacttccctcgccgccgcggccaacccctctccgcgccgcctcgggcctcccagagcgggccgcgggccgaaggaggcgagaggccgcgctgcctgcccagctgagccgacgagagcagagcgaagagctggaggccggcctgggcggttaccttgatgatcctgcggggcagcccggccatcttgtcagaacccgagttcggcctctggtctcgtctccggctcctctcgcctcacgcacgagtggaagtcccgggctccacttccgggggacgttgccgcgcccgtcgccgcagccgccgccgaggcccctcgggaaatgtagtccctgctcgggcgcgggctcgggcacgggcgggcttccctccgacctggccccctcccccgtgcgccccgccccaaccgctgccggggatggcggaagtgacgctctgttgcggggcagggacttgggacaggccgcgaggggaggcgcggggctctggcgctcgtggccgagcctgcccgcgacggtggtacggcacgacccgcgcgcgactgcgcgcgcgtctctcttaaccgtggccacgcccgcgccggtggacgacgtaacagaggcctggcctacgacgtatcccattcattcattcacgcgttcgttctttcagctcacgcgttcgttctttcagctcagcctgcattgcgcgcgttccctgctggctctgcagtgaacgactgaggtggggctcatcgtcttgctccttcctcaaagggagggcaagaccgaaactcggtggcaaagctctgactgggggtctctccagttactcacacgctgttgggggagttttgatgtttaaattgtataaatcggacctctgacacgcccctaggcccagggtaggctgaaggaaaagggtttggagcgagttggaggcgggaagaatggttctgaacgcctagacctaaaggttgagactcagaattgttaacaggacgaatgaccaaggagaggtttaaagaacccagagtaatccgtaaagcagagattacctatagagtgcgaggtcctatgagagaattagagtgggggtgcccgaaaattgaattgttggggaagcgttttatcctgatgacggatggtttgctgtgtgatggactgtttgcaagcactttacttcatcttcacagcaatcgtgaggaggtgttgtttccattttacaaatgaggcttagatagttaaccttttccaaggagctgttttgtccccaggcagatccgccaagacctggcccttaactacttaaccacagtgtttcctagcacactaacagacagtagatggtgaataaatgaagacaagactgaccgtgccttccaggaacttagattccaatggagaagagagaccagtaaacaattagttacaatccaatgtgttaagggctgtctgtaatacaggttcctccaaggtgctattttagcagagaggcattaactgcttgagaactcagggaagccttcttaaataagtgaagtcctcaatgatgagtaagaacctacctgaccttgtagggaagagtatgccaagcataggaaatggcctgtgaaatggcattgagctatgagagagaaaaaatagtgcactaaagaaactggaactctgaatacaagaaacctactaagaacaataagaaatattttgtgctggcacgatgctaaatggttaataaatttaatacatcattcaattatgaaacagatgaagtagtctctattattaacagaacgttttagatgagaagccaaggttcagaggtaataatgagaatttcaaataaccagaagtctgcaataggtggttctgtgactagaagaatctgcaaaagtaaatgaaactggacaaagatacttttcagaatattttatagaggacccaggataattcatgctggtaggcagaaaggcagagtgctattgtgttgggagtgtgtaggtctgcagtctgggcagggcttggcaggaaggcacactctgcttgtgctgcatcagcctgtgcaaccagaagattggcttccatgatggttcacaaggcgggcaagttggtgctggctgttagtttcactccaagtgggcctctccctggggcatcttgggcttccccattgcatggtggctgggctccaagagtaagtgttctagcaagctgaaatggacactaaatcgccttttttgacccagccgtggaaatcacatggcctcgtggaagtcaaatggcatcacaataaccataatccatcagtcaatcagccacaaaactcaccctgtctcaaggggcagggaacatggacaccacctcttgaaaggggagctgcaagactctaggaactagcagcatatatgtgatggaaagtatggttgtggccaattttgggaaagaaactgccacatgtacaatatttgtcagagtatgcttaccagccacccgccttggaatcatctagggcactgttttttgttttgttttgttttgttttaaaaaaagcattcctgcagctggagcccttccc

SEQ ID NO: 917041 - DNA, 4001 bp, Homo sapiens
aaaacacacaatcaagtgtttattaagtacttattttgctaaatgccatggagaaccaaagaaaaggctgtgcgcagcagaaaaagtcttgcatcagagaaagcgggccttggttctttttagtactccttctatccgacatttggccaagttacttatcctctctaggcctcagtttccttatgtgtaaatcgagggtaataatagtgtctatgtcctagggttgctgaaaggattaaatgcaacatttatccttcttgtacctcaatttagtcatcacaacattgtgattaggattaaatgggaaaatattaatataggatatctaaaagcatgtagcatgtaagtgagctttattgtattgtccttaagaagcttgcaatctagttagggaaacaagaatcatataggtagaaagattagaaaataagaggttggtgataaccaagatcatttaaaaaagtaaatgagtgcccattatgtgtcaagtcctttataagtgatctcatctaataaggagaggagtcctatgagaagatcattcatgatctcatctactccagtctagaccattagtatgtggcagagtcaaggctgtaataactaagaggcaggattcagactcttgtcttacctctatatttccaaagctgaagcatcataaataccaactgctgactaagccaagaggattgtccctgtgcagtaggaaaagctgggccaccaggtttaatgaccaccaccacttgttctgggcagacggtgtatcagacactgcacagattatttaaccaacttgtcttttcaacagctctatcagttctcgataatctttgtttttttgagacggagtctcactttgttgcccaggctggagtgcagcggcgcgaactctgctcactgcaacctccgcctcccaggttcaagtgattctcctgcttcagcctcccaagtcgctgggattaaaggcgcccgccaccacgcccggctaatttttgtatttttagtagagatgcggtttcaccatgttggccacgctggtcttgaacttctgacctcaggtgatccgcccgcctcggcctcccaaagtgctaggattacaggcgtgagccaccgtggccagcctcaataatctaatttttatttaaagaataggaaacacgacttaaagagactattcatattaacagctactatttattgaaagctacagcctatctaaggtggatgcttttgaatctgaatccatgtatatccaaaacagttatttatcactaagtaaaacaaacaagatccagggctcccccgttcacagaatggccaagcaaagagaagttgagagtgcaagattgcctgtgggggctaagctggagttaaattacgatcaagtttttctttattcagaactaggtgtcaggcacggtactaaaacgtattcacaccctctgtgaaacctgctaattactccatttacacagaaggaaactgaggctcagagaggtgagggaactcacccaaggtcacacagcgagcgaacagtattcgaactccagtttaggtgagtcctggggcccagagtctttcctcggcatcaacaaccacaggaacaaatcacccagcattagtccgtttataaaggcctaccgtccccaaagtgaaaagaggtggaaagggccgcggaaagagcccctggagcacacacgccagatcccagcacttgttcctccgacctggccaggcagggactgtgccctagagccaactccctcaaagtccccagccccaccactcggaggactgacgacccagttctcccgcaggccggaccgcaggccctaccggcctacccgcaggccgacctttattcgccggaggtccccgcacttggggtcggggccgcagctgccactgtctcagcccaaaacacccgagttctgccagacccggggcagcagccgacgcactaccgccatcttgccccgcggtgttcgctttcagaaccccgccaggaagcaagcatccagttccggaaaatgacagttccgcagagcttcttcgcccgggaaggaaaacttccccacaccttgcctcccctctggcagctgaaatagcggaggtgggataaatgccctccccagccgagaaaagctggaacccactccggccggggaggctggaaagaaaactggcccctaggcgcacaacggacggcttaagacgttgccctctgcggggcggaagtggggtgcggacagcggaagttatcgctccggccccgcctccgcccccggctggcgtgagctgggtgtttcctgcctctctcagtccgggtttggagactcctgcgtcctccgacttttcatggtagggagggcggtgcccatggactaggggttgagggcggccgagggagctgggcagcagcagagtataagaagggaccgagaggagggggtgtgatgaggggcagtcacgatagtggagaggcatttgggggattggttaggggaaaggcccggggtgggggaagggctttgggtggagaattaggggcgggggtggtggtagggaggctccctggcggttaggaatccgggaagcacatttgggcttgcggagtagatacgtgtgtgcgtgaggaaggggtgtctccaagtgagtcctgagtgctggttggagatgggagttggtgattgcgaggagaacaaagagatatcaattgaaaacggacatttgggggtggaaaatgaggatttggaggattatgaaggagaatgaatgggcaggttatgagaaggtgaggtaggattccttggggcggagcgtttggcgttttggaggttgtggctggagtcgctgagtttccaggaagtggggaaggggctcccaggtgcgtctgaacacacggcccagtgagggaaagaaatcgagagagcccagcaggctgatgtgcgttcagtgcttggaatcctggggagagatgccaggggcctgaggttaggatacctgcgccacggagttcagtgcctcagctggcgcctgggtacctatctgtaacttccattgaggccagaggtgaccacgcctaaggagcggaggatgtttcaagatctgtctctcagctgtggggtttgtctgcttgggatcctcaagggtctgttccctgagtagctcattgtccctgggtagagatgaccaaagattggcccagatcttctttctacttgcttgcttgtttgtcacgtccctggaaagtgcagtcttaagggaaaatcagtcccagtgacgctgctgaagaaaagtcagttatcctgtagctgacgttgactagtccgctccattttgtgcaaaataaggaccagcggatgggaagaaggcagcataaaccagtggttctcaaactctggtcccaccagcagcaacacctggtaacttattcaaaatggctgaaatttcaagccctgtcagagactactgaatcagacattcttggggtggagcccatctatcggttttaacaagccctgcaagggattagactaatgatttcttgatttggactgtgtaatgaaaggggcaaaggagttgggagtcagagggctcttataggtgtgattcctagttttctccccaaaaaagtggggttgatgataaacatctttctcactagaacattgagagaaatagaccaagagtttgtgtattaaacacagggagagaatgtcatttgatggaagttgcaattggcggtagctgtcttataagcaaattttggatgtaaaatgctgcaattatgtgacttagtttagttgaaatgtaacagcagacttttctgagttgtagaaatgccctcagtttgggaaggttttatacaagcctcaatacagtgtttcttaaacttctttgctgtaggaatcccctgaggtgatgctttgcctcacatccctggcaactcttagataaagctggttaaataccttagctaggtggcagtaagccct

SEQ ID NO: 917042 - DNA, 4001 bp, Homo sapiens
gtatgcatgctcttaatttttaagagcccctctcaaatggagttctataaaagaattaaactctaatgcactatctgttgattgaattaacttttcttccaagcatctagagtggtactagctatgcagcatcatccttggacgagtgagaaagtaggcattcaaatcattttctgcagatctgtattttcttgtggagctgggtatgagaaaggcgggaggacataaattaaaaatagataaaaccttccaaaataagatagttcaagattgggccatatatataattttaaaagaaacttttcaatgagtgataacattaagaaatacatattcatgcagggcgtgggggctcacacctgtaatcccagcactctgggaggccgaggaccgcggatcacctgaggttgggagttcaagaccagcctggcctggtgaaacccagtctctactaaaaaaatactacatatatacacatatatatgtgtagtgtatacacatatatatgtagtacacatatatatgtatgtgtatatatgtgtatatatgtatatgtatatatgtacatatgtatatatatgtacacacacacacacacgctgctatactttgctacttttaagaaaagtgctatatcttattcagtattataagtgaggaaaatatttgctgaatcacagaagtagaattctgttcccaatatataacctgtggtataagacaatctggggaatcaagaattatgtttactatacaagtctataatcatacccgtgtcttcccaaaattagttaaaattaacttacaaatcgaacagaaagggatcctaaccaagggctttgagttcgctggtaacaacttggaacaagagcctacatttagcctgtgtcttgagacaaacacggagaagccaagagcagtaacaaactgccagccttactgagtcatgtttctgactaaaaccgcgttatgaaatggagagaatgacatgtcttgggtttaatcaccacagatgttaactccctgaattttagagttgcagaggaaaaagagcaaaaaccaaaaaaaaaaaatgttcagtaataatgatgtgggtctcataggactccagaaagaacctgccaaagctgcgaactctgcttatttacctaaaacaaatcctaactgtgcaaacaggcacaccctctgatgccacagagcgggaacgccaaggtgggaggaattcagaacaatcacaaggttaacgttccactgagaacacagcctccactgagcgtccacactgcgccagaagccctcggttaacggaaccgctctgctccaaggggaaggagcaccgaactcgagttagagcccagcacattaaccaggcacttgggtgacgccaggccacctccagcctccgctcagtaccgcacagagccgagccgggacgcccccagacgccgcgccgggagcgatcccagcccgccgcgctccgcactccgggctcctccgcgcgcccaccctgggagaagacgcgtcaggggccgattcgtgaggccagcccccggcgccgccggcgacaagagatccggggccgcgacctctgccccggccagagcggggaagtccgaaggtcgcctcccgcacagccgccaggcgccgccgcccccgaagccgcaggctgactccagtgcgggctggggtggaggccgactggcgccgacaccgaggcgctcactgacctggagaggtgcttcaagatttgtttcttgatgatcccggccatggtaccgaggctggagacgccgcggtctcgtcctgttgctcactgcctcctctcttcgtggccgtctcctctctgtcccggctagcccggccggcggagaggcgctgatcgctcacgaccgggagagacccaaggccccggccaaggccacagccgccgccgagaacccggagcatcacgctcaggccgccacggccgccgcgggcgccatcttggctgcagcatcacctaagagactcggtggagggcgggggcggggcggctccaggcggggccggcacgaggcggggcggggccaacgccggctctgggcgggctctgggcgggctctggctgggctctggctgggctctgggcgggggcgggaggtttgtggcattggcgccagggttcttagccctcgcgacacagggcccttgactctcaatacaccatccttcttggccttaatcctccctccttccctctgctggtgttcccgcctccatcgctgacccgtcgctgatttttacttccacgtcctacttcccttattcatttcctcagaatgttttttatttttttgcttgtttgtttttttttttgagacaagtcttgctctgtcacacaggctggagtccagtggtacgatctcggctcattgcaacctccacctccagggttcaagcgattctcctgcttcagcctcctgagtagctgggattacaggtgcgcaccaccacggccggctaatttttgtattattagagacgaggtttcaccatattggccagtaggtctcgaacttctcacctcgtgatccaccctcctagcctcccaaagtgctgacattacaggcgtgagccactgcacccggcctccttagaatgttttaagaatcggccattaactcctgtgcttgctttgctctcttgacctactcacctttcttcatattcttccttaggtttttgtttttggtgttttttttttttcttttgttaaggtgtcctgcctttcccttacctaaatgtggcaatttaatgtttcctttggttattgctattctaagggaagtaaaggttgacaatggttcctagtagtctaggacctaggaattagaaggtgtataattcaagtcctggctctggtattttctagctgtgttatcctggggaaaataatttctttactattagtttcattttaatcatctgtgaaatagattaatcatcagccttacccacttcactaggttgaacctaaaggtgtaaatatcatatgaaaagttctgtaaggaaggaaggaaattgttgaactagggaaaactgttacaattctacacctccaccccacccaatcccaaacagagctaacattttcagagattaaaatgacgacttctgtcatcccagcactttgggaggccgaggcaggcagatcacttgaggtcaggagttcaagaccagcctgaccaacatggtgaaactctgtgtctacaaaaaaaaaatacaaaaattagctgggcatagtggcgggcgcctgtaatcccagctactcaggaggctgaggcaggagaattgcttgaacccgggaggcaaatgttgcagtgagctgagatcaagccactgcactccagcctgggcgacagagcaagactgtctcaaaaaaaaaaaaaattactcagtgttaagtcaagtttagcctaacactgcctccttacgtaattgagttcagcctaaaggtttttctgtacatcatgaacttatgaaaataagcagaggtataaaccgaccatagcccacacctgtgccaatcactgagttttggccagatgtagccaactgttcagactgtgttcaaataaggcaaacactgagctgtaagcaatccagttgtttctgtacctcacttccattttctagacctcactttccttttgctggccagaaatctgctcccagcatgtggctgtgctggagtctctctgaatctgctgtgattatgggggctgccagactcaggaatcgttcattgttaaactcctttaaatttaatttggctgaagtttttcttttaacactagtgatatctaaaacaggaaaagaaattgtaccacccctgagggatgtattagcaagatgtgtggttgtacatcttgggagttgggtgggaagtagtttacacatagtccaataagctggccctttttgaagaatggaaaggatagacgtgtaagttgactacactc

SEQ ID NO: 917043 - DNA, 4001 bp, Homo sapiens
agagggcgggaaaagcagcaggagggatggcccagctccaggacacagtgtgcctgggtttccaggtactcgctggacctgggccccccccacccggcaccttgtgacaagcctcggtccccaaggccacagcaaagctctgagaggcggacggaggaggccaccaaaacacggcctgccagcccttccctcagccaggggctgggccctgggctcagtaaacaggtcacagagccattagtcagcactttggcggggcggatctcccgcctcaggttcctggtccccaggacggcaccctggctcccacagccccagccctgcctgccctgggccccgggacacggaggcagcacgaaagccagctggtcccaccgcttgcttcttggggccagccgggcccgaggtcatctccttggccagccagcggcagccgcctgtgccccggcccggccctgactgccagcgagcaggagtctccggcggcccctcccccgccccgtctgacgcagagcgaggccggccaatgccggccgcaggagcaatgtcaacaaacacacggcctagacaggtgggccaggccggcagtgctgccagggccagccggggacgccggactcaggcagggcccctaggactgacgcccggcggggaggggatgcctgttcaggagaactcagccctgccctggggcgccctgcggcccagacaccccctccccggtctcacagctggggaagtcacagcaagagccagcaccagcccaggcctggacccagggtggagtctccaggggcccagtagaccccagcctggacaggctcaacaccagtgctcaccaggggatccagcacctggggccacagtcccccagcccggtccccagcagaccgcagcccagaggccttacctggaagtcgtacagggccacgatgttttcatgtttcagttcctaggacagaaacccaagtttgttatcagtgtggggaggggggcttgcccacgcccacgcccacgccccctcccccagcactggctcaccttcaggattttgatttccttccccagcagcgtctgagacttggcgaggttcttcttgttaatgcacttgacggcgacctccaaatcgtgcttctgaaagccaaacgtgcaccttcaaggccagggctgcccctcgcaggcctcccccagaccccagtccacacaggtggggccctgagatgatcccggttgggaatcccgggactggaaggccgagtggggagccaggttgaggatcgcgctgggggtcctggggtagggatccagcctcgaaagccggctgtgggaccaggttgcggggtgtcccggggtgagggtttggacaggaaagtcgggctgggggtctcggagtgaggatctgggctggaaagcccggcagcggatctcggggcgggagtctgaactggaaagtcgggctgggggtcgcggggtggggatcctggggtgggggtcggcctggaaagtcgagtggggctctcgggaggcgtgggggggtcccgggacaggcggggaatctcggggcggggatgcaggggcaggggatcctgggcgggggatcccgggccggacgggggcctcacctcgcggtggcggcccttgaagaccaccgcgaaggcgccgtggccgatcaggtccttgcgggagaactcgaacttgcccacggtctctgtgccgccgcggccgggctccatggcgcaggcgggccgggggcgcggggcggggggtggcgggccaaggcgcgggggactcaggcggaggcgcgggccggggcgggcgggccgggggcgcggggccgggggcgcggggccgggcgagggcgcatctccggggccgcgcgccccatcgggcaggccggggccgggtcccagccccgcgggccaggcggggtccgagggtcgcgctccctccggcgcctgtgccacggcactcttcccgggctgctaatccgaatccggatccgactccgactccgactccggctccaactagggcccgggctcggccccaacggagaaacaaaagagccgcggcgcccgggcctcagagcctgagacgcccgcgcagccgcactgcgcgccgggccgggaggcgggatgagggcggggcctgcgggacggagcggcagagccgggcgtgacgaacagacggggggcggggaatggggcggggcctgtcgggggggtgggcggctgggccgggccattgcggggccgggtgggctgggagtgggtggggccaacagcggacccgccccggtgagagcagagaggcgcgctgacccgggagcgggccacggggctcagtgttgattccttgccccactcccttccacgccccttccccgccccttccccgccccgcttcttctctgctcccctccctcctttcccctctctccgtcctcctccctccttttccccttcccatcacctctctccctccctgccccctcccttccgccccctcccatgccttcccccccgctcccctcccgcccccactgcctgttctcctccctcctgtcccccctccctgttcccctccctccccttccctgttcccctccttcccgctccctgttccccttctacaggagaatggagaacaggcgtgggaaatgttcccaaaacgggggactgcgcagaattaattcttagaaatagaatggctgagttagaggttaggcatttaaagttgagttccataatgccaaattgcaaaaaaaaaaaaaaaaattgtagaccaaaaagttgtcacccaaaccaacgacatagcccataaatccgctggggaggaaaggttagctagatgggctgcgcatcggtcctgtggaacactgcacagaggtaaatatacctgtgctcaagggtgagttctccaaagattataattaagtaaaagcaaaatatggaacagggcactgtactgtctgtcgttttaagaaagcggtaggattgggatgtgtgtgtgtgtgaaacgcctgtaatgtgtacatggtcgttcctaactataatgacagctaactcatcacttaggccaagcagcgcactttccagcgattagtgcatccattcaatgattccacgaggcacttgctgttatgtccctgttttacagatgaggaaatcaaggcggagaaaagttggagaatgtgtccaaagtcacaccgccggcagccaaaagagcccgggggctcactcacagaagacacagccaacagcgattgctctgggagagaggaccggggaaaagttagtgctgttcaccgtacacgttgcgcgctagttggaatggctttcaccacgtgcaagcactgcttttgcaaatgcatgattctaaacaatgctcaccaacccagccttcagtacagtcctaaagtaacagcccagaaacacacacttcagccaggaccctccatgctgcctcccagagcagcccagcagctggacagcctgatgccctgggctggatcagcaagtcctggatgccttttacctgcacccagctcatcctccaggccgcaggacacacagactcccgaccctggactgggggccagaagccaccgagctggaagggacaagaggtctcctggcccaccatgtttgttttcccaataaagaggttccacagtgccccgtagtcagccatagcattcactcacatcctggagtgcctgctgcacaccggcctgcccagagagcacacgctgcgaggtaagtgctgcagttgacacagtgagaacaagacccgcctgcaggagctcccagcgcttaggggtgggggacaagaagagcaaagattgcaccacccgtggcaaaattgcaagagaaaaatgagtgaacaggtggctacgtgctgaggtgatcagggcagaccgtgagggccgagattgctagagatggcgaagcctgtactcctggaaagtactcagggaaccccagcccagcccaccctgg

SEQ ID NO: 917044 - DNA, 4001 bp, Homo sapiens
atgattccggatagcatcttctccacagctcattttgatacttgatcttttattgcctgagttagttgttttcgtgttttacaagttgtctctttattaagacgacaaacttgacaactactgattattctgtaactgctaaaaaggctaacattggctttggactcttagagggtactcaaataatctgctggatagaatgaacgagacgttaagaagagtaacaaagaggttgccagactctaagaagctgcagaggtgggtttggacaatgagcaacaatcccaagcccccagataggatctgagtgcccactgagaatcctgcttagggccaggcacagaataccctaactcacttggatggcaggagagggcatgaggttaccaagaccaggtgctgagcatctgtactttcagagccccaaatgaaaactggttcagaagaaaagaagctttttcacactgtttcaataaaactaacaagaatgtctaaagatacgttcaggtctggtaaggacagtctcaacccaaacagtattgggaaacgggggcatccaaatatctagaatcaaattaaaactcttttaggaaatgggaattccctttcgcacagggtggaccaaggcctactccccccaaatttccatccccaaattactagagctgcaatcggcaacctgaggtgcacctgaacagccctgggctgcctgctatagcagctcagcagacaccatggcagccttcgatccatccagggaatgttgctgctgccacagggttaggagactgcacgccaggagtgatgggcaggccaagataggcctaactaggtgagtgcacactcctgcagggaaaacagcagcaagagaaaagacgtcaagtcagggactggcttggcagagaacagaaaaagggagatcacccagggcagggactgggcaacatttttcttcccacccatcctcctatcaacgaaaaagcttaggatggttgccttttgtgcaggaaacgcatttctgaaactctgaaatcattcttaattcacgagaatgtcaaaagcaggattcacatgtcggagtctgtacacaaactgaaactttatttttgttttaatgtggcacagttttaaatgagcaggaaatgccacggctatgtgttttgaggaagaacccatctgcacactaaggggcaacgctcccgacccaaagagggagggaggccgggcaggctgcaatgggggagggctgccatggggccagggcggaggaagcaggtaaggcttctggcctgccagagggctgggggagcctggctgagcgggaacttcactgatggccgggggttccaggctgagggcccaggggcccatttattaggggacctcggcccccggccggctcaggaggatccagttcagctgaacggggccctctacccaaacaggtccggcagagctggggagccgaccggccgaagggcatcctagcgtggccggactcacaggaatgcggtccagcccaggagagtccttccccaccagagctacgtgagcgtggcgggagcaaagcccggccggcggggcagcgggaagcgcggcccggccggccgagggggtctggcggggacccccgcgctggtcaagtggccgggtccgctgaaggctccgggagccggggcacggcgcgaggggagggcgcggcccgcgcggcactcactctcggtgacccggctgaggcgcaggacgtgctcgggccggatggtgtccagcgccagcagctcctgctccgtgaccgctgccccgacgccgtcgtcggccgcgtggtggggcgcctgccgccgcgccttcaggcggttcaggacgccgccgcccgccttcttcttctcctccttgccagccaccagccccccgggcccagccgccgacgccgcggccgcagccttcgggttagacccgctcatcgctccgccgccaagatggccgccgcctccacagcgcggtaactatggagagcgggggcggggcccggggcccggcggggaaggggcggggagggggcggggcgggggcgggggcgggcgcccggggggctgtggaattccctttcgcacagggtggaccaaggcccactctccccaaacttccatccccaaataactagagctgccatcagcaacctgaggtgcacatgagcagccctgggctgactcctatagcaattcagcggacgacaccatggcagccttcgatccattcagggaatgctgctgctgccacagggttaggagaccgcaggccaggagtgatgggcaggccaagataggcctaactgggtgactgcacactcctgcggggcccggggggcggtgcttcggctactgccccaactttggtcctgccaggtggagggcctaggggtggctggagcttcagcaaccccactccccatcagacccccaagatcctccacgatgtttaaatacatatcttacggtcaaatgaatttacgtcatataaactttcctcctcctcatcctcctcctggtctgaaagagcacacagaatcttccgtgcaccatctcggcattctcaatccaagagttctgtcaccagtcccaacagcacaatggcaactaattcccagtaatcacaccaagaagaagaatggccagtgtttactgcgcacttgctatatggcaggacacttgctatagggcaggctcctcacctcacaacaaccctgtgaggtattactgtctccattttacagatcaggaagctcaagttcagagaagtcaggtaacatgtccaaagtccctcaagcagtaagaggagggaacagggattttaatccaggtccatctgacccaaggcctgttcttcaacactaagctattagtggacaatgcatcttgagaaaatgtttattaatatatttagcatagaaggtaagttaaagcagtgtttgttttgcaaaggcagtttcaagacaaactttccaatgagattgccatccgtaagccctactgtgccaggccctgggctagacattgggctaggctacaggagatgtaagagtgagggcagggattgggtctgcctcacccctgaattcccagcagttcagctaatgcctgacacgtggtaggtgctcagtaatgattgaatgagagcctgaacagtatcccactatggaagagctcccacttttgttagagaagactgtaaagtacacaattcattatgtgacccttccttttcacaaggtaggttagtatgaactggaagacaaactagattcactgactgcactaagagatgcagcaaaggtgctaggagaacacacaggagtggtttattctgacctggctgtaaaagcttgagggcttcggaagttttcagaggcaatatctgcactgagctttggaagttagccatgacctcaccaattagccagaagtgggtcaacagggggatgtggtctaccgtcttccaccctgaggggctccttctctagggattctagatctgcactgttctgtgttggaggcctgggcctgattgatgcagtgtgtctgctaggtctgacatcacctctcagccaggctagagtaaaattgcaaccgtcccccagagcctcttgacgttcttgccaggccttgcttgctgagtccctctcaccaaagccaccaagacaggcatctcttggttcctggacaaagtccaaacctgaccccaccccagctgcccaattgggtggcatagtgtgtggccaaattcctacccaaatgctgtactgtctttgagagattagtatatggtggcatttaactaactgttcagggagattttaataaatgtgtacaaagaattaaagtctttccttttacaaacaactctttttaaaccactcaacagagtggttactgaagaatttccagaacttttaatatgctacttgattgtgaatggccaagagggtggtttagcatgtggtcatt

SEQ ID NO: 917045 - DNA, 4001 bp, Homo sapiens
agggttgctctgctttcatagttcaacagtgagaagccacggttttttttttgttttgagacagggtctggctctgtcgcccacgctggagtgaagtggtgtgatctcagctcactgcaacctccgcctcctgggctcatgcgattctcccacctcagcctcccaagtagctggaattacaggcgtgcgccaccatgcccggctaatttttgtattttaggagagaccaggtttcattggtcttgaactcctgacctcaaatgatcctcccactttggcctccgaaagtgctgggattacaggcatgagccaccgtgcccagccccacgaacttctgaacacaagatggatgagagccgccaaccagcaactgttatataagacaaactaaagcaaagggatctgataacagaaccacaaaactgttcaggccagaagtcaagagcttgaaagtgctaactataaggcagtgtggtcaggtcaaggtggggttgactataacaagctgcaaaagatttaactgctttgtgtgtcagtttgaacttcaccaccaccataacatctgacaccgcgggaggttagtttcaggatttaaaaaaaatacaagaaataagagcacaggatgtacatagttttcctttttgccacataaataccacgtggtaaacattaaaaagagtaaatacaggctgaaatacagtcagccaaacctcgggatttcagtgttttatttactactgaatgatggactgtggcttaactccagtgtccctaatttaaaaatactatttgactccttctccccaataaaaattatcaacaagttgtacttacatcttttatgtcacacatctgggtccaggtgaagacttggtgtgggggtggataaacagtgtaatgctttctttcttctgcaacaaatcccattagctgatttaaagataaactagacttaaaatcagattctcattggaaaccataagaattcaataagaaagcttctagtgcaagttatttggaacatcattagttctttgtcatgttatgtccaaattcttttaaaaaacaacaaacaaaaacagtgcctgcccccccacctaagtggttcaatcaggtcaattccttgcctctttctctgggctgggtcctgacagtgccactcctctcggctttttaaagctcaagccaggtttcattcaggatggttggtgattttactacgccagcctttcctggacaatagactatgtgacttaaatgaatccatgatatcatctcgcgggtcgttaacaactttaaccaatataaagctgcagagtgaaacatcatggctttcttttaccccctttgtgagtaaaggaggttgaagggggtacaacctaagcctacggaaacatgaacttggccggctacactaacaagacaaaagggccggcagcctccacatttacccttatggaaggtgcatttccatatttaccttgataaaatacggtttcccgaactccccgctgaggtgcttcttccagctctctccaaagcccacgggcacgttgcgggccgcgagtctgagcagggccgcggccttgttcctctggatccggtccaactgctcggcactcagcggcgaggagggcggcgtcccaggctcctcctgcccagccggggccttcttggctgggatggcctgcaagtggtccccgcagaggcggctcaagagctgcagcggccccttcccaggcgtccgcagcttccggcccaacccccacggcccaaggcagaagacgcccatttgtggaacaggtcccagcaaaagcggacagtaagagcccagggctgggcccggtccgggaattgggaattaggttctaaactggagcggggagacgggctgggaggcgccctatggcttcccgaggagcgtcgcggtgactgggaaccctgcacagaggtgccccgcccccgccagacccgccccaccgcgtccccacgtggtcttttcgcggcaaaaaacctccctctgggtcccgccccctctcccctctgattggacagcgcaccgagccaggagggcctgcggcgcgcggattggcgccatgggccccgagacgcgttcccattggctggccctttagcatggcggcccatgggggacagcggcggctattttgaacacgtggaggctatttggaaagcggagcccgggtttaccgagtcagaggcgcgatcctgcacgccctccgtcaggcggggcccaccgccttcctcccccttcaccccctagccccggcccaagccgcgcctcaccgccgcatctccgctttcctcaggcaccccagccacgccggtcccctggacggccggctcggggctgggggcgtgtcgcttcctggcggggctgggggagaaaaaggagtagagcgtcttctggccgatcatcctggagctgaggaggcagcgaacgcgcgccacccgggaaccggcgaggctagccctggctgtggctgtggcggtcagcaattggcgccaagcggcccgcgcatgctccgagcggggggctttgctgggggcggggggcggtggaaggcccagtgcgcatgtgcgggaggggctggagtgcaacgcccctgggaggaggtggggcgtgcaacggtgcccgggggcctattctttcattcgctttgtgccttcagcccacctctgctctttggacaggctcttaaggctcagctgcaagaagagaagactggtcaggcgcggtggcccacgcctgtaatcctagcgctttgggaggcccaggctggaggatcgcttgaggccagagggtctgagctgtagtgagctttgatcgcgccaatgcactccaggcctgggcgacagagcgagaccctgtctctcggtggggtcggggggagggggctgggaagaaaagttcctgccccttaggggtgttgtgggagtgcaatgaacaatataataatattgtccgggcttgatggctcacgtctgtaatccccgcactgtaatccgaggcatctcaaaaacaaacaaacaaacaaatactattatattttgtgtgtgtattttgtttttgagacagagtcttgctctgtcgcccaggctggaatgcagtggtgtgatctcagcccactgcaacctccgcctcccggattcaagcgattctcgtgcctcagctaggattataggcgcgcgccaccacgcctggctaatttttctatttttagtagaaatggggtttcaccatgtttgcccaagtgtgttttgtatttttttagtagagatgggggatctcaccatgttggccagtctggtctcgaactcctgacctcaggcgatctgcccaccttggcctcccaaagtgctgggattacaggcatgagccaccacacccagccaatattatttgttgaactgttatatacattttctcacgcaattttcatggcctattttatgacgataaactaaggcttagtgcagtcaaacattttgcctaatgtatcaggcttgtgggagactttcgggtcatagaggttaaacaccaacgatttgtcttccaaatgacaccactgtaccgaacctcctcccaccactactaatacacttaggattctctttccctccctcacatccaaaccatccatatctgcttttggttctttctccaaagcaaacctcaaattcaactgctgctcttgcatctcctagctacagaagaccagctgggaagctggtgttctcttttctagagagagatttttacatcatgacaatacctggggcctggcccagctcggtggctcacgcctgtaatcccaacactttgggaggccaaggaggggcgtatcgcttgagcacaggagttcgagaccagcctggcaaacatggtgaaaccccgtctctactaaaaatacaaaaattagccaggcgtggtggcatgcatttgcaatcccagctactcaggaggctgaggcaggaga

SEQ ID NO: 917046 - DNA, 4001 bp, Homo sapiens
tttgtgtgtcagtttgaacttcaccaccaccataacatctgacaccgcgggaggttagtttcaggatttaaaaaaaatacaagaaataagagcacaggatgtacatagttttcctttttgccacataaataccacgtggtaaacattaaaaagagtaaatacaggctgaaatacagtcagccaaacctcgggatttcagtgttttatttactactgaatgatggactgtggcttaactccagtgtccctaatttaaaaatactatttgactccttctccccaataaaaattatcaacaagttgtacttacatcttttatgtcacacatctgggtccaggtgaagacttggtgtgggggtggataaacagtgtaatgctttctttcttctgcaacaaatcccattagctgatttaaagataaactagacttaaaatcagattctcattggaaaccataagaattcaataagaaagcttctagtgcaagttatttggaacatcattagttctttgtcatgttatgtccaaattcttttaaaaaacaacaaacaaaaacagtgcctgcccccccacctaagtggttcaatcaggtcaattccttgcctctttctctgggctgggtcctgacagtgccactcctctcggctttttaaagctcaagccaggtttcattcaggatggttggtgattttactacgccagcctttcctggacaatagactatgtgacttaaatgaatccatgatatcatctcgcgggtcgttaacaactttaaccaatataaagctgcagagtgaaacatcatggctttcttttaccccctttgtgagtaaaggaggttgaagggggtacaacctaagcctacggaaacatgaacttggccggctacactaacaagacaaaagggccggcagcctccacatttacccttatggaaggtgcatttccatatttaccttgataaaatacggtttcccgaactccccgctgaggtgcttcttccagctctctccaaagcccacgggcacgttgcgggccgcgagtctgagcagggccgcggccttgttcctctggatccggtccaactgctcggcactcagcggcgaggagggcggcgtcccaggctcctcctgcccagccggggccttcttggctgggatggcctgcaagtggtccccgcagaggcggctcaagagctgcagcggccccttcccaggcgtccgcagcttccggcccaacccccacggcccaaggcagaagacgcccatttgtggaacaggtcccagcaaaagcggacagtaagagcccagggctgggcccggtccgggaattgggaattaggttctaaactggagcggggagacgggctgggaggcgccctatggcttcccgaggagcgtcgcggtgactgggaaccctgcacagaggtgccccgcccccgccagacccgccccaccgcgtccccacgtggtcttttcgcggcaaaaaacctccctctgggtcccgccccctctcccctctgattggacagcgcaccgagccaggagggcctgcggcgcgcggattggcgccatgggccccgagacgcgttcccattggctggccctttagcatggcggcccatgggggacagcggcggctattttgaacacgtggaggctatttggaaagcggagcccgggtttaccgagtcagaggcgcgatcctgcacgccctccgtcaggcggggcccaccgccttcctcccccttcaccccctagccccggcccaagccgcgcctcaccgccgcatctccgctttcctcaggcaccccagccacgccggtcccctggacggccggctcggggctgggggcgtgtcgcttcctggcggggctgggggagaaaaaggagtagagcgtcttctggccgatcatcctggagctgaggaggcagcgaacgcgcgccacccgggaaccggcgaggctagccctggctgtggctgtggcggtcagcaattggcgccaagcggcccgcgcatgctccgagcggggggctttgctgggggcggggggcggtggaaggcccagtgcgcatgtgcgggaggggctggagtgcaacgcccctgggaggaggtggggcgtgcaacggtgcccgggggcctattctttcattcgctttgtgccttcagcccacctctgctctttggacaggctcttaaggctcagctgcaagaagagaagactggtcaggcgcggtggcccacgcctgtaatcctagcgctttgggaggcccaggctggaggatcgcttgaggccagagggtctgagctgtagtgagctttgatcgcgccaatgcactccaggcctgggcgacagagcgagaccctgtctctcggtggggtcggggggagggggctgggaagaaaagttcctgccccttaggggtgttgtgggagtgcaatgaacaatataataatattgtccgggcttgatggctcacgtctgtaatccccgcactgtaatccgaggcatctcaaaaacaaacaaacaaacaaatactattatattttgtgtgtgtattttgtttttgagacagagtcttgctctgtcgcccaggctggaatgcagtggtgtgatctcagcccactgcaacctccgcctcccggattcaagcgattctcgtgcctcagctaggattataggcgcgcgccaccacgcctggctaatttttctatttttagtagaaatggggtttcaccatgtttgcccaagtgtgttttgtatttttttagtagagatgggggatctcaccatgttggccagtctggtctcgaactcctgacctcaggcgatctgcccaccttggcctcccaaagtgctgggattacaggcatgagccaccacacccagccaatattatttgttgaactgttatatacattttctcacgcaattttcatggcctattttatgacgataaactaaggcttagtgcagtcaaacattttgcctaatgtatcaggcttgtgggagactttcgggtcatagaggttaaacaccaacgatttgtcttccaaatgacaccactgtaccgaacctcctcccaccactactaatacacttaggattctctttccctccctcacatccaaaccatccatatctgcttttggttctttctccaaagcaaacctcaaattcaactgctgctcttgcatctcctagctacagaagaccagctgggaagctggtgttctcttttctagagagagatttttacatcatgacaatacctggggcctggcccagctcggtggctcacgcctgtaatcccaacactttgggaggccaaggaggggcgtatcgcttgagcacaggagttcgagaccagcctggcaaacatggtgaaaccccgtctctactaaaaatacaaaaattagccaggcgtggtggcatgcatttgcaatcccagctactcaggaggctgaggcaggagaatcacttgaacccgggaggcggaggttgcagtgagctgagattgtgccactgcactccagcctgggtgacagagcaagaccctgtctacaaacaaaaaaaagaaaaagaaaaaaaagacaatccttaggttaaaacccttctttggttttcaaaaaggcttagaataaaccccagcttcctacccaggtctcagtgctgcctcctctctgatggaagcccccactactgagtccagctcccagcacaattgctggacacacccagcttgtccccctgtggcctgcacacccttgcattcaccgtccccttgcctggaaagcctcaggtctcagctcaggatctttccctgaaaaggacttctcctcctgccccactttctagcccattgctctataactgctatactatacaaaagcatcttatttattttttctttttacacaatttctttagagacagcatattatttattctttccttgtgtgtttctgtctccatccccgaaatgtaacctgagtgaaga

SEQ ID NO: 917047 - DNA, 4001 bp, Homo sapiens
ccacaagccaaggtaaacatgggtgtcctaggaaatgtccaatttccccacagtaataaacatctaacattataataaaaacaataacttttttttttctttttttgagatggagtctcacgttgcccaggctagagtgcagtggccggatctcggctcactgcaacctccgcttcctaggctcaggcaatcctcccacctcagcctcctgagtagctgggaccacaggcgtgccaccatgcccagctaatttttttgtatttttgtagagacggggtttcaccatggtgcccaggctggtctggaactcctgagttcaagtgatcctccctcctcggcctcccaaagtgctgggttacaggcgtgaaccaccctgccaggccaacaataactattattaagtcacttgaagattctatttttttgatataatgaaacaagtatgtatttacatccttagggatttctatcatacaaacatagtatatagcctaccaaaaaagaaaaaagagactaagacttagatcaaggttaaattaaggtcctaagtctgccacctattagcttaactgaaaatgatcccaatatcacagccttttgtcaggagtaaagagcagagataagaggataactaaaatttgatatctcataaatatgaaattcttaagatattaaaacgaatcaagataaaatccttataataaaattactgtccattttacagcatgaagataatgaggtgcaatgatttaaattaactctcctcaaagccatactgcaagttgagtggtgaaactgtgacataactcaggtctaaatcttactgttcctttcactatgccatactgaaacactctatgaattatatactactgttatggtaacagtggaaagtgaaaatatgttttattataatgaagaggcacattatgcttcccaaaaaataaggaattttaaattatgttacatattcacatatttaagttattgtagatgccacttgatatggtcgacaagtgtgaaaatgtccacatacatccttcagtattttaaatgtataacctttggtattttacaagtttgaatattagcagttagttaagcctcaagtggacttatctactttttgcaggcctacattatctttcaaacagaagggaagggctgcacgtctaacagaaacgctgccggcttctatcaagccaccactaaagcacaagaccacgtggtctctcataagcccaaggttccctactcctctccctcctttgacaaggaactggaaactagggtttctttctcttatgtggagccctgacatgccacctgtgtagtacagaccgcaaacatcctgcagcctgcctcccggaagaccaagaatcagaataaaagggaacttggacgccgacaattctaggaaaggaaatgaacagagaagtaaagccggtgagatcgtgataagccgcggcaccgggacctgtcaaaacggcgtatataagactcaaaccaaaccactataacctatcattcgggaaggcctgaggtgggagcggcactacggaaggaaggaggacgaagagaaccgcacgagtcagaaccgccgccgccgccgctccccggatacctttcagcatgccctggcaagccaagaaccctgaccctcatctagagtccaacctttgccccaacatttcagaagcggccaaaatcccgctgccccggcggccgccgccggacctgcccgcacctgtcactagcgaaagaaccagctcgcggctcccgcccacttctccactatcctcgggcaaccgcgggcatctcaacccctttctcttaccaggtgtcccctttccggagcgaggttttgagcagcgtcgcgatgtcagaccgctgggtgtccagatccgccgctccgccttccgccatcttcttccactagcggtaggggaggtggcagcgacggcggcggcacgccccagagcattatgggaatggcgtcccacggcccctcccagtcggccggtcgaaaccaaaagacaccgggagcgggggtgctcctcgggacaagaggaggccccgggggcgcactgggtgcgcggccatggtctgctgccccccatcggtccccgcccgtccagcatcttgccttggcctcctctggcccgggactgccgggttttagctttcctcgccgccgagggctctggctctctctcgctagagggatgccaccgccctgtcctcccgtcctcagcgttgccttcccctccctctttcccactgacgccttgaaaacccttatttgcgcattcactcacgcttgagggtgaggtagggtggggcggtggtgtgggggcgtggggacggctaagatatggcagaaaatgtagcagctcagtgactgggcttttcgttacgagtgggagaacccaagctcggtgaatatgggcacacacaaaaaacactccgaaaccgaacgcttggtctccatgcccttcctgggttccttccagcgctcttactcccgttgtaggtggggaccctttataggctctttgtgacgcctccccaggcacacccagacgactaagctgcagtgaaaaacatgtcccagttcatcggtgaacagggagtagaatatggacagtattgaataatgccagatactaaaggaagaaaacgtgcgagaaaccctcttgtttatacaggatagtaacattttcttagccccatcttcgtatggtgccgtacacctgaaatgaaactagatatgtctttaatttgaagtcaacgattatgttacaaaatagaaaatcgagtcgcttaaaaatcaaatgccaaggtcacacagcaggtggagaggtgagtggagaggctggttcaagagcccacatgctatacagtatagcacactcactgcctctccttctgaaagcctgaactaaaatgtaaactctttaagagctggaactgggttcatcttttgttttagcctttgtacacctggtggttagcacagtactgatggacatgtaaaaattacctaaatatttgtttagtaaatgaattgtggcaaaattacttaagtattcccgagcatgatgtccaggggtgtgattttaacataccatattgatgtgaaaagtctaaaagatgggccggaatccccacatcatttctcgtttgcccattttaaaccctaactcatttggtgagaatgcgataaaggtaggtgtagttatgctagtaggaagtgctgaatccaagtgaaagtagtgtatattggcattatgatttgtgtatatcagtattatgattatgattgcttatttctgcgtaataatactattttgcattatcatgccaaccttgaattgagagttttaaaacaactttcagtgactgctatttctggcttttctcctgacaggttaaaagattaagagtttctctaaccacggctaccctctaaaagtcacattttccccctttttccagtcactctctgaaagagaacaaagtaattttctgaagggaagctgcagaatatggaaaacatatattggagctacatggatgtaagttcaaacctcacttcaacctttagctgcaaagttcttgccctttaattgaatcataaaattgagtataataatacctaccttaagggatttttatgaagattaaatgaaacaatttgtgtttattgcctgggacgtaatagccattcaataaacactagtattgtttattgatgacagggtgaattgtacagtatgtgaattatacctcaataaagctattgaaaaaaggtgttaggggctttgaaggcaaaactgtgctctccttcattgtataaacataacataaccaagtagcaataaatcatttataccctaatgtccactttcccttaagagaaaatgcatttttgaagtgttgacagctacaaccatacaatgaagtaaaataatattttcttcacttgcaccatgctcaag

SEQ ID NO: 917048 - DNA, 4001 bp, Homo sapiens
gaaagagatcaactcacctttcctctgtttctgttctgtctgggcctctagctgatttgatggtgctcattcacacatcgagggcagatcttcctgaactttgtccactcagactcacacagcaatctcctcttgaaacacccttacagacacaccaaaaaatgctgctttaggctggtgtggtggttcacgcctgtaatcccagcactttggggggccaaggcaggtggatcacgagatcaggagatcgagaccatcctggctaacatggtgaaatcctgtcaatactaaaaatacaaaaaattagcccagggtggtggtgggcgcctgtagtcccagctactcaggaggctgaggcaggagaatggcatgaacctgggaagcagagcttgcagtgagctgagatcgcgccactgcactccagcctgggagacagagcgagactcggtctcgggaaaaaaaaaatgctgctttaccagttctctaggtattccttaaacccaccaagttgatacttaaaattaatcattgtggccgggcacggtggctcaagcctgcaatcccagcactttgggaggccgaggcaggttgattgcttgagctcacgagtttgaggccagcctgggcaacatgatgataccccctctctataaaaaatacaaaaattagcctggcatggtggcgcacacctgtaatcccagctattcgggaggctgaggtgggaggatggcttgagcctgaaaggtggaggtggcaatgagctgagatcacaccaccacactccagcctggatgatagagccagatcttgtctcaaaaaataaaattaaaataaattaatttaaccattgcaacagctaacacttattatgtgccatccaagtgtgtggtccttcacctccattttatctttgattctgaccaccaccctatgaagtagttatggttattgatccccgtatttctgatgaggaaatgcaagcacggaaagttagacaacctgctcgaggttacccacccaggaagaggtggagctgggaagagagtccccaggactgagcctgctttaaccactctccagttccaggctgcaaactccctttttcctttgaaggaacttgacttggtctctgttgaacatcaaaaaatactgattggccagtcgcggtggtgatcacacctgtaatcccagcactttgggaggccgaggcaggtggatcacaaggtcaggagttcaagaccagcctggccaagatggtgaaaccccgtctctactagaaatacaaaaaaattagccaggcatggtggcgggcacctgtaatcccaggtacttgggaggccgaggcagagaattgcttgaatccgggaggtggaggtagcagtgagccgagattgcgccattgcactccagcctgggtgacagagagagactctgtctcaaaaaaaaaaaaaaaaaaaaaaagtcctgattaaggcacatgagtagaagctgaaatgggatgataagggggctatttatttatttatttatttattgagacagagtttcgctctatcacccaggctggagtgcagtggcgcgatctcagctcattgcaacctctgcttcctggcttcaagcgattttcctgcctcagcctctcgagtagctgggactacaggtctgtgccaccacacctggctaagtttttttattttcaagtggagacgaggttttgccatgttggccaggctggtctggaactcctgacctcaagtgatccatccgcctcggcctcccagagtgctgggattataggcgtgagccatggtacccgacccctaagagggctgtttagagtgagcataatgaatattcatagagccctagagagccccacctgacaccaggattgagggaaaaggggtaattaaagcaaaaaccttcagagacatttgaatccataatcgaaaaggtaccaggttgtccagctccctttcccagctatgcaacaatggggatactgacaagtgtttggattggatgtctttagataagtgtccaccctcttagccaatcagctgtggccaggaatcatgtgataccaaatgtagtgcacagcagggatgggggagagattcctttagaaataagtgtgggtgggacaacttgtgattgactccagtatgaggtgagaaggagccatgaataagttcaaactatcattgtgacagacacatagttgttgctcattaatatttactagataaataatacattggagcttgagtaccactgtataattggttttcccaacattagatttgtttaaagttatccaatgtttcaatagttccaatttctcctactatacccgcaatggatggtttcttttgagacactcagagaaagcctagcatttaagggcgcaggttgtggagatagactgccggggttttaagtccagatcaactctttcctgtcctcatgaccttgtgcaagcaaatctacccttctctgagccttgtttcctcatcttacaaaataaggataaaaatcacacctgctcataggattgttgcaaagatcaaggggaccatggtgaagtacatatccgggtgcctggcacacattcaattttggattttcaagtccttttatggattcgatgtgagattgttttcagttctcagattggttttcttgttccctcttccaacttcccccaccctttgtcaacaattaaagaaaaaaagaaaaaaatgtttccttcttcctttagttccttgtaagtgtccattcaacggtcattctcatagcttttgccagttgccatcatggatcatcttagtagttttctgttgtataattttccagcttttcttttcatttgttcacacttgatcaggggtttccacttcatggtgctggggagcttttaaaaaataccctgaggccgggcgcaatggctcacatctataatcccagcattttgggaggccgagatgggaggattgcttgaggccaggagttctagatcagcctgggcaacaaagcaagaccccatctctacaataaataaattagctgggtatgctgggatgagcctgtgatcccagctactagggaggttgaggtgggaggattgctttagcccaggtggttggggctgtaatgagccatgatcatgccactgcaactccagcctgggcaacagagcaagaacttgtctcaaaaataaataaataaatattgaaaaaataaaaaatacccaggcttggcctccacctcccgagagttgagttcaattggtttgaaatggagccaggcaattcttatatgcagcctgaactgagaaccatttattcaacaaatatttatggggtaccttctatgtgccagacactgttctagtacttgggacacatcagtgaaacctcatggagcttaagttctaaaggggtcagaaattctagtgagaggtggcttaggggaaccattaaactatctaggatcttgaaggcagagactttattttactcatgtttttattccccagggtcagggctgtagaattcacccaataacgcttgttgaaagaatgagtgatctttggccttctcatacctaatttacatttttcttttcttgattcatttcactagacccttagctccacgatgacaatgacaggtcgaatttgttctgtcatacccccagtgcctattacagtgcctggcacataggtgctcagtaaaccgtacttaaatgcatgcctgtatttgttacagcagcctgggtttcaagagtgttatacggataacattaatgaatccacgcaaataaacatttagacacgcatcgtcaatcaaagggtgctcactggtacccggacaaccatttcacagactggtgtgccctataggcatcccagtgatacaccatcagccagagagcctgtgaactcttccaagcagaagggctctccctgccccctctccccgcgcagctcgctctgccct

SEQ ID NO: 917049 - DNA, 4001 bp, Homo sapiens
tattctttctttttttcttatttttatttttatttttttttgagacagtgtcttgctctagttgctctagtgcccaggctggagtgcagtggtgccatctcagctcaacacaatcttcaccttccgggctcaggtgatcctcctgcctcagcctcccaagtagctgggaccacagctgcacaccacatgcccaggtaatttttaaatttttttgtagagacagggtctcactacattgcccaggctggtctcgaactcctgagctcaagaaatccacctgcctcagccttccaaagagctgggattacaggtgtgagccaccatgcccagctggtgaaaggtattcttgaagtttcttaatacatcactgtgcttttacacgatacgtgagttcacaaaagtgcctggaaagattataaaggactgtcatggaagtgctaaggtgctttaccagtgctttaaaatcccctaatcaaacactaatatttaagggtacatactctctgccaggccctgtgacaatcttacctcatttttaaaacaaccccacagatgcaggttctactatcactttcatttttatagcagaagaaactaagagcccaacttggtcacagtgagtgaaggaacatggctctgaatcatgcctgtctgtctccccaggtctgtgcttaaaaccacgaagttcaagatggaaactgaagggaagagtgtcaaggggatgggagagaggacttgtccatgactttggcagcataaggaaaaaatacccagggacaagtggcgactttggaaactccattcctctgcaaaatgacatcacgaggagagtggtggggcctgcggatgaaaagatctggcttctcctcccaactctgctatgaggtcagctatggggccacacttcctatctacggaatgggggcactggacaggataagtatcgaggactttcagccctgggataataagctctttaaacctgctccagttccagaggaagccgacctgagcaacaggtctcagtcatttggggtcagcagtgggggagggggtactcagttctgaagcctggagcccttgggagggtgaataagagggaaatgggggccctgacaggattggggacccaggcaatcgaggagtcctaacaagaacggagggctttaacaggaccaagcaaccttaacaggttaaaggggccctgaccaatttagagacccttgcaaaacaagggcctttactcacactaacaacatcagggacccagacagaagtggcgatccatattagactagagggcgggctaacaggaatagggggcggtactaacaaaacgcggggctcgcaggcccggggcacttataggactagaagaaccgtgccaaggttggggaaccctggcagtccagaaactgatatgattgggggacccagaaggactgggggtatactagaaggattgaggggtcttggcaggcctaggaggcactgaaaggactgagggcactgacagaattaggggccttgacaagactggagtgccccgggtgtcctgggaacaatgacaggagggggagggactgacagacctggggagtgcagacagaattggtgttgccgaaggactggagcccgtcagtcctcccacctacgggcccaggcctccaaccctaaaggacgcagaaccttccagaatgcccgcgcgggccctggagaccccaactagggcatgaaaaagccgtcacgggcccaagctggggaccctggtcccggcctcttcggcagccccgccccccaaaatctcacctgacggccgccccggtccgcaggaagcgctggatggccctgtcggccgcggtcatcgccgcctcggcccgggagctcagcattgcagccgcaccggaggcctgaaaccgtctcctccgctaccgccgccgccgccgccggaccgagggatacgacggttcccgagacagcggaacctgcggccgcagtcccagcacctcgggggaacgtagaccgcaggacagctcccagggggaccggaagtagctgcccccggagagcaatagctgacggaccacgtcctttctttcttttcccttagcaacaggccccggcgtcggttgctacgctgggctcagttgcctggggctgcttggttttcagatttgcttaggctccattcataaatacagatggcacacttctaggatggaccctgggtcatgatttgaatttttcgatgtggggaagggaggccaacagccgaaagtcgggtcaggcctctgctataattagttattattgtggccagagtggaaataggtcgcagaggaaggaactttaatgagcatgaggcccatctctgacgatatcagtagagaaatcaacgtctttaatagccaacaaacttattgtttacttgggtgccaggtatagagctaagtatgttacattcattatttacatttaatattcacaccaactctaacattacccacattttacatcccagggaacccaggaaatttgaagaaatagtaagttttttgacgcagcttgtaagtggtgaaacagagattggcagttcggtctgtctgtctccagaatggcactctccaacagaaatatacaggagccacataggtaattttacattttccagtagccacattaaagtgaaaagcaggaggtaggccagacgccgtggctcacgcctgtaatcccagcactttgggagaacgaggctggtggatcacctgaggtcaagagttcgagaccagcttggccaacatggtgaaaccccatctctactaaaaatacaaaaattagccgggcgtggtggcaggctcctgtaattccagctactcaggaggctgaggcaggagaattgcttgaaccgtggtggtggaggttgcactgagccaagatcatgccactgcattccagcctgggtgacagaaccagactccatctcaaaaaaaaaaaaaaagaggtcaggtgcgatggctcatacttgtaatcccagcactttgggaggccggggggtgggggtggggggcacggattgcttgaggtcaggagttcgagaccagcatggccaatatggtgaaaccccgtctctactaaaaaatacaaaaatcagccaggtgtggtggcgcgtgcctgtaatcccagctactcgggaggctgaggcgggagaatcgctagaacctgggaggcggaggctgcagtgagctgagatcacaccactgcactccagcctgggcaacagagagagattcagcatcaaaaaaaaaaaaaaaaaaaaaaaaagcaagaggtaaaattaattttaaccatattttttccttgacccaatatgttcaaaatattggggcaggtgcagtggcttatgcctataatcccagcactttgggaggccaggtgagaggatggcttcaggcccagagtccaaggccacctgggcaacatagcaagaacccatggctaccgaaaaacaaagaaaagaaaaacaaaatatgtcatttctatgtgaaaattattgatgagataatttacattcttttttttttgagatggagtcttgctctgccgcccaggctgcagtgcaatggcacgatctcgcctctcaggttcaagcgattatcctgcctcagcctcctgagtagctgggattacaggtgcacaccaccacgcccggctaatttttttgtatttttagtagagacggggtttcaccatgttggtcaggctgcttgaactcctgacctcgtgatccatccgcctcgggctcccaaagtgttgggattacaggtgtgagccaccgcgcccggcccattatttttttgttttttggtactaagtacctctcagtttggagtacccacttttcatgtgctcaatagccccaagtggccagcagctaccgtattggacagcacagtttataaagcattagagccagcaagatttttccctccctttcaatcgct

SEQ ID NO: 917050 - DNA, 4001 bp, Homo sapiens
aaaacacagactctgccctcaaacaacccaatgagcagaaaattctcttaggcaccaaaacgctgtaatagattcaagtgtgtagaggagaagtttggtagagtggatatgacgctttctttctttgtagtacagaaaagataaatctgtagaaaagggagaaagacaactgggtagaaaatttatttcaaatatctaacccaaatcttcaacagattttccattttaaatattccaaaaagtgtaccattgtatattatactaaatgcaggttcatttatcacttaaaaatttttaagctaaaaaatctcaaacaattaacatttgggaagaaaaacaggactgatacacaaagtagtcaaaatatttcagctttctaaactgtatgcactggactaactgttcaatattagaatatctctacatttgaatttggatagcccacagtgataaatactggactgaaaaatctgacatcgaacatatgcaaaactaatggctactatgaaaaaagatagaatggggagagaaaacttgaatgtgccaaaacatttaaacgctctttaaaatatcctgagatgctaaattaaggacaaaacgattagagttccaagaatacaaattttcatctctttcaagattcaactgaatattgaatctcattgagattatgaaatattctctaagcatgtgcttaacttctatttggctttccgcatttcaccacagtgaacagcccattctttttccttgtttacaccaaatgctcgttttgaacacaactcaaaatggaattccaggcccaaaagtcaccacccctactttcacccccacaggcagctacttaacagataaggaattcaagtgcaggacctgaaggtcttatttccatgcaaatttcacaatccccgttacttgcccagatacaacaattaaagcttaaaaggtggcgggagtgggggacttgaggactggtctgaggagaaagtgaatctcccaagggttcctaaatggttttgcttccagtataaaaactgcgagctaccagtagaatttaacaacagctcaaccttgcatttggaacagttactatatagttcactttcttttttcatgggggcggggtatggtgtcttacctactcttaaatttgaacgtattaacaggttcccctccgcgcacactgacatatttcttatcccccataatgaattcagccatatggcattctttcccatcgaaggccatcgggaatggctttaggaagctgattttcaagctttaagcggcagcaggtgccggcagcgcggggaccgatcgatggagagaaggcgggcaagacgccgggaagcgcattcctcctcaaccgagtgccacaaccgccctcccgaagtgccccggggcttcgagcatcacctcgcggtaatccgggagggtggagggatgcggctggacccgggcgttgcgtgctccacacagcgcccagcccgtgccagccccgcgcccacctctccacgacgctcgtgccgggatcagcgcgaagccccttccagtccccgaagccctcgcccgcgcccgttctcccccagctcgccccctccagcccgctgcgccttgccgcagcatctccgggcactctgaggctgccgccgggacagggtcggagcgccgcagaacccaccgaaacttcccaggggggcaattcaaaattcgccggacgcgtcgccgccgcgcgcccctcggctcattcccttccgcgcgcccgcagccccaggctctccctctctcaggaccccccagcgccctgcgcggcgagaataggcccccaggtgcctcccggccccgggggctgccgtcgcacgtccgctcccgcaggggtcctcactccgccaatcgccgcggccgcgcgccctcgcgcacactcaccagcccgagccggggcggccatcttagcgctcaccccggccccccgccccccggttcggcggccgcgacgacccggtgcggcggctacgacagccgtgacgcgcagcaggccccgccccctcccacagccccacccctgcgccggctcttcgcgggcaccgagaacctgccggtggccgccttccgcgcctcgtgggggggtcggggccacggacggtccccggcgccgcaagtgggtctgcgcgaacaacaagcactgcctccccgggcgggcttcgcacctgtagtgccgtcgggacacgggagggtaaacccagcgtgtcctgtgtgcctgtgagccgcagaatcatccacggacgtcgttagtccttcctggaatttctgcgatttacacaacgtcgaattgtttggcagaaacgcgtggcaaactccgttatctttaaaaccttccccaattcactggcatagaaattcttaaagaaaacgtttccttcttgaagcgacccctgggtgtaacttcagtggcgatgacggctgtgaattgggttttttcgcaccgcagaagggcgagagaggttccagaacgggcacaggaagggaaccgctatctagaactgcctaacccgaaattgcccatttaaataatgaagtacataccgaaaaggaaaaggaggggaaatctggaaaacaggaaagtcaaggctaaggtacctgaaaattaacccattaatatttattggattctttgtgttcaactctgagccagattgttgtttttaactgaacctatactcaatgacaaagcagttctactttggccaccctgtggagtgtactgaaaatttaaaaactctccaaggagagcttaaaaagaagacaaacatgcaaagttaacaatacatcaatgcagtgcaaaatcttgcaatatgtaagacaaggtataaaattgttcctatcttttcatcatcagttttattctggggagtatgtttcagtggtatgacctgaataaagaaatgagtgcacaaaggtattcacagcatattatccaaacaccgtaaaaggcaagaaggagcggcacaggattctaactaacaggaaatggctaattaaggtctgacatagaggccgggcgcagtggctcacgcctgtaatcacagcactttgggaggccaaggcgggtggatcacctgaggtcaggagttcgagagcagcctggccaacatagtgaaaccctgtctctactaaaaatacaaaaattatccgggcctggtggcgggcacctgtaatcccagctactcggtaggctgagacaggacaatcgcttgaacccaggaggcggaggttgtggtgagcctagatccacaattgcactcaagcctgggcagcaacaagagcgaaactccgtctcagaaaaaaaaaaaaaaaaaaaaaatctgatataacacaggaagttcttatgttaacaaaatagatacaaaatagcaacaatgtctaatcaattcatgtttgaaaaaaataccaaatatgtacattaaggttacaactgcataaaatgtagtcatgcaaataaagattaaagggatgaatttgcatagtttaatactcattttgttcttttttctatatatttaagtgcataataattctgattcaataatgaccccagtgcacttctcccactcaaaacatctaacctctatgttgtacttttgcccaccacctgaatttctcaaatgcattaaaagcattacatgagggcatctcttaagatgaaatatttaaaatttaagtatttctggcatgcaatatggtttttcctgtaattccttgaaagcaaaatattaataatagaaaaatcaaaactcttgctttcctattataatgccataaaaccattctggaaggtcgtttgggagataggaagagtcttagttgcctccctctgatctagtaattgggcggggtcttttaaggactaaaatgatgtgaataaatgaagagaaaaagtgaaatgggaagaaaagcaaaggcaagctgtgtaaggcataggtggagagtgctgaatagtgtct

SEQ ID NO: 917051 - DNA, 4001 bp, Homo sapiens
tgtcattccagcacatctatgatctgatctagcaagtatatcgttagactacaaattacctttttcctatgacgtgtaaaactccattaaaaatgaattcttcctaataaagttttttatggcgtctaaaattgctgtgaatgttacaccttttacaatcaccttttagccagaaagccattatttgtagaatcctcctgtatttcagttatttgtcacctatttaggctgggcctaatagcaaaactgtcccccgttactgaattcagagaattattcgggcacacgatttatttcctatcttgattagactcctgagcccgtgccccagcctctcgctaatctccctggaccagacaactccattagaatctggcacccacgtttgttctgcctaacactgcaggaaggacagagacttcaaagcacgtgtttgtttttttgttttgtttttggctaccaagaagccaaatttctgtatcctctaccattcaaaaccccaattcaacaaatttacacgggggtttttcctccacgttaagcagttagtcgggtactagagatacacatataaaacacagactctgccctcaaacaacccaatgagcagaaaattctcttaggcaccaaaacgctgtaatagattcaagtgtgtagaggagaagtttggtagagtggatatgacgctttctttctttgtagtacagaaaagataaatctgtagaaaagggagaaagacaactgggtagaaaatttatttcaaatatctaacccaaatcttcaacagattttccattttaaatattccaaaaagtgtaccattgtatattatactaaatgcaggttcatttatcacttaaaaatttttaagctaaaaaatctcaaacaattaacatttgggaagaaaaacaggactgatacacaaagtagtcaaaatatttcagctttctaaactgtatgcactggactaactgttcaatattagaatatctctacatttgaatttggatagcccacagtgataaatactggactgaaaaatctgacatcgaacatatgcaaaactaatggctactatgaaaaaagatagaatggggagagaaaacttgaatgtgccaaaacatttaaacgctctttaaaatatcctgagatgctaaattaaggacaaaacgattagagttccaagaatacaaattttcatctctttcaagattcaactgaatattgaatctcattgagattatgaaatattctctaagcatgtgcttaacttctatttggctttccgcatttcaccacagtgaacagcccattctttttccttgtttacaccaaatgctcgttttgaacacaactcaaaatggaattccaggcccaaaagtcaccacccctactttcacccccacaggcagctacttaacagataaggaattcaagtgcaggacctgaaggtcttatttccatgcaaatttcacaatccccgttacttgcccagatacaacaattaaagcttaaaaggtggcgggagtgggggacttgaggactggtctgaggagaaagtgaatctcccaagggttcctaaatggttttgcttccagtataaaaactgcgagctaccagtagaatttaacaacagctcaaccttgcatttggaacagttactatatagttcactttcttttttcatgggggcggggtatggtgtcttacctactcttaaatttgaacgtattaacaggttcccctccgcgcacactgacatatttcttatcccccataatgaattcagccatatggcattctttcccatcgaaggccatcgggaatggctttaggaagctgattttcaagctttaagcggcagcaggtgccggcagcgcggggaccgatcgatggagagaaggcgggcaagacgccgggaagcgcattcctcctcaaccgagtgccacaaccgccctcccgaagtgccccggggcttcgagcatcacctcgcggtaatccgggagggtggagggatgcggctggacccgggcgttgcgtgctccacacagcgcccagcccgtgccagccccgcgcccacctctccacgacgctcgtgccgggatcagcgcgaagccccttccagtccccgaagccctcgcccgcgcccgttctcccccagctcgccccctccagcccgctgcgccttgccgcagcatctccgggcactctgaggctgccgccgggacagggtcggagcgccgcagaacccaccgaaacttcccaggggggcaattcaaaattcgccggacgcgtcgccgccgcgcgcccctcggctcattcccttccgcgcgcccgcagccccaggctctccctctctcaggaccccccagcgccctgcgcggcgagaataggcccccaggtgcctcccggccccgggggctgccgtcgcacgtccgctcccgcaggggtcctcactccgccaatcgccgcggccgcgcgccctcgcgcacactcaccagcccgagccggggcggccatcttagcgctcaccccggccccccgccccccggttcggcggccgcgacgacccggtgcggcggctacgacagccgtgacgcgcagcaggccccgccccctcccacagccccacccctgcgccggctcttcgcgggcaccgagaacctgccggtggccgccttccgcgcctcgtgggggggtcggggccacggacggtccccggcgccgcaagtgggtctgcgcgaacaacaagcactgcctccccgggcgggcttcgcacctgtagtgccgtcgggacacgggagggtaaacccagcgtgtcctgtgtgcctgtgagccgcagaatcatccacggacgtcgttagtccttcctggaatttctgcgatttacacaacgtcgaattgtttggcagaaacgcgtggcaaactccgttatctttaaaaccttccccaattcactggcatagaaattcttaaagaaaacgtttccttcttgaagcgacccctgggtgtaacttcagtggcgatgacggctgtgaattgggttttttcgcaccgcagaagggcgagagaggttccagaacgggcacaggaagggaaccgctatctagaactgcctaacccgaaattgcccatttaaataatgaagtacataccgaaaaggaaaaggaggggaaatctggaaaacaggaaagtcaaggctaaggtacctgaaaattaacccattaatatttattggattctttgtgttcaactctgagccagattgttgtttttaactgaacctatactcaatgacaaagcagttctactttggccaccctgtggagtgtactgaaaatttaaaaactctccaaggagagcttaaaaagaagacaaacatgcaaagttaacaatacatcaatgcagtgcaaaatcttgcaatatgtaagacaaggtataaaattgttcctatcttttcatcatcagttttattctggggagtatgtttcagtggtatgacctgaataaagaaatgagtgcacaaaggtattcacagcatattatccaaacaccgtaaaaggcaagaaggagcggcacaggattctaactaacaggaaatggctaattaaggtctgacatagaggccgggcgcagtggctcacgcctgtaatcacagcactttgggaggccaaggcgggtggatcacctgaggtcaggagttcgagagcagcctggccaacatagtgaaaccctgtctctactaaaaatacaaaaattatccgggcctggtggcgggcacctgtaatcccagctactcggtaggctgagacaggacaatcgcttgaacccaggaggcggaggttgtggtgagcctagatccacaattgcactcaagcctgggcagcaacaagagcgaaactccgtctcagaaaaaaaaaaaaaaaaaaaaaatctgatataacacaggaagttcttatgttaacaaaatagatacaaaatagcaacaatgtctaatcaat

SEQ ID NO: 917052 - DNA, 4001 bp, Homo sapiens
aacccattaatatttattggattctttgtgttcaactctgagccagattgttgtttttaactgaacctatactcaatgacaaagcagttctactttggccaccctgtggagtgtactgaaaatttaaaaactctccaaggagagcttaaaaagaagacaaacatgcaaagttaacaatacatcaatgcagtgcaaaatcttgcaatatgtaagacaaggtataaaattgttcctatcttttcatcatcagttttattctggggagtatgtttcagtggtatgacctgaataaagaaatgagtgcacaaaggtattcacagcatattatccaaacaccgtaaaaggcaagaaggagcggcacaggattctaactaacaggaaatggctaattaaggtctgacatagaggccgggcgcagtggctcacgcctgtaatcacagcactttgggaggccaaggcgggtggatcacctgaggtcaggagttcgagagcagcctggccaacatagtgaaaccctgtctctactaaaaatacaaaaattatccgggcctggtggcgggcacctgtaatcccagctactcggtaggctgagacaggacaatcgcttgaacccaggaggcggaggttgtggtgagcctagatccacaattgcactcaagcctgggcagcaacaagagcgaaactccgtctcagaaaaaaaaaaaaaaaaaaaaaatctgatataacacaggaagttcttatgttaacaaaatagatacaaaatagcaacaatgtctaatcaattcatgtttgaaaaaaataccaaatatgtacattaaggttacaactgcataaaatgtagtcatgcaaataaagattaaagggatgaatttgcatagtttaatactcattttgttcttttttctatatatttaagtgcataataattctgattcaataatgaccccagtgcacttctcccactcaaaacatctaacctctatgttgtacttttgcccaccacctgaatttctcaaatgcattaaaagcattacatgagggcatctcttaagatgaaatatttaaaatttaagtatttctggcatgcaatatggtttttcctgtaattccttgaaagcaaaatattaataatagaaaaatcaaaactcttgctttcctattataatgccataaaaccattctggaaggtcgtttgggagataggaagagtcttagttgcctccctctgatctagtaattgggcggggtcttttaaggactaaaatgatgtgaataaatgaagagaaaaagtgaaatgggaagaaaagcaaaggcaagctgtgtaaggcataggtggagagtgctgaatagtgtcttcaataaaatgccttaatacaatgatgtaagctaggaagaggtgcggagtgggaagggaagaggctggagacaaattctcattactagtgttagtaattaaagagcagatgtttgtagtttagctttttcttcatacttattactacttattcaactttgaaatttcctcagctaccattttattcatgatcttcactatctaggcctaaattatagcatgctctagctcatttcctgagctccagaacctctctattgcaattttatttttacatagcaatcatagtcattcttctccttaaattttcctatttgttttttaacccgtctcatcgaatctaagctttttactgtaacattaaaaaaaagaaaagaaaaaagcctccttccctgcccaccttcatcaatgatgtccccaaacttacctattaaaacctcaaaatcagtctttccccaggtcggcctttggataactcagaggtcagtccctgcaggatcgcccagtttccatcagggcaaatgctgatctcctaagtgaaaagtcctggcggctgcctccagtgcccccctgcaaatcattacaaatcaacctctttcaggtttggcttaaactctcacctcctggaaactgctttcctgaagtcacaaaccgggcgtgcagatccccatcccccacccccagcagtgcattattatgcagtcactgcttttgttccgagttctgagcctgcttctatttgcatcgtaacctctttgggggccgggactgtgcacttgctccctttctatacctctccacagttcctagtaccggccaaaaacactgctgaaatgcctaatgaatcaaccagaagttccttagcataatataggagcgtggaagtgatgtttaggggggcttcccttgcttccctgatccccagatggagagaaatggcaatttgcccttccaaggtaagcagtttcctaaaccagataaaattttaacgattctgaaacctaatggatgtgtaactactcaattctgagttactacacaaacagttttgccctttgtatcctgagagaaaagtacgaatgaattaaaagaagacaaaacattgtaaatttcataaacctcagagtggctttttatgctttatgtcgatttttagaatttcctagtccagtctttcatgaatcgaagaatatttcaggaatcataattgcagactaaagaatttatgagcttgtgaaattttaggaatcacttttaagacttttcagagttttacagacaatgctcttacctaataactaatattcgcttaacatttttttcaacacctaaatgcctggcaccatgctaagcattgagatattcatagcattcatttcaatggttatgaggagatgaaggattgagcagaggaagtgggtaaagaaacgctaaataactcagccataaacttttgattaaggtgtagcaacacacttcagttgaactttttaaatgagaggaacccaaacgaccttaaatttctggcaaatatgaaagaaaggagttgagaaaaaaggagtatggaaaaaagagcagcagatgtaagctatggccttagtggaggaaagtgagtagaaggggctttagaattcgccttttttctttaattctaagaatgaggttggtagcaggtaaggaaggtaaatgccagctgagtagatggtaccaaagttgatttgtttttaaaagaccattgtttatttggtggtctgtcagggaaacttgtaccttgcaggtgaatttccaacataggcctactggaaactgaaaccctgagccccagggtttaggtataaatggaagcaaaattgtgaagtgagtccatttctccccctttttaaacataaacatccactccacctccaccctatactcagtttttcttttcttttcttttctttttttttttttttttgagacagagtctcgctctgtcacccaggttggagtgccgtggcgtgatctcggctcactgcaacctccgcctcccgggttcaagcagttcccctgcctcagcctcctgagtacctgggattacaggtatgcaccaccacgcctggttaatttttgtatttttagtagagacggggtttcaccatgttggtcaggctggtctccaactcctgacctcgtgatctgcccgcctcggcctccccaggtgctgggattacaggcgtgagccaccacgcctggcccactctatactcacttttacagggatcctcaggatgctgtgtccagggctttactgcagtctgtctctcttccttcccatcaaaactcttcccattttgttcaggacaggtacaccaacctttcattctctctttttatttatttttaaaatggagacagggttttgtcaccaggctggagtgcagtagcgtgatcatggctcactgcagccttgacctctcaggctcaagcaatcttcccacctcagcttcctgtgtaactgggaccacaggcatgcgacacaacttctgctaattgattttttgtagagatgtgggggtggaggggggttctccctatgctacccaggctggtctcaaactcctggcctcaagcaatccttgtgccccggcctcccaaagtgctgggg

SEQ ID NO: 917053 - DNA, 4001 bp, Homo sapiens
cagctgagaagggaggatgggcttcccccaaagctgaccaagttttccagtgcctttgtaaagagtgatggagaaggtggaggaggaaattggagacaataagggtcttccctcagatccaaggctttgagcaacaacagacatcctcttccaggaataaaagtctcagtggccttgaacatttctctgctgtgatatgaaaaatagtgcactgtctaaggtagttcttggtcccatagattgctctgtaccacttcctaggaacagtgtgtactgcaagttcatgaacaaatagagcatttctcaccggggaggtcaactaagctctttctaccatgagcccaatttgaaggtaaccaaatatgctggaagttggttagcaaagaactagggcacactgaaaatctcttgacttggggtgaaaaagggaaagtttcagaagattacaaaaaccctttttggattattcaaagcagttactaaggagagagacaggagtgaataaaagtgtaaagagggacccactgacttctaccacctgctggtaatttaagaaaaacctttccctcctgggaagaatgtgggagctctgaagtgattaaactcctctgttggaaattaaagatgctgatttcaccaaggattgggaaccccggagctctgctccgcgcagtgctcttttacctctgccaaagccagacttcagagaagcagcacattgtctgaggcccagatcaaagcctagcaaaccaagcaaaccacaaatcacagtgatgatcctgaactgggcctcacatcatgctgttctactcagtactggtgatgcagtaatgaaggctttccactctgacttgcagttttcaggccatgagctggttctggcagaatacactgggcagggcacagcagcttgaggggaggggtggtgaggggggcggatcccaaccaagctgctgccttctcagttcaggccccaaagggcctccgcttgagggtgacatagggaaggcagaactgcaggaagggaggtaccaggtggagcctgcaaaacgtgaagcatggtgtgggaggtggctttgtgtaactagccaagagtgggagcgggatgggaaagaggccttagcatcctccgagaaagaaaccacctctctaggaatactttaaaaggggttatctcagctgtctgtgataggctggggggcggggggaagggtgggggctgcggccattgctcacttcaaaggagaaacgactagagctttcctctcctctttcctcccctccccgccccctgtctgttttaaccacggggtggaggctctctgcctttctcagaatcggacttcttgagagtccactcccagactattaaccgcctaggaactgcggtccccaccccccaactccaaccccggccgagaacagtggggagtcgtccccatcactcctacacgagactacaaaacccggagagccgtgcgcggcagacaaggccgactgccaggttttctcaagggtccacttgggggatgtagtccgacggtcgggctgcgcccctagcttagaacggcaacgaaggcagtgagtgactacaatgcccacagtgctccacgaagcggggagccggagaggtgagcgcggcggcttccggggacggtagtcacacgacagccgcagttaatgaaaggcaacggcagagtggagcgtgggagactacaagtcccatggtgcatcgcagggaggcggtagcccaagccttgcaggccccagcggaatgaccagggcgatggaaggaagtcgtgctcgttgcgggcgtggggaatgggcttaccggcgtgtcgaaggagaaggcgcactcgtctttgtggacccggtctccagccttagggacccggatcgtcggtaatactgacagcagcgcctcctcactcagctccgccatgacaccggcagcagcttctccacacacggcggctcccaccgttcccagtcccctcccctgcccctcccgtccaatgagcgccactcgttaggggcatgcgccgcggagacgacgcgcgagaatggcagttggacggagcctgcctgccggtgctccgcccctgccccgcgcttgactgacgccaatgagaagcgctcctaaggcaattgatggttgaaagaaccaatcccactcctccagggcgggagcgcacgtagagcagctaggtgggcttcggggttgcagctgctgcggctccgcagctgctccggctccgggacccttagagtccattcgcgtgccttctattgaagagcaggaactgacggttgttttaggcctctcaattccagaaagtttcctggggacctgtccggtcggaaagtcgagggacagttgtcttggtatttgtaaagggggtatccagtgaggcggagcttgagggggttgtgtcgagtgactgatacagctgtcaaccaataaagctactatcgctcgcctcaggaaaaccatcacaactccagctggatgtgcgcataatagtgtaatcactcatgattctattttgtttaataattcgttcttgagactagacgtctcgaaagcgaagactggcactcctcagcctgccacggacggctcgcaggccgatactgaacagaagtacccttatcaaggaggcgtcacccctgggcaagcctagcatcagtccattgacacctacagtcaccatgatagacgttctcccagaccaacagcttcctttggctcgaggcgggtcttacgtggagggcctatgggaactacgtcggctcagccaatagggtcagggcagggggcgtggcgggaagtttgaaactggtaacttcgggagttgagccacgagctgttgtgcatccagaggtggaattggggcccggtaagtgatttgaataatttaataaataagttagagggctcagcaggcccagaacgagccattttgtcagctgcagcagtcattaactccgcagaggcctctggtccctcgccaggaagtttcttcactggaaactgggaagacagggtggtttagggttgaaggtccgacgtggaagagataagggctgagacctgagtcacttctcacaggcattccctcctcgtcccgggctggcccttgcccccaccctgcaactcctggttgagatgggctcagccaagagcgtcccagtcacaccagcgcggcctccgccgcacaacaagcatctggctcgagtggcggacccccgttcacctagtgctggcatcctgcgcactcccatccaggtactctgggccagcgtgggaaaggcagagaatgtctgaattcttgggtctcttcctaacctgattttgagagagccgtcatgaccccacccttatcctagccttattttctgcaatctcaatctgtgtggggtaggctggatatctgagggccttggcaattccttcctggaatatggggaggagaggagagaagagtcagggcccagacttgttctagcctatggtcttgacaggtggagagctctccacagccaggcctaccagcaggggagcaactggagggtcttaaacatgcccaggactcagatccccgctctcctactcttggtattgcacggacacctatgaagaccagcagtggaggtaagcgttgggcccagggaatgctgatgaagctgtcatctattattcttgggtagggtccatgaagccattctctcagggttccttaaaggggcctctatcctcctgcttcggacccatctcactcttatctcaatattttgttcccagcctgggtgcggtggctcatgcctgtaatcccagcacgttggaaggccggggtggtcagatcgcttgagcccaggagttcaagaccagcctaggcaacatggcaaaaccccatctctagaaaaaatacacacacataacacacacacacacacacaaaagcacggtggcatgggcctgtgatcccagctactcagga

SEQ ID NO: 917054 - DNA, 4001 bp, Homo sapiens
gaaacacagctgagaagggaggatgggcttcccccaaagctgaccaagttttccagtgcctttgtaaagagtgatggagaaggtggaggaggaaattggagacaataagggtcttccctcagatccaaggctttgagcaacaacagacatcctcttccaggaataaaagtctcagtggccttgaacatttctctgctgtgatatgaaaaatagtgcactgtctaaggtagttcttggtcccatagattgctctgtaccacttcctaggaacagtgtgtactgcaagttcatgaacaaatagagcatttctcaccggggaggtcaactaagctctttctaccatgagcccaatttgaaggtaaccaaatatgctggaagttggttagcaaagaactagggcacactgaaaatctcttgacttggggtgaaaaagggaaagtttcagaagattacaaaaaccctttttggattattcaaagcagttactaaggagagagacaggagtgaataaaagtgtaaagagggacccactgacttctaccacctgctggtaatttaagaaaaacctttccctcctgggaagaatgtgggagctctgaagtgattaaactcctctgttggaaattaaagatgctgatttcaccaaggattgggaaccccggagctctgctccgcgcagtgctcttttacctctgccaaagccagacttcagagaagcagcacattgtctgaggcccagatcaaagcctagcaaaccaagcaaaccacaaatcacagtgatgatcctgaactgggcctcacatcatgctgttctactcagtactggtgatgcagtaatgaaggctttccactctgacttgcagttttcaggccatgagctggttctggcagaatacactgggcagggcacagcagcttgaggggaggggtggtgaggggggcggatcccaaccaagctgctgccttctcagttcaggccccaaagggcctccgcttgagggtgacatagggaaggcagaactgcaggaagggaggtaccaggtggagcctgcaaaacgtgaagcatggtgtgggaggtggctttgtgtaactagccaagagtgggagcgggatgggaaagaggccttagcatcctccgagaaagaaaccacctctctaggaatactttaaaaggggttatctcagctgtctgtgataggctggggggcggggggaagggtgggggctgcggccattgctcacttcaaaggagaaacgactagagctttcctctcctctttcctcccctccccgccccctgtctgttttaaccacggggtggaggctctctgcctttctcagaatcggacttcttgagagtccactcccagactattaaccgcctaggaactgcggtccccaccccccaactccaaccccggccgagaacagtggggagtcgtccccatcactcctacacgagactacaaaacccggagagccgtgcgcggcagacaaggccgactgccaggttttctcaagggtccacttgggggatgtagtccgacggtcgggctgcgcccctagcttagaacggcaacgaaggcagtgagtgactacaatgcccacagtgctccacgaagcggggagccggagaggtgagcgcggcggcttccggggacggtagtcacacgacagccgcagttaatgaaaggcaacggcagagtggagcgtgggagactacaagtcccatggtgcatcgcagggaggcggtagcccaagccttgcaggccccagcggaatgaccagggcgatggaaggaagtcgtgctcgttgcgggcgtggggaatgggcttaccggcgtgtcgaaggagaaggcgcactcgtctttgtggacccggtctccagccttagggacccggatcgtcggtaatactgacagcagcgcctcctcactcagctccgccatgacaccggcagcagcttctccacacacggcggctcccaccgttcccagtcccctcccctgcccctcccgtccaatgagcgccactcgttaggggcatgcgccgcggagacgacgcgcgagaatggcagttggacggagcctgcctgccggtgctccgcccctgccccgcgcttgactgacgccaatgagaagcgctcctaaggcaattgatggttgaaagaaccaatcccactcctccagggcgggagcgcacgtagagcagctaggtgggcttcggggttgcagctgctgcggctccgcagctgctccggctccgggacccttagagtccattcgcgtgccttctattgaagagcaggaactgacggttgttttaggcctctcaattccagaaagtttcctggggacctgtccggtcggaaagtcgagggacagttgtcttggtatttgtaaagggggtatccagtgaggcggagcttgagggggttgtgtcgagtgactgatacagctgtcaaccaataaagctactatcgctcgcctcaggaaaaccatcacaactccagctggatgtgcgcataatagtgtaatcactcatgattctattttgtttaataattcgttcttgagactagacgtctcgaaagcgaagactggcactcctcagcctgccacggacggctcgcaggccgatactgaacagaagtacccttatcaaggaggcgtcacccctgggcaagcctagcatcagtccattgacacctacagtcaccatgatagacgttctcccagaccaacagcttcctttggctcgaggcgggtcttacgtggagggcctatgggaactacgtcggctcagccaatagggtcagggcagggggcgtggcgggaagtttgaaactggtaacttcgggagttgagccacgagctgttgtgcatccagaggtggaattggggcccggtaagtgatttgaataatttaataaataagttagagggctcagcaggcccagaacgagccattttgtcagctgcagcagtcattaactccgcagaggcctctggtccctcgccaggaagtttcttcactggaaactgggaagacagggtggtttagggttgaaggtccgacgtggaagagataagggctgagacctgagtcacttctcacaggcattccctcctcgtcccgggctggcccttgcccccaccctgcaactcctggttgagatgggctcagccaagagcgtcccagtcacaccagcgcggcctccgccgcacaacaagcatctggctcgagtggcggacccccgttcacctagtgctggcatcctgcgcactcccatccaggtactctgggccagcgtgggaaaggcagagaatgtctgaattcttgggtctcttcctaacctgattttgagagagccgtcatgaccccacccttatcctagccttattttctgcaatctcaatctgtgtggggtaggctggatatctgagggccttggcaattccttcctggaatatggggaggagaggagagaagagtcagggcccagacttgttctagcctatggtcttgacaggtggagagctctccacagccaggcctaccagcaggggagcaactggagggtcttaaacatgcccaggactcagatccccgctctcctactcttggtattgcacggacacctatgaagaccagcagtggaggtaagcgttgggcccagggaatgctgatgaagctgtcatctattattcttgggtagggtccatgaagccattctctcagggttccttaaaggggcctctatcctcctgcttcggacccatctcactcttatctcaatattttgttcccagcctgggtgcggtggctcatgcctgtaatcccagcacgttggaaggccggggtggtcagatcgcttgagcccaggagttcaagaccagcctaggcaacatggcaaaaccccatctctagaaaaaatacacacacataacacacacacacacacacaaaagcacggtggcatgggcctgtgatcccagctac

SEQ ID NO: 917055 - DNA, 4001 bp, Homo sapiens
gtaaagaagaatattacgaactgagattggatcgccaaggtataggcatgttacgtacgaccttaaaatgctaggaggaataacgacatgatgcagaaaaagacttctgcataaaaggatgacaaggccgggcgtggtggctcacacctgtaatcccagcactttcggaggccaaggcgagcagatcacgaggtcaggagattgagaccatcctggccaacatgtcaaaaccccgtctctactaaaaatgcaaaaattagctgggtgtggtggcacgtacctgtaatcccagctactcgggaggctgaggcaggagaatcgcttaaacctgggaggtggagattgcagtgagccaagatcacgccactgcactccaacctggagacggagcgagactccatctcaaaaaaatgaataaataaataaaagtaaaataaagggatgacagagtcagagtatggttaaaactggaaaatattatgtagtctagcccctttatttttataaaggagaaaattaagccccgggaaaagggcttcctcaaaatcactttaaagttatagcttcaggaatatggatctgcagcagtgcttggaatgcataagggaaagggagaggctagaatcacaaagacagctgaaagtcaagtcaattgtctaatagagcttcacccaacagaactttctgcaaagatgaaaatgttccaattctatatttattcaatatgttagcaactagccacatttgggcacccaaatttttaatttactttaaatccaatttgtcatatgtggctactgtatgaaacagcacaggtctaaagcatttcatgtccaaaaaggaataccttgaaaaacaattcacttctactaacagaagaaactaaaacaccatgaacacttgaagattgactagtatcacattctcttacctcctcatagcttgcagttctatcaatccggtgaataatatcaatattaacattccccagtcgttcagcaaatgtaagaaactggaagggaaagtatatttaagatacataattaattaaaatttatcagatctttaatatctatttgaatgctgcatgtaggcatctctaatcacaaaggataagtggaaaaataaactgaaaaacatacggccgtaaacaaatttactgcatcactgttcaaagataatgaatacttctatgtttgcataatttctctcagctatgtcatttcaaataaaatttccattgccagactggtgagcctaggtggatgctggcaattagtctcgctagatctattaggtttcataccctcccataagcatggggacctagcaaagtcgctgcaataaaagtgtttttaaacatatacagacctatgattgtatcctaaggaagacctggaaacaatctatcaaggggcaaacagagaaagcgctgtatatttgcccttagctgggaatcactcaccgccagccgactcgcccaattcggtctttaaagataaaagagcaggggagaattggtcctaagcaatctcctggaatagtgaatttaattctggactacaggaaattcccaggactggccagaccccataaaacatgggtgaaacttgctgtccacacttctttcctcctccaacccatgtttactacatccagtgtctccctctttcgccggagcctccaggaaagtgacacactcggcccagaagtctgaggcccctggagtctcgctcagagcctgtctcacgactgaggcagcggagacccgcggctccctgcctaagctcccgcgctcacccggtaggtgttctcggtcttgtgggaaacgggctttgtcttcatggctgcagagggccagtggcccgcgacggcctcgggagtgtcgaagggatgcaaccgacagtaaggaggggaaagcggctcacaggctatactctccgattcccagatgcccagactttctcacgtgcggcttgagcccctgggcgccgccatgttggagacaaggaggagcctgagtgggtcacgtggacggaaaaaagaacggcgcaggcgcaccctttggtggggtggggcctacaggaggcggggctgcgcacataagggcgggcgtttgggtgaggtgttcttttcactcccttcggtaaaggtttagaagacaaatgtattttcattataaaataaaacatacctgtaatcgttatcaactaacattactgtccctcactacgtacctgcatcgtgcaaagatcctttcatccataatttcacagtaaagcttattagggatgttaatacaaaggaggtactgcgtctatctatatatctatatatagatatatacttttttttttttttttttgagacggagtctcactctgtctcccaggctggagggcagtggcgcgatctcggctcactacaatctccgcctcccgggttcaagcagttctcctgcctcagcgtccaaagtagctgggactacaggcacccgccgccacgcccggctaattcttttgtattttagtagagacggggtttcaccttgttgcccaggctggtcgcgaactcctgagctcaggcaatccgcccgcctcggttttccaaagtgctgggattacaggtgtgagccaccgcgcctggccggtactgtgtatatttttaagccaatttgacacaagaggaaaccaaggttgtgcagctggtaactggcagtcttcactcagactctaaattttggtattcttaaccactacgctgtaaataaaattgaaaaatagagaaggagttttaagaaaaatcttttaatttcatgcacaaccgctgttaatgtttggtgtttttcccatcactttaatgtctacacatagcatgttgttaaattgtacagttatatatacatatatgtacaattttaaaaaataatttaaaaatataattatttaccccattttacattcattcattcattcagcaactatttcttgagagtcctctgtggaccaggtactgttctgggagccaaacgagaaaggcaataatagtattaattaattatttgaaaatattcacagccttcaattcctgggctaaagtgagcctcccacctcagcctcccaagtagctagggctacaggcatgcaccaccacacccagctcttttattattattattattattattattattattattattatttgtagagatgggatcttgctatattgcccaggctggtatcaaacttctggactcaagcagtcctcttggcttggcctcccaaagtgctgggattacaggggtgagccaccatgcccagactggaaatacttggtctgagatgcttacattttagtcaaggagtgatgttaagtagacaattggatatattgttgtacagagctcactgtagcagtctgggctgcagacgtgacttaaatacacctaaatacctcaagtgtgaggcatttgcgactgggaaagagagccagtaaggtagaaacagactagttatggcatggaagcagagctggtggccaactatactgcaaattcgaggatagagaagtggttgctggatctgacaaggtgaaggtcactggtgaccttgctaagtacagtctagttggaagaaaggaagtgaaatatgcatggattgaggaggtaatcagagttgagaaagtgaacataacactttcaaattgttattggcattatcacatcaacattttctgtgtcaccacagggttgttctaaatattttaatgcctccatagcatttatagatttttttataataaaatattgacgtgcctaatgttccattggctttcagtaggctaataattggtcttttttttttaaaagccttttatgggtcacagggaaatctaagaaagctgtagaacttctcccagaaagatgcaaagaagctcatccacactaaaatgtgcacgtttcagagagttagaagcctgcagttaactgagggtagaag

SEQ ID NO: 917056 - DNA, 4001 bp, Homo sapiens
atctcaccaaacatacttcacaggagcagtccaagagtaaatgcaacaaaaatgaaaccacaaagtcacctaaaaggaaattatttgactaattacaatagaactaatacccagaagctcattctccttgattaagtgaatttcttttagtctaaaaagatagagaataactcctcagagaggctatggtagcagattacacctgactcattccccatttgaagaatcacttttccatttccctctaaggtgcaaaggaggtaaagcaaagatagacacaaagtcatgggagccacaagactcttgtcctgccactgagctagctaagcaatctagctctcgacttaaggcagaaaattcaatgagtaggtagcagccagtgttggaagcagtccaggatggtagcaccaatgacaagattaaggtcagagacctcgtgatgccccgctagccaccacgatttttctgttgccttctgttcatcccacgtagatactatctggaagccccctccccaaaatgaaaacaactggaattctacggcttgcccaaaatgcatagaacactcatatctggttaaaaccatagaaatcaaaaagaaaaagtgaaatggctatgaagtatttgcaaggccaatttcacttactacttgttgggagttggaaacactcaacagtaaaatatctagggataattacaacccttatgtaacacaagtaaatctttcccttttttgtcacttagagaagcaacataaatacatctaggaccaggccagggtagtaatcagaaagaaaaatctgtattagacatattgaggtcttgacagagaagtacttcgtttgtttagccgtagttttccctcaagatcatgcgaagggggtgatgttgaagactgctggagactaaactgtgtgtgttggaggaaagggggaaagctcagctctccctatttctcctccaactatttggtaagactcggtgatagaaaaacatctcctatacgaatggccttggtatgaacagccgcttgggatgacaggccactatcccactaccccttgagtctttctgagctgctcacctggtgccagagaactggcagataagtttctgcagctttgctcactgccatgaggggggctagacatcacactttgggtgaggggtaaacaaatccagagattgtagggcaacataagttaccaactggcagttgcacccatgactgtctttcctgaggcgctgagtagtgatttagccagatgacagaaatacctttcgagtcccctgcccagttgtctccatccaccacccccagcccccgccctctccgagtctccactataccaaaaccagaatgaggcgccactcagacgagaggagagggtgcaatgattgtgggacccctgcgcccctgccccgcccgtggggtgctagctgtggctggtgcgagaatggggtgctggcccccctccctgggggtggcccggtccggaagcggcgcgcggtggtagttccccgcgttgctgcagctgctgcattgcgccattttccgtcccgcagaatcgggagcttggggcgagagttgtcaaggaggtgccgagcccccacaccagagtcaactcacatttttctgacagagagagtgagggtctgttcctctccggaggctgcggcgagacacccggtgagggacgctgcggctgaagtggacggaactgccaagctccgcctcgcgccgactaccccgcggtctagctgcgctggaacttactgcagctgccgcgccggcctccgcctttattagtgctgaccacgcctcccggataacggtgacaaccccgcggcccaatccatgcccaggacggtcgcccagcgctacaggcctagcccgccccgcccctgccaattgccagtcacaactctcctctcatccgactccggaaaggagcggttgctgtgaggatccttcagtgatcaatgcgaccatagtttgcgctccagtctggcggagggacggggcggggtggagatgaggtctgtcccttcggagggcgcttcagcagtttgttaggcatttgtggtgcctcccaaccaatcgctaggcagttactgaagaccgtgcccgcccctgccccaccccgcgccgggactcgcgcattcagctggaggcggcggcttcctggtgcgcgcccagccctggtgccctgctctggccctcgctccgcaccaccgccccgcctctaactaacgctctgagagggtgcaggagcctcgagacacagccacaagctcctggtgccagataccggatgcggggttccgtcccaccaaagcaagcacgaagctttcgttcattcgtttctttcaacatagccttcctaaattgaactccctcccaaacctgctccagtcgaggttaccacatcgactcagttgcccagaccagaaacgtggaaaccatcctagatttcctccccttcacctttacctctcccccagtaatctgccaaatcgagttgatttttccttcttggcattccagtgattatctcccctctgctcactattatccctttcctggactccatcagttggaaaattcaccattattttatgtcccgctaagaaaaaaggttacaaggccgggcgcagtggctcacacctgtaatcccagcactttgggaggccgagtcaggcagattacctgagatcaggagttcgagaccagcctggccaacatggcgaaacctctgtctctactaaaaatacaaaacagccaggcatggtggcgggcgcctgtaatcccagctactcgtgaggctgagataagagaatcgcttgaagccgggagccgacggttgcagtgagccgagatcacgccactgcactccagcctgggcaacagagcaagaccctgtttcaaaaaaaaaaagaaaaaaggttgcaaattatctgtgacaaatgctttccttaccacttagcatttttgttttacatgtattgaaaatatgggtttatatacataccgatttctatatttcactcttgtgcatgcataaaaagggaaatagaaaacaataacatggtaactatccctaaaacttcacagagactgattgttaatgattcacttttttgactcagtcttggatgtccactaatttccacgcaatgtagtcctctgtgcatttcataagggctttggtgatgcagcatttcctaagagtgttcctctccaggctctagagttttcttccaagcctcagacacccatttggcaagctttgatgctcatgagcaggtatgacaaatatagtttgactgctgtctgactaatagctaaagtgaaacatcccaattagaagatattgaaatgcaaaaaaacaaacaaacaagcacacacaaaaaacccaagtgcctcctaagatcaatgatacatcattctgcttccagtcttgccatcctttacatctattctctaaaaagtccaccaaagttatctatccaaatgtcacaagtcttcttaaggaaacaattgcacttggaaacataatgcattcatcatatgtgtttatcccattctcctcctgaaaccacatcaaaatggcaagttagggggaaaaatgacaatttgggaaaatttgcaaaaaattataagcccccaaagacaaaaagaatggggccgggcgtggtggctcactcccgtagtcccagctatttggggggctgaggcggaaggacagcttgagcccagatgttccggttgcagtgagccgagatcacgccactgcactcccacctgggtgacaaaatgagaccctatctccaaaagaaaagaaaaagggccaggcgcagtaactcacacctgtaatcccagcaatgtgggaggccaaggagggcggatcacttgaagccaggagttcaagaccaacctggctaacgcagcaaaatcccgtctctactaaaaatacaaaaattagctgggcatggacgcc

SEQ ID NO: 917057 - DNA, 4001 bp, Homo sapiens
tcagggcaccccaaacagcacccgaccttccataatgtttatacaaacaaagtctgatggcctctgccgaagaggagtaaagggttgggaaggctttctaactctcattttttcccctcctttcttaccccattttctagtccctcctttagcttggtaagggtccaagtcacagctgatcaagaccagccaaacccaaagccatgggacccagccagagcatagactgtgaattccccagctttttgcagtttgagtcagccccacagctggattggcctcccaggactcttctcaaataggtccagagaggctgctgagtgggggccacggactctgcagggagggctacttctgttcaacgatctctagcacccaaaacaaaagccagggagaaatgtgcagtcttactaccttctggtctggctgcatgccagccctgagactgtttcagaaagactcacagttccctccagcacttggacagggaagggacggcaggtctctcaacacacaacactcttagtccatagaattgaggctccaatgttcagataacccatttctacctcagcaaatcaccctcactccctagcctgagttaaagccttctttgccaacaccatgacttctctggccccagactttcctaatttcttttgctcacccccttcactagcagagatgggctgctaatgagaccactaggcagaaatggaaggaagggctggaaaagcctgcagtgctgggatgcacctccttatcccaggagaaagatgagatgtagatttatcataaagccactatcccttcacggtcacctcctgctagaatcatctcatagccattccataagcactgctgtgttgggtatctgagcccctgcccatgaggaagaccaccttccagcagggagctggagcagagctgaactctgcccaggagagcttctgcaatgctcagaaaatgcctgcccaactgcttgcctgggctctggcccctttggctgcaactgagcccagacaggaggctgactcactcaccgcacgcatagaggaggaggaggaacaagaggaggaggaggaggaggaggagaaggaggaggaactgtgagaagggtctgggcttggagacctaaggctcccccagcccaggctaggtctcagactctggtccctgggtgaagagaaggaggggcagttgtacactggccctggagaccacaggctgttccctcctagatacttctgaatcttcctcaccaccacccacagatccagggcacctcacttttcaaacagaaactactccttgagccccttcctcatttaaatgcttgcccctgagttcctctgaacatctattgacaggctgtcctgaaaaaaaatagggccaattaggtctaaactcattggtagttcaaagaaaagtaaaaaaaaaaaaaaaaaaaaaaaaattacttaaaagacccaactccaccatcacaggtgaccatacctgggccctgtaagacaataaataaggttacacaccctccactccagcagttctgagcaccatcgacagccaatcgctccttttcttattcctccactccatgccaaggcgccccgacagaagaaggaaacaaatacttcttgttgcccaagtgctaagcactgtgttagcggagcatttctcctaagcgccgaggatgtcgctgctcccctcgccagcctggcacgaacttcagctttctcaaacctcagtgccccttagtgtcccagcctcatggcacgacagcccggacctcagtagccaagtttaccgctgagacttagactctaatgctcgcagccgggcgctcaggccccggtatcccagacgccccgaccccgagtccctatcctgagaccccctttcccgctgctcccgggttcgcacctggtccggccggcgggtggacaagctgttccgcgctcccggcgcacacggctccgctgccgccttttgacaagcagagacagcccagcacctggccccgcctctcggtcaggccccgccccggccccgccccgcccctccgccccgcccacaggtccagtcctctcttgccaggagctccgttggcgctgcaaccatcttgacttggaatcaaccaccctataggccacgctgtagccttagatactctaactcgtgaaattttcatcgaccgtcgtccatagggcaaggcacgcttctgccctctgtgggacagagttgtcgatgattataggtgcggatacccgcttcagcctgtgttaatcggggatgcagccccccacccttcctgccgtggttctacccagcctgctgcggacgcctgagccaggtgcgtcacccccacctgggctgaccaggccaggacttcgtcgtccgcgggacgctggggggcgcctgccgactggcaccggcggctagctccgcacgaatgggaaatcccgggctccgctcgccaacctgttactgctgcagaacgccaggaagctcagcctgatcccacagattagggtaaaatatcccggggggccgaagtggaaaccggagttgcgtcattgctcccacccgatatcaccttggcagcgaccgcggctgaccacgttcccggcctgtcgcgaatctcacccaagggagctgagtctcagcttccctggtccctggtcccgagttccgccttccccccccgccccgtggcatcggcgtgaggggaaaagataaagactacctcctgagacctggaattgtggatggctgcggaaaactcaccacaggaaattttggcttaaagttattctctgcttcccttgactgtgtgataggcaccgctctatctgctagaggacaggtgaaaaagatggggttccctcttcttagaactcactgtgcagtgggagaatgtataaataaatagtaattacaacataatcttctggaatagaaatgctcacaaaatcatccagcagtcgatgacctcctttagccagggaagatattgctattcgcctcttacagaggaggaaaccatggctcagagggacaaggtgaaagggtgggaaattgaggcatagaaagtttaagtgatatgcccaacatgactcagctaatcaatgaaggactagtgctagagcccagcaaatctgctggtgcaatggtctctgaaccatttctgagacagctatgctggactacatcataaccagcccctcacaactcaataatagggttaaaagaaatagactgagattaaatagaaggaagaaccttccaacagtgaagtttgttaagcactgcaacagttcattatggaggtatcatggcaactttctgggaagacttaaacaaaagacagaagagaggcatagcgtttgattgaacttgggaatggaccatttattctgagaaacagatgaagtgcccctttagaggtcctgccagtctgatggatggattctctacctgtaatgaaagtaataggaaggatccccttgcccaaagcatcgtgggaaagctagcggtgattcttgtgggaagaaaagcataagaggaaatttccaaccaccaataccttgggacattctctgcaagtcccatgagcctctgaaagaggttgaacactcagaagtcacttttgtggtgcttgactggcctgacatcttgcaaataaaccttatcaaaagatggtggaagatgcgtactaagtattccgtagtaactgagagttagtcttttttcacagcctttgttggaggagaggtacttgtaattcacatgtgtaaactgctttataatttaaaaattctttggaatatcttacttgatctttatcatagccttttcagacatgaagagtaaaaaataccgttccattgtacaactgatgtgcagagttgtcaaggtttctacagctgaggagtgtcagagctactggacccagatcttctctctgcacatcccactgtttcatgctgcctctaaaaaac

SEQ ID NO: 917058 - DNA, 4001 bp, Homo sapiens
ggaaaccggaattggtataacctttctgcgtaagtcttaaatgttcatattctttcacccactagttctacttctaaaaattattctgaggaaaatcagagttgtagttaaaaataggcttatatcactgttgattacaatggtatttttttaaaaaaaggttatattatgatacacgtgaggggatattataatattaatgttttcagagaatgatgaatgggaaaagattcacgataaagtcaagtgaaaaatatatacaaaattctacgtggtataccttttgttttaaaaaatatcacacacacattgtgtcttaatatagaggctaaaaaattacacacacataaacacacatttacatagaaataaagtctataagaacacataccgtactgttaatagttaccatctttgggtggtgggataatggatgattttaacttgggggcttattttctacaataaaatgttccttgagcatatattactattatattcagaaatcaaaaataatgggtaaaaaaaatacacccatcagttacccttactctagaaaatatttctctctccttcagctaccacattcaatctataaacattgcctcgattttaacttacaagtgtctgtccaagccattattccattacgtctctcatttcatctcaggcccttgtcttccctaatgaacgcctcatatctagactcttcacttcggtaaaatggccacattttccactgcttcttcattgcagccacatcaagccactttacatagccaccctccacaccccgccccctaaaaatgcacaccaggtactttcacacttcccaagcttggcataatcagttctctttccctgtaatacattttctcctgccggtttttctaatccaattcatagttaaagattcacctcggatatcgcgtactgggtgtagcctctgggaggccgcaagaacagaaattaatccttcaatgacagtttgtacatatttcaacatttagcattctgtcctgtctgtgcctcgctctctcgctgtatggcatgggccacttcatttttaaattttcttaaaatctagttggataaatgaaagtaaagcgtatacatgcaatacacatacgtacaggggtgcgagttttgacctgtgtctgatggaaaaaaatggcatcaaaaacactcgcccgatttttttcattcaagatggcagagaacgtcttaaaatagtcccacacaaaagcactcacatctagagccccgagtcagaagaactggctacacctagcgcaacagcaaaggacaaaagaatcgaatctagatgctgagatgccctggccctaactacccacagtaggtcccacaaatagactttaaaccgtgttagaaaacgggcacctgctgccttcattccgagggccacgccttgacggtgaacagtgacctgaagcactctggatactgacccaaaaaaatcgcggatggaaaaggaggaggctaagttgtgactatctaaaaggcacgattcggccccgccccagccgggcgcagtcccccccgccgcacatccattcccaggaaggaagagacaccgctccagcccagagcctggcaaccgggcaccgtctgggaattctgggcgggcccgagatagaggccggccacggccagggcgcctctggctacacctgtcaggcgacgacggactctaggccctgaaatcgctggggttcggtggtcgaggccagctggagcgcgtcacccgatccctcgccccgggaacgccttgcttcctcgatttccgtctcgtccttctcaaacaaaggcaatccacacccaccgccattttcctcttacctcaaaaaccacctcttcgtcaaactccggtgtcatccttctccgccatgccacccgcctcagcacgatgggaaatgaaggcgggagtacaggcggcacggagctccagctcctgcccgtcccgtgggtccagaaaactacaattcccaatatgcctcgccgctcacgcccccttttcgagcccgcttattggagaagagagtgagcgtgtaagcgagagaggcgggagcgagctgaagctcgagccctccgattggaggaggctagggcttttgtctgccttttacggccgcgactagcagggggcgcccggagcactgctgatttttggagcccgagaagggcacgcgccagcggagccgaagagagcactgctcgtgcccgcgcctggctgtcagcctgccgctctgcggggcggtgctagtgctcgcccgcccgaccccggcggctcgcgcccgggagcgccgcagggtcgctagagtcggccgcgtcctttgtgtggcgctcaggctgcgccgcggggcggcgggacggaatgtgggcgctgcgggggcttttctctcctacccgaactgtgggaacaatggactgaaaggggaagatggattgaggggccgagcggggaagcgagctgcaccggggaatcatgacttctgcagccggtaagtgacggcgctcgcgctgccgcgggaaagtttgtggcgagcgctgctaggcttgggctcgcgagcaactttcttcgccggggtgggcgagttgtgtgccccgtacctttgccgagcacctcggcaagcgcggagctaatgggattcgctgccggctttctcgtcttttcctgcccagaggggctgtttggaaacccgggatttctcgggatctcccttccaagggggactgtgctgggggctctgcaccaggtgaaatgcgatgtgtgaagggcgttcgctcatctctccagcagtgcgaggacttcgcctttgcatgtgaaaatagtgtagattcccaagttaatagatcagttattataggtaaaggcagtgttctcagcgtgttcaatttggccactaagtgagtcgctttcaaccttgtatctgctggtaaaccttttacccattttaaagaggcgtagacattgtcatgtcctggtggttttacctctgttacctgagaagcagaggagttgagattgttgaggttttttttttttttttttttttgcttgtctgcacccaattacaattattttgtttgtttctacctgattagggtaaacaaagctttattttctgtctgcctcccatagttctttccccttcatccaaatgacaaagcctctatctttgtgtggattttcagcaattctagacgttgtgtttctgaacattcttaaggaacaatttctgttttacaaaataattaccaaagtggtgttacgttcacttcgtaagtacataggttaatttttaaaccagaacttatgtattaagtagagtgttatgggttattttacgtttttgtccacgttgaaactttcattagaaattttatagtgaaatagtttaaagcttcttctcaaggttacttccagaatcagcacttaagtatcagattaaattttcattgcttttcttggcatttgtttaaaattcttgcaacttgaaactgtccaacagcactcaaatgttctgatttgtattatttctaaagcctagatatattgtagtgttgcattgctccctgtgatcagattacaacaaacgaaacaagaagttagccaataggaaaagaaagcaagaagtgggtgttgtgtgggtctttcctttttgatgttatatgcacttatatgagatatctttataaactctcttttctttgccaaagggaggctttatacttacataaggtaaattattttcatcctacatttctgtgccttaccttcgttcaagaaattgatttaaattaaaagtggttggaaattttaaaatccttccagccagttttagctctttcctttttggaggtgtcaaatgtatttaaaataaccgtgtcttatatgtatcagttttcaattccagtcttaacagtttataaggaacaggcacagaagcatgtaatttcacatttatgtaaacccaatt

SEQ ID NO: 917059 - DNA, 4001 bp, Homo sapiens
agacaaaataataaaaacaaacacatttattcaggtaaaactggacctttcccacacttgaatttgctgcccacagactctggacactgtactgagtgttgaacgtctgtatcctttgccaaataaaatgcttttaatcatgaaagaactggctaatgctaaatttttcccagttctatttcatatgaaaaatgatgttccagtacaactaccctaaataagagggatcacttctcaaacaacttgagaaacattaatattttgaaaccatggcaagtaattatgtcttctcccatggataggtgtctcgaaattactgtaaacggattactttaaattggagtctgtttagaagcaaaaattaaaagtgagattaaagattttaaagaagcatgcaccataaatctctggctgccatgtctgtaagtccccctcttgaaaaggctgtttgtcatgcaatagtaataatcttaaaaatgcatagcttctttggtttccttgtaaaaataaaaaagaatgcaataaatgcctgtcagaggtagacgtccctttacagccaacctccatcaacacaaatatgaagataatcacagctccatttcaaacaattgattttttttttttttttgagcagcagcaagatttattgtgaagagcgaaagaacaaagcttacacagggtggaaggggacccgagtgggttgccccaaacaattgactttttaagagtcaaaggcacctttgaaaatatgattacaggccgggcgcggtggctcacgcctgtaaccccagcactttgggaggccgaggcgggtggatcatctgaggtcgggaggtagagaccagcctgaccaacatggtgaaaccccgtctctactaaaaatacaaaaatttagacgggcttggtggcgggcgcctgtaatcccagctactcgggaggctgaggcaggagctgaggcttgaacccgggcggcattgcagtgagccgagatcgcggcattgcactccagcctgggcgacagagcgagactccatctcaaaaagaaagaaagaaaatatgattacagctctgagtcctctctagtagaggcccccagtttttatgtaggaaggtctgaggggcaccaaactactgggggtgaaggggtgattgcttgaaggtggctgggggagactaggtaagtctccaacaccggcactctccccagaaaaatgtgtatattcacaaaaatttcccaacagtttcaatgagttcacacatcattaaggaatcctaccctaaagaggcgtagcaacccgtggaaagaaacagttccagcaattgcaagcgccaaatcccgccctctgagagcacacctgctcatctcaatggcagctagatgttatttcaggagcgaggagggtggtttattccctttccctagatggcaaagttaaacgggtacgaaattctgctcgctacttcctgttctgcattcgagaggccagcttccaccactacaccccaaccagcgggaggtgctttttgcgggaaacgagtaggaaccgtctggaaacggaggaccgtgcccctatccccggaacattcgaggtataggaccaaaggccttccctggctcgggcgtgcgtgtctcgtgacaggtcgggctgctagaggggcctttttaccccttggatggcctctggccccttggggccgggatacgagacctaggccagccgcacccagaggtggccgctcccttccttccctagacctcttctgggcctttcccaggccagcgcctgggccctgacgccgaggcctccgggatttcccaattcctcgccctcggcctccccacggctcccaacaacgcagcaccccacccgagagccaggccttggtcgccgcaactgcagccctcaccatcctgtcaccgggctccgctcagtcaccaccaccgtcgccgccctcttcctcaggctcctcggcgacccgcccacttaaccgcaaccaatgagagcagagggagacagaaattgccgtacggaggcccgcacggacccttctccgccgtaaagccgtttgggaacttgtggaggcggggtggtagagtgcagagacgagatcgcgaagctttgaaaagcgcgggcaacatccgggcacctgggccgtcgagctgaggcgcgccttccgagcctgctttttagggcggatggcagccatgctgaagtgcgtgatgagcggcagtcaggtgaaaggtggagcggcctttgttgtcttcccatttagcagagagaaaagcagacgttaataggtcgtccctaccattgtctaatttttcctctttgcctttttgcgcaatgactgaggacgcacgccctggccacagccccacccactcaagtccctgttaacttctgaggggaggatgaggacccatctcgtgtgacttagaggcagatgtaatatgggtggtatccgggaaatagagttgtaccatcgggccacaaactcgggatgctgaggactgcatggggaagagttgagagaaaaaaataatgcttggacagtaaaagtatttttgtgccaagagaacagcattaacctggttttttttttccccagattctaccatttttaaaaatgtatgaacttggaaaagtcactaaatctctttggggctcagtttctaaaacggaaacaggggtaatgacagcaccttcgtcacagagtttgtttggaggcaatgaaatggaaatgcgtgtaaagagcccagtaatagatggaatgtacaagaactattagtgttgtaaacggcgctttcaaaatggaagttaggccgggtgcagtggctcacgcctgtaatcctagcactttgggaggccaaggcgggtggatcaccttaggtcgggagttcgagaccaccctgaccaacatgatgaaaccccgtctctactaaacatacaaaaattagccgggcttagtggtgggcgcctgtaatcccaagctacttggaaggctgaggcgagaggatcgattgagcccgggaggttgaggctgcagtgagttgagctcgtgccactgcactccagcctgagtgtcagagtgagactctgtctcaaaaaaaataaaaaataaaaagaacattaacaatgtcgtacgggatcagactagtgtgttttccagccctaaatgtgttctgtggtggggaaatctggctgccctcaaacatcagagatgtatgttggatacccctaatttctctctcatgacttgttgtgacttggctatcaagctattaaaaccacttcagattatcttctccatgcactgttttcacagtttttggggggtcaaatacatttatctaaatcaagttgtaaaatacattagtatggaaattggtttgcacagtagctccatgcaacactgtaaacatatagaaggacaaatttcggtcaattttatcatttcacacactacaaatttattgagccctgactatgtgtctggcattttgccaagggtattatactgtattaaagtaatgtagcattagtctgtaagatactgttatttttgaatttctcttgagtcctctgaatgctgaactagtcttgtgatttgtttttattgttagagggaaagaatataagcatcacctttctttttctccatagtatttgggaaagcagttcaagctctatcacgaattagtgacgagttctggctagacccatctaaaaaaggtgtaagtaagaaagttaacagatcacgtatcaaggcaagaggagatgtttaaagatcccagtccagattgaatgttaactaggaaatccagaaattgtaattatccctttcactgtttatctttattttacatatctgaatacacttagagcatggtaaagttgaaaatatgcagataagcttgattgatttaaactggaagtcacaaactggtagttaagagactagctacggtctgcaggaatgtttgttggcctgcactgttt

SEQ ID NO: 917060 - DNA, 4001 bp, Homo sapiens
ctgggattataggcatgcaccaccatgcctggccaatttttgtactttttgtagagatgaggtttcactatgttgcccaggctggtcttgaactcctgacctacggtgatccacccgcctcgttcttccaaagtggtgggattacaagcatgagccactgcacgcggccgaataaaaaaaatttaattacctctgaccacattcatatccttagtctaaagaaaaatagcatccagggcaagcgatgctactgttggtcctgagaaaggagttaatcactgtcctgaacagaaagaaggaattttagttgttgtatatctgtgtcatggtatcattaaattgagccatatggaaattgtcaactatacaaaattaaaacctacaatataggtattacaaatcttattttggcaaaagaggattttttttcttttttttttttttttgagatggggcagtggtggaatcacagctcactgcagcctcgatttcctgggctcaggtgatcttcccatctcagcctctggagtaactgggactacaggtgtgtgccaccacatcacgctaatttttattttagtagagatgagattttgccatgtcacccaggctggtctccaactctgggctcaagcgagctgcctgccgtggcctcccaaagtactgggattacaccgcacttcctattccaccacgcctggccaaaagagaaaatccttaaaagctcagtaaattcaagtaactttccaaggccatatagaccttggaccatacagagtgaaagggagtgaggactccaacctaggactttttgacaccatgagtcattgctttgggcccctatgagtatttctaccgctaaactccagtatcatttctttttcttatttatttaaataattgtacattaacgtttagttaaaagaaataatacagagcgagcccctgtacactttgctcagtttcctccaggggtaacatattacaaccaggatactgacattgatacaatccatgatgttattcagatttcagcatccttttctgaattgaaactgggcccctatgatgtagactgctttcttctctcaaaggctgctagcacccactttacctcttggggttctgttctctacaagactgaggctccccagttcgacttttcacagttgtactgtcagtaacttagggtgactgataaaccctaaggggatgaaggagaggtgacactgtttaaaagaaatcctataaaatctctgatctagttcctgactcccttgtgaaaagggtgctactagagaagttatactgttttaggaggccaggttaaaagcccaaatgattacaacttctctcataacacgcgtgagcagcaggttgcaaggtgcaggtgtttcaagagagcttctaaggtacacgtatgatccctgtaatgaatggacactggaccatccacattcttggaccgctcacccgtccggtgcctcggcaggcagcggaggaaacacctgacgtaaaccagctcatcagctgccgggctatcacagtggcttactctgctctcacaaaacagtcgcggtgccactccggctccaggctgtacgcccagggccccccccttcatcgctgcctcctgcacaggggtgcaggtaaaagggccctgaggctcgcctccttggaagccccaaggacctcataaaccgcgaactcaggcggtcagggaacggattaaaccaggccggaccaggggaggcgagggcggtgtcgctgcctcccgcccctcaccttgcttcctgcgcacttgtccaggaactcgcgcagctcgcgacgcaccgcctcgcgcaacacgtttaggttcactcggccgtaggacagatgagccgccatcttgctccaccaccccctgccccacaacgccaaccgagtccgccggttcctacgggaggaccacggacgcagtcacgtgaccaaacgtccacgtgaccggtacggcagcgcacgccaacccggaaaccggaatctgctgggttcgggttctacctagtctggccctagtgtccgcctctttcttctaccccggtggttattcagattctcgccaagacccagagcgcgtttcagagtctggtcactccaggagtcgtcgggcgctgaaaagcgattttaaagatctggagtagaccgggcgcggtggcttacgcctgtaatcccaacactttaagaggccgaggtaggagtgatcgcttcaggccgggagtttgagaccagcctgggcagacttcgtctcaaaaaaaaaaaaaaaagacattgactctctcttgtcccttttaaaaatcgcgaatttttatttgcagcaaaggtacttgctgcaagatgatatcttaaggctaaacttggataggaaaaaaaacttttttttttttgagacagtgtctcgccctgtcgcccaggctggagtgcagtgacgtgatcatagctcactgtagcctccacctcccgggctcaagtgatcttcccacctcagccgccagagtagctggaaccacaggtgcgcgccgccacccactgctcaaatcttaaattatagcagtcagaagtttcttagctttgcactaatcaaggctgttttaatttctgagctaaaatgtatcaatatggtgaggagtcgagggaatcttgagtggacttttttttttttttttttttttgggtaatccctaacagacttttacagtgacatgacatttcacacaaatagtattgcttctggaatccaggtcccaccatttgcctcagtaaaattccatgttacctctgagttgtagtgaggatcaatgagggtatgaatttcatcgtgcagtccacgtgagaggcttaactgggtgcctggaacttaattgctcaataaactattaatattagtaggatatatgcgttttgatactttggggtggaaatgggcctttgggatctggtcaaagatgaaaatttccttctttgagtgcaaagcttcctttttttttttttttttttttgagacggaatcttgctctgttgcccaggctggagtgcagtcgtgccatcttggctcactgcaatctctgcctcctgggtcaagcgattcttctgcctcagcctcccgagtagctgggactacaggcgcgtgccaccacgcccggctaattttttgtatttttagtagagatggggtttctccatgttggccaggctggtctcgaactcctgacctcatgatccgcccgtctcggcctcccagtgctgggattacaggtgtgagccactgtgcccggcctcctccagcatcttctatacagtttacattatgaagcacttatcatagagtctgaacaagcagagtgatatttgtggatggtgcagaaaagcagccactcaaccaaaaacttctgttctcaatttgattccagcaaggacatttagattttaataatttaacacacatggaggccgggcacggtggctcacgcctgtaatcccagcactttgggaggccgaggcgggtggatcacgaggtcaggagatcgaaaccatcctggctaacacggtgaaaccctgtctctactaaaaatacagaaaattagccgggcatggtggcgggcgcctgtagtcccagctactcgggaggctgaggcaggagaatggcgtgaacccgggaggcgaaggttgcagtgagccgagatctcaccactgcactccaggctgggcgacagagcgagactcgtctcaaaaacaaaaacaaaacacacatggaaacgcttccatgctttagttctcaacctggttttcaaggtggttctcagcctcaacagagatttatttttttatttttttatttttattattttttttttttgagatggagtctcgccctgtcgcccaggctggagtgcagtggcgcgatctcggctcactgcaagctccgcctcccgggttcacgccattttcctgcctcagtctcccca

SEQ ID NO: 917061 - DNA, 4001 bp, Homo sapiens
caactgaaaagcagagaaactaagcaaagattttttctttggagacatgaaactcattcagctaagaaggatggattttatcacttattattctccaaaatggaaggtgccacatggagaccataaacggggtacactgcatcttggagcaacgttattatgtgtcaagttacaaagcccatgaatacaaggggtgtattaatggaaagactgataccatcttactacagtggcctctctgtagctccggacaatgatctgttgagggttttccagggattttgaatgtgcaacctccatacaagctctcttttaagggggctggcttggtgctgaacaatccctcttcggaaagaaagccaaaagcccccacacgggctcctgggtgagaggctcagcactgtaggcgtgggaaggctcagacttcagagacataaaggagtggtaggtgggccaggaagagctgggattagcctgggcccacctgcctggaggagaaccagacccaaaagatcagactttccgagaatgagtccaaatgggttgagagaaagggagcacacactgcaaatctgcaaggatgaagtcagttacccgagagcaaaccacacctcaaggtgtgaaggaagataaccagaaacaggagctggcacatgccttccaggggctgggcaaggcttgactctcagaggtgagggttggcagccagccccaaacccccattttaacttcttcctgaaactgctccaggaaccttccttagtcccagacacgtgggacgcagtggtacaaagccagccacactaaatttcccaccttcccttcctcggtggagggggcaacccttacagaaaaacgtatcctgtcgccacccttaggcccatccacgaactcccgtaactctgctggggccacttcaaaagaagtcagactccaggggcattattgggaccccttagatacatggaaccttcaaaccttaccctggctatggtatgaccatggactcctgcctccaaaccctgggctggggaccctcgcccaacccttaaagagcctcagaaccacctcatagactcagctacagaccctcagcctcccgaacccatcttggaaccctcaatcctctcctaagagtcctatttggatagtccactcagtcccccaaaacctactctgatcccctatagctgcctcagtccccctggttgtccccaacctttcctctcaaaggaaaccccccaacctctaccagatctagctcttggtccccctcagtcacccctaatcctcgcctccgactcagcccttattactctccccgctcctccgaccaaaccaatctcagatccccccagttccgtcctcttccgcctagacccaacgatagcactctaatccccaaattcccattccaggctccctaatctccacttcagacccagccttaagtcttcagacccagccttaagtcctcagccccacaaaaccttgtctcaggacccccaatcggctccccaagccccgtctcaggaccctttttcccgcctccgccctagtctcggtcccctcagtgcctcaaaccccctctcaggccccctattcctgcctaagcaccagtcgcggttccctggctcccgcaccccgccccaagcgcccccatttctagcccagtcccctcaacacgaccggaggcgccgcggtcgcctccgcctccggccaccgttcgaggagcgaaccccgctcgaggcctcacagccgccgccttaagcccagctcggctcacctcctccatcttctgcaccatctccgtcagctggccctcgtcctccagcagctcgttgagctgcaccagcgacagcccggcgaaccgggcttcgctcccggcgcccgccatccccacgtctcggccgtcgtcgccaccgccgctgcggccaccaggctccgccgaccggaagcgccgccctcaagggccgccccccgcgggggggacacgtgacgccagccctgggtcgtgacgtcatcaccgcgcgggcgggcggacgtgacgtaagtgtcgcggctcgcttggagtggaatgtgtcagggacagtcgggacttctaaagggaggggaagggccctatgattgggctgtgacgcgtgagcgcattaatgacgtcactgcggctcgggagagcgcgccatgaggtcataagagcctttttcctccaggaagagagataccgcgatccaaggaaaacaggcagtgggaaggaagttcccgcagcctgtgagcccagcccgatgcacggaacccaaaagacagagacttcatggggaaacaactttaggtgtcattggttacttggaattgtggagctgccacgtcattcatttaacaaatatgttttgagacctactctgtactgggcattgagtatacagttctgaataaagcaaaacggacccctgcttacatggagctaacagaatgaaagaggacgcaaacaaaacaagaaataagtaaaataattaggcgatcacaaataagggaatggacactgaaataagaaaataaaaagacctttagggtagtaagagatggcactttcggagaaggtggcgtctaaggaaatgtgaaggatgagaagggaggaaccagccaccattcctgtaggaagctcaaggcagcaaaaccagcacgtgcaaaggccctgggacaggactaacttggtgcattcaggaatgggaagaaggccagtaaggctggagcattttgagcaaggacccattgagtggcccctttgcatcacctcagaggaaggtgcccagacatccaggtgggccaacctgtgctctttcagaaacaacacgatttagggtgcagtcgctctcagtctctcagctaccgggaagcctcttaagatccaggagcctgggaactcattatcctactttggaatctgtcacagttctagttagaagaaacctaaggctgaggttaaccatgacagccccctaattttacacataagggaactgaagccctgagaaggggaaattttttgggcttttgctttgtttctgaaaatcaagtaattggcaggtctcctggctcccagtctggcgtccaccacgctggcatcataacacactgacctcgtctcataactcagctctgaacacagtcgaggcattcagcaaatgcttatcggcagacttaggggctttgtgtataaagctgattcttctgcaactccatgggtaaaacataaggtctgtgttctccatccatacgttaggctgggctctgccaacctcttctctccttccagcccgttgtactaagggctcgtgtttgcagaaaaatgatgaaagttagaggaactattgctttttttattttttgagacagagtcttgctctgtcgtccaggctggagtgcagtggtgcgatctcagctcacctcaatctccgcctcctgggttcaagcgattctcctgcctcagccttccaagtagctgggactacaggcatgcgccatcacgccaagctaatttttgtgtttttagtcgaaatggggtttcaccatgttggccaggttggtctcgaactcctgacctcaagtgatccgcccacctcagcctcccaaagtgctgggattgcagacctgagccaccccgcccggccaaaagaaatgtttcatataatccgtaagctaaaggtttttttttgtttgttttgttttgtttttttttttttttgagacggaaccttgctctgtcgcccaggctggagtgcagtggtgtaatctcagctcactgcaagctctgcctcccaggttcacgctattctcctgcctcagcctcccgagtagctgggactacaggcactcgccaccccacccagctaattttttgtatttttagtagtgacggggtttcaccgtgttagccaggatggtcttgatcttctgacctcgtgatccgcccaccttggcctcccaaagtgctgggatta

SEQ ID NO: 917062 - DNA, 4001 bp, Homo sapiens
gtgcacgcctgtagtcccagctacttgtaggctgaggtgggaggatcagtgcagtgattgcaccactgcactccagcctgggcaacagagcgagagcctggctcgaaaaaaatagctggccatagcagtggagataggttccccatggggcgggtggcagtcagcctgaaagccaggtcattccagcaggatgacttcatcccagggttcttctcacttcccaggttcctggtgttcatcgtgcaggaaacactgcaaacagctggggagatgggaatacttgacaaccacctttcacgtccagagatgaccaactaggaactgtcctcccccatcacccacaccccagcacagtgattactcagccaaatgcctgcagggccagcaggtaacacccatgactgaaggtggcggggcaaatattacaacagggagaggtggaacaaatttgggctcatatgccctagataagaggatgaccactgcccaattccaactgggaaagcaggccccgtgttgccagaccttcagatttttccagataaactggaaatctagagatgttattgtttttaaatggttggttaaaaaaaaaaaagcaaaataaaattgtatgagcctaataattaggaactcttggcacttgctgctaagaagctccagcatactttacaacccatctccagaaacgtgcaagaggagacccgttgggtggagcagacccgggaacacaaaaagtagcgctctgcctgcatcctggcaaacttcaccacctcctggctccatctcctctccctgcaccccagcctcctcccagcttgtcacactcccagcacacagtaggcatgcacagtaggcatgctggtgaattaaattcaaatatatataaatagttcaatctttttacattctacatatttttgtaagcacccctccaattcttttttcgtagcaaagcagaccatagatgaagcatttcagaccttttgtcaatcatgtcaagtgtgaggggaagtcttttgtaagtcagccaagtatttcaaaataaaaagcttttccaaaagtaaaggcggaagaccccgctttgaaggcgctggtcggcacaggaagacttgcaaaggtgtgtagggaagtccaccggttacaggtgtaaggcgagttcaaccttgggcagagggaggagaaaaataaagtgggagtctcgagtttgagcaccagcgtatcagttactactaaaaccagaacgcgaatttacatccgacgcttaaaaaaaaaaatcactttcccggcacacgtgcctctttactttgcccccgcacgtcggctcggctcggctcctctgcagcctcaccggctgcccaccccaggaggctgggggtatctcgccccgcaccgggcgcccgggaaaactccttcctgcaaagacggccgagctgcgagcaggaaaccaagaccctcctggggcagcttctaggctggggccaccacggatccgggcggagtcggagggaattgggtctctcgctgtcccctccccaccgctgactgggaaaactcaacttttccctccagatcgcggccccttacctacggcgacccagccggccaggagcgccccgaggcagacgaggacgcggggctcgggcgcactgccgcctgcggccatctcgccccagatcccggctcaggaaacgcaggctcgggctgggctggacgtgtgtgccccagggccccggggcccggggtaccgagggctcctcccaggtcctcggaacggcagagtggccccacttcctcggcccccaggaaggatgcttggctgagccgagtgtccagggccggcagcggagctcggctgcaggctcgggtccccgctcccgagcgccctggccggggagggagggcgcaccccgccccctgcgcccgccagcctactcctgccggcggaaaacaacaggagcgggatccctcccgcctcccagccaggcgggagcccaacttcctctaccttggcccgggaggagggctttctgccgagggcgcgccgagccgggtcccgccgggccaggggcggggcgcggaggctgggccctccccagtccactccgcccgggacagcagtaccgagtcgcggggacagcgggcgggacggagccctgcagctgccgcaggacgcaacccccgccgctgccccgggctgcagaacccggaggaagcggttgccaagctgcagaacgcaggacccccctggcagtccccgctgagcgtctcgagggattccggtctgtgtccctgggcgcagggcgggcgccaaggccgccatcgcttcctttccttaccctctgcaaaagggagccagagaaagatgatcccctgactttcagccaaagcagccacgagactccggttctccagtgaactggctgggaccacacagtgacagcgagagccaaggagtccccaggacgtgtttctcaagagttttgtttttgcttttccccttttagttctcccaccccttacccagtcagattcccaggctaagctcctctcttccctgccatgccctcatcccattctgtcctggggaaaatgcggctttgatatcctcaggaagagccatccataaaacagccctaggagaaacttcctgtttcaaataataataatatggcagggcgtggtggctcacacctgtaatcccagcactttgggaggccgaggtgggcggatcacaaggtcaggagttcgagaccagcctgaccaacatggtgaaaccctgtctctactaaaaatacaacaattagccgggcatgatggcgggcgcctgtaatcccagctactgggtaggctgaggcaggagaatcgcttgaacccagcaggcggaggttgcagtgagccgatatcacgccattgcactccagcctgggcgactgagcgagactccatctcaaaataaatattaacgttaaaaaaaaatcattagttctgttgttcaacggtccccttattgaaatgcttcttccatgaggaaatcctcttgaaaccactttaaaaaaaaaatgtttctcctggtgaactgagcaatgaagctgaacagttctgccttttttacttttctgttttttatttttttgagacagggtgtcactccagttgcccaggctagagtgcagtagcacaatcatacctcgctgcagcctcaaactaccaggctcaagtgatcctcccacctcagcctcccgagtagctgggactacaggtgtgcagcaccacgcccagctaatttttgtaattttagtaaagacagcgtttctccatgttacccaggctggtctcgaactcctgacctcaagtgatccacccgccttggcctgccaaagtgttgggattacaggtgcgagccaccgcgctcagcccttttttattctttgctcaaatatttttaaataactgttcatcagccgggcacgttggctcatgcctgtaatcccagcactttgggaggccgaggcaggtggatcacctgaggtaaggagttcgagagtagcctggccaacatggtgaaacttcgtctctactaaaaatacaaaaattagcccggtgtggtggcaggcgcctgtaatcccagctacttgggaggctgaggcaggagaatcgcttgaacccaggaggtggaggttgcagtgagccgagatcgcgccattgcactccagcctggggagaagagcgagacttcgtctcaaaaaaaataaataaataaaaaataaaataaaataactgttcatcagattcttgacaggaattttgtttgtttgttttttgagacggagtctcgctctgtcgctgcaagctccgcctcccaggctcatgccattctcctgcctcagcctcccaagtagctgggactacaggctcctgccaccacgcccggataatttttgtatttttagtggagacggggtttcaccgtgttagtgtggggaaaagcaagagagatc

SEQ ID NO: 917063 - DNA, 4001 bp, Homo sapiens
agtatgatgcagtgcagtggaaagggtgttggcctggaacccaggaagactgacctctgattttggctctaggagactttggagcagtcatttctcctctctgaccctcagtctcttcattgtaccatgggaggttcaacaaggtgacctccacaatcttatcgaaaactaataatccatccaagtcttggattccttcctcctcatcctgtgcccccataatataggacagttctgtgccacctttatgcttcttaattccccaacaggagatggcatttgcaggcacctggtctctggaatacaagtcaagggtgggaactccgcagaaccttcacaggaggcaaccaacagcctaagttagggctgggcacacaggtgagctccagacacacctgctgattcccggaaaggtgtcactccagatggccctggggcaggaatgagaaatggaggcccttttgtacctacctggcaaaatgagggccagagcaagcagcaccccggcaaatctggcaggaatcatctgcaaagaagcaagagacgtgagctggtcattgctgcccaggtaggcggctgctggtgtggcgactatcagggcatgcagtagcaaaaacatttctttaaagcaggagaaaagattgatcctcgtgacccccttttcccctttgaacatggacttctggcccccgaaaaaacccctggccagtgccaggcccaagggtaacaatcgctgtgagctgggacctgtgggcacctttccacagacagcagtcccaggcccaagacaggaggaaaacgctgccttccctccaggcccgctgggcctcacatccctgcctcctgaagcagctgggagctaacacacacctcattccttcctgcctctgcatccaaactggcgagtaggaaccgtcttacacttgtgtgcccaccacagcagcccagacatagagaatgctcaggaaccaccaacttgacggtttgcttgttggcccctgactctgtaccacaagtgccttcacaagagcaaaggctgtctcccttgcctccaaccccagcacctggcaagatgcttagcacccaggagatgcccagcaaatgtttgctgagttcatctgaaaaaatggacaggagtccagcggccctggatgcaggcagacttccccactgtgtgacccccaagagagggacaattcatcctggctggcagagcgtaccccaagtcacttagagcccctgctgtagcccctctcctcgggaaaagttgttaaatgaagtgcagaatctgctgcctgagattcactgggggtgactcccttcctacctaaggtcccatccagccaaaggtgaaatcaagccaatctgtgatacatctgtggaaggaacactgagatgtcagatactgccaggtctcggtctccaagcaggtgtcccctcccagtcctaacacgcaggtacattcagctgctcccaggttctcagaggtgagggcaaacttcattccaactcatttgagtgaagtactatcaaacagtaaaacccactgcatgaagaaaagcagccccaggaccctcagaggcaagtggaggagggagtattaggatcatccctggctgaattgaattgcccctccaaacaaagcccttctagtccagcgacagagaactccagctccccaggagcagggatcagtcagtcctgcatcttcctcccacaactgagccagctctccttccaaaggccataccttcccctgcaaatgagggctgcggctatctccaaggtccctgggaaactcagctgctggacaatggtgccgcccaccctaggccatgctctcagctgctgcaaaggctcaatcaggtctgctacagctccggactgtcttgctgttatgtagcccaggggctgtggagtccccactgctgggggagataaagcccaagctgtgacatccaccaaccaccctccctttcccaccacaatagctgtgagctgccacaacaggggattggcctccttttaattaccaaaaggaaacaatgaaaggaaatggtattagaagtacctccaagctgataaagctttgtagagtttggagggagacctcctggcagctgccttaattaactgccttgccctccccaaacaccccctatccctacacccccacacttgatccctggtcttcctagagtgccccacctgtgtgggataaccaggaatgctggttgtttcagggcaagctgatacaggccagggggaatcacagtagaacaacacagcttcctgatccagcttccagggctggactccagggaagttgagaaaaacacctcaacctgagccaattttgctgctgtgtttggaggaaggggagtactaacacttcctatgcaccccaggtatgaaggatccggtcctggccctgacaaaaacagtccatttggatcctggccagggttgaatggatcggctaaagatgaaggtcttggccacaagcctaagcctttgtaaaatggtgaaggtggggagtgatggtttgagtctaatacttctactgttgctacattctaataattctaattctcaaggacatttccacccacttctggtaccctgatcttacacacacacacacacacacacacacacacacacacacacaattcttcttcccagcctcccattcccaaaagcctaattctcaacaccatctgctaaactaattcctactaaaataagtaactgatgcaatgggcagcggtggggggaagatgactctcgtgctgggattccaggcactgagacaagcaccctgaggcatgtctgggtatggaagacctcctcactgcttctccatgatacctcctgccctaagactttgagaaaccactaggttccaacctcctcccttcccacatacctcgcactctgctactccctttaccgccccaggagaggaagatgcacactcccaaggaagaaaaatggcaccagaggcagaatcagcatgagacagtagaaaaggccattggggggccgggcacggtggttcacgcctgtaatcccagcactttgggaggccgaggtgggcggatcacgaggtcaagggatcaagaccatcctggctaacatagtgaaaccccgtctctactaaaaacacaaaaaattagccaggcgtggtggcgggcgcctgtagtcccagctactcgggaggctgaggcaggagaatggcgtgaacccgggaggcggagcttgcagtgagctgagatcgagccactgcactccagcctgggtgacagagcaagactccgtctcaagaaaaaaaagaaaagaaaagaaaaggccatcgggatttccacttccagctcttatttaaaaaaactaaataactaatctgaaaaccctttcattacaaaatatctttaaatgctgtgctaaatacaacaaatgttctttaaatccacagttgatctgggaggaaagtaaggaatatcttaaagggtcaatgaggaagaggagcctaaatgagcatgaggcagggtaggcccatgggtggcctagcgtaggccagtctgggaaccctccagactggaggccgcacattacaagaatgggcagtgcagctacgggcctgacccagagggagaactagaacggagatccctgcaaaagctgaaagtttgaagggaaacatcttccaaacagtggaccaggaaaaaaatccatcccccaacctagaagataaggaagtttgcctgtctccacttgttttggggtggggtggcggggggaattaagtctttttttagaatattcttttctttctttttttttttttgagatggagtctcgcactgtccgctgggctggagtgcagtgatgcaatcatggctcactgcaacctctgcctcccggcttcaagcaattctcctgcctcagcctcccaagtagctgggattacatgcacacaccactacacccagctaattttt

SEQ ID NO: 917064 - DNA, 4001 bp, Homo sapiens
aatgtatttcttcctttttctagtccctaccaatctctgaaaaaaaattcctttaattagaaattctgtgagactgttctttccttagttttgactttaatgtccaagaaagatggcatcacctttcttgaccatgaaaatttagatctctatcattcttcagaaatgtgatgagtgtgaagaccactttgaatatcctcaagtcatcagtttagcttttttcttatggatcacagcactgactttgtcaactgataaaaacaactagaaaatgctttaacgatatggcacaaaccatgaacatcagaattcattagtccttcttctataacctccctttattaacatgtaattgtaaaagaagaataagaagggaatgggggtaatggatctaggctcaaaacacatacctcacctttgcctctctccatggtttttcttggcatgtatgctgtacattctcaatacttctaagacactaaaaactcattaatttaagcatatttaattcagattcagttctagttcagatataatgcttgactctcaagagttcaaaacacaactaaaaatgcaaatatttgaaattagtgctatactgagagctccccaaaacttaaatattaagacacatatttttcttactaagacctgactcccaatatatatttcttaaggtaattaaagggaatacttatttttgtttgaggaaaaaatattttgtaagctaaaacttttattaacacagtaccctattacatgacttcttcctcttattccaaaataatggggcttaattttttgaagcgcagtctttccagtaataaaggcggacaaatttgcttccttttgcaagtagacactttttaaaggtaagaaagggaagattttgtcagcccagtttattacagttaatgtctctttcaccaagtgtccaactgccccgaaagccagatgtttcagaaagccagatgtttcacagctgttctggtggcaattacttcaagacagcggtatcaaaggctctgatttttagcttcctcatctaaaaaatggggacatcaattactttataacaaagctctgatgatacaatgagattacaaataaaatatcctgtgatgtttgactcactacttaactaaaatctttataatggatccatattcctggcctagctaccatacaccctgtcaagtggtttccttctaagaaaaactggggatgggggggttaggggggtgggagagcagcagggagtaggaggtagggaaggaggaaaacaagcaaaatcagtacatatacaagctctcccatctttgattgcctgcgttttttgtgctttcctttctcaagtttcctcaggctcatgttctgaatctcctcccccacaaatgaaacacaacggatacgaattacagagaattttacggaagacactggagcttaagtctgcagattagttttttgtctacaagcggaggcgactggaaaatcaagccaaataagcgttggataactctaaacagccaaagaagcttcaatgggatagggtccaggttcaccaaaggaggcaacaccagcaactgacgaaaccatagcgacggctgaccgaccatgactcgaggtacaagacgtcaaacctaaggctactaatcaacgtgcgtaagaagcggccccaaccgacccgggcgatgccaaccgcgcaaccactggtcgccgcgccaccccaggcccaggaatagcccagtccgcaacagggagacctcaaccagggagaggaggagcggggcaaaggggctgggtgtcccccaagccgctgcgcgggacgtggaagggacgaaagaggtgaggaagagtagtaaatcaattcaatacactcacacttctgctgtgctcccaggactacgagaagcgggtagggggcgactcccggcctctttcacttcgtaaaggccttcaactgggtctctcggtcaacccctcagctaccgccatcttgaaacctcgcgcccctccgcactcctcacgtcatttcccattcctctgtcccgccttctcttagcgccgcttgaccctggaaccatagagaatacccaagaattccaggaccagagtctcttccggttccatacaatactcaattggttggttgtcggctaagagcccgcctcattgcgctcatctagtacaataggaattagaagaagatagctgctaactgagtggctgacggtcctgtctctcgagttggaggcatcttgacttagttgctgggagcctggtacgttgagccgtccgagaacggtacattctgcagataaagaagcgttctgcgttttctgtcttttggaattaccttagtttttgcatttttctgtttcttatgacccaagcaggtgcgatcctttaggggtgtctccgtgtgtaaacgaatacccagataacatttgccactgagtttaatccgctttgtaagcatcaggttatcccatgtgagcgcctagtacgtgtggaaatttaatagacaggcagaacagaacgtttgtagaccacctgaacaaataaattagcacccgtattagagtcgcagattgcttatatgggcggtgatttattatttgttagtagtgttttgaagaagaaatacggggatacatatgcagtcggttttaagttatatgagtggcaaggttgatatatattggctatattcccgactggtcttttcaccagccaaaagtcctctatgatgtcactctacgtacgggattcttcacttaactctagccttcgccctttccctaccttctatcccctctttccgtgagtcagcccccacttatttcccttaaaggtaagtttaaacatttaaaaaactatcttagaggatacgcttggttatttctaatcttaacctgactatcccatgtaggaaggctattcttaccaccagttataaatatttcaaaatattgatggagatacatactaatttttagcagaatctttaaactgcccttgaaggtataagatcggtcctatacctaaacttacctttgtgttaggaaattcttgatttgattttagactgaatttgagtgtcagaaagcaatgacgagatattgtaggttaaagctgataaaccaggtagtacataaaaaagaaaataatcttgaactgcgaaggtgagctaagttgtaatgttttgcaactagttttttttctttcctaacacattagtgatcatagttttgcaactcgttttgaaaaacaatgcaagaagagaaagagaaaacagtgtatgttggaaatattaaagtctttcatgtagctaaaattttatatgtagctactatttttaagatatgctgagcagtttttatttcaatacatttcttgtacttggatgggagaatcaactataacaaacacagtctggcatcaacagcatattaataattttgtcagtatagactaaaagagtcctcatgggaattattggttggcaaaggatttagaaaacaaacacatctgcagagattcagcggaaccattaataggcttccatagcctttggcgttttctaaaatcaggtaattagtgaaatggcccacctaatgcgtcatgtagcaaaggcagctgcctcctttttgctagtgttgaaaatgaaattatattcttttttctgaaagcttataataaattatgactttcttttaaatgacaaatgctttgagtagtgaccttctattctgcatcctaaatgcaatatgtgtagctgtgttttgctttcttgtcttctaaatgtttcagtgtttgaacattcacttgagcgatatttaattatcacagttggtcagggttgattgcagtgactgaaacaggaccttgatgtttttagttttgatttttaccattttcaaatccatccggtttacattgtgtaatcagtagacgtttacagatcagcttcctgtcctaattgaagcacattgtta

SEQ ID NO: 917065 - DNA, 4001 bp, Homo sapiens
gggcttggcggtgggcgcctgtagtcccagctactcgggaggctgaggcaggagaatggtgtgaacccgggaggcggagcttgcagtgagccgagatcgtgccactgcactccagcctgggcaacacagcgagactccgtctcaaaaaaaaaaaaaaaatacaaaaagcctggtgtggtggtggtgcctgtaatctgagctactcagaaggccgaggcaggagaatagcttgaatctgggaggcggaggttgcagcgagccaagatcatgccactgcagtccagcctgggcaacagagcgagaccctctctcaaaaaaaaaaaaaaaaaaaaaaagtcacatttgtgggaaaccttttttttttttttctcttgagacagagttttgttcttgttgcccaggctggagtgcagtggcacgatcttggctcactgcaattactgcctccagggttcaagctattctcctgcctcagcctcccgagcagctgggattacaggcgtctgccaccacacccagctaatttttgtattttttcaatggaggcagggtttcaccattttggccagtctggtcttaaactcctgacctcaagtgatccgcccgccttggcttcccaaagtgctgggattacaggcgtgagccatcacgcgcagctgggaaatcttaaagtatatgtatttgtggcccagatcttaaaaatactgatccagggcctgtcaactttctgggaataaacaccttgtagcctttttactcatttaaaatatatttatattcccacaggcagcaaaatgcataacccacatattagcaacaattctagaaacaggaatacgagaagaagcagggtagcctagtggttaaaagcaagggccttgctgtcagcttgtcctagcattgaatcccatttccaccacgtacttgctctgtgaccttgggcaagtcactttacccctcagagtctgcattttctcatgggcaaaatgaaaagaataatcctaaattctagggttgttgtagagaagtgataacatatataaaatgctcatcacaattctggcacatacagcttgaaaaaatggtagcagttgttattatttgagagaaaagcaaccctaatgtgcaaagaaatgaacagtttgaaagccttctggcatattctccatttattccttacaacaaacaagagtttgaactaggaaaacaataaggatggatactttatccctaaagagttggaccccgaacaaaaaaaatccctacattttcagtgacattagaataagagaactcaacactttgaaaataaagtcccagagagtacagagtagaaaaggtatttctatttcttaatttctttctcagcactaaatgtatcagctcctcaaattcatctctggtaaaaaaaaaataataataataataataaataaataatgaatggataaatgagtttgaggctctgagaggtgaagtgacttattcaagatgacaccgctagtaagaacgagatttctctggcacttagtttctccagctgaaaaatcactgctctgaatcaagtctagggctctcaccaccgagcctcttttgactgagcccaacttcgccggcgcgtctggacagccgggttcgagccgcaggggtttggggcaggggtgccaggtgcgtggctctgcgaggggattaaagcccaggtgcggcctctgcctccaactcaggtctccctggggccgccccaggccccacaagggccaggtcgggtgagcgccccccaaggggcaccagaccccgccaggtcgggggccccctcgccagggccgcgtggcctccgccccggacttacagagagcacccaccccggtcttcaaaaggccagagtcgtcccgccgcctggacccctcagccacctcccgggcctccttccagcggccgccaccttctccaccagctccctagttctggttgccacccaagctccgtccccatggcaaccgccaccgccggaagcgacaggccctaaagcgacagggcagggcggtggtcacgtgccaggaaacggtgacgagcgtgcccgacgtgcctcctgccggtcgctggcggcatagactttcctcgcttttctgtccttcctccgctcgcacgatcccaccttttcacatggtcccgtcccctaagaagctgcagcggccaatactgccaatttttactttccgcaaccttggcaagatggggtggagaagtatgaactcggatacaatgctcttttccaaaagcaaactgaatttccaggtctcatggatgcagcacacaaccgtcctgcctgcctcctcaccgggcaccgcgtgttgcagacaattccagctggctgggggcagatatgacacagggtgcaccagcttgcggttctcagcacaaagcgtttccgcaaaaccggtctggctatatctattaggatcattccacgtcaaagtggctctccactaacatctcatggaagacggcaacaggtggccacacgggtttccactgggacccctgcaggaaaccagccagagccactgaggcagaaggctctctgctgctgtcattttaggagaatgtgaataattctccccgcccacactgccatgccccagtgatggtaaattgattaatatgcatacatcttaaaataaaaaagaaaggataaactgggcaagctgtgtttattatagtctgagactttataaaagagactggaaaatacgtggaattagaacatgcaatttaaacagcaaacattggtaaacacagcatgtctgtggctaccagaggggaatacgtatggctgtcaggtcaaatagagtttgagggaattcgcccaataggaaggctttggaattgagtgtgagaacctgtggctggaagcacacagcaataccaatcccatcaaggcaagctggtatctgtatccaaccacagcaaaaccagtcccaaggaacacagggcttgcctggcagaactgccaaaacagaaagcggtgtgcaagaactggggaaatgaacactgataccatggagaggaaaaaataattcaaagtattggcaggaatccctgagaaccattttaccatcttaaaagagacaaaaaataaaagggaggaagaataagcattttcaagaggtctgatctactcgttcctatccatacctcagcggtttacaaaatagcgctgatctcagggcatagccaggaggttcaattataaaaagtcaaactagcagtgggctgggcgcagtggctcacgcctgtgatcccagcactttaggaggccaaggcaggaggactgcttgagcccaggagttcgagaccaacctggtcaacacagggagaccctgtctctacaaaaaataaattagctatgcatggtggtgcacgcctgtggtcccagatacttgggcggctgaggcagtgcccacagcgtcaaggcttcagtgaaccttgatcacgacactgcactccagcctgggtgacaaagcaagaccttgtctccagaaaacaaaaacaaaaacacacaaaaacggaggggttcttactagcgaagtgaaaggagcttgctgccctctggtgggttcctaaagaggaagctgacaggacaccacgctgggccacctgggaagcctccaggctttccctgttctccaaagggagctactatggccctgacagcccagctgctgaggaagcacagtacttaaccatttccgtatccacagcagcaaggcctcagtgcaaagaaatatgttggtcaaagcctgactttgcaattgctagcctgttttgcccaactttctatgaagctcttctgaccccatctgagctttggtttgggagggtcataagaaattcagctggggtgacaacagggtcatatcagcactgtaaaactctttattaaaaataataataataatcacaccagtacctgccagaataacttccgcccacttgcccac

SEQ ID NO: 917066 - DNA, 4001 bp, Homo sapiens
catacccatcattagagacaacagaagtgcctgcttagtatagaaaatcaaaatgaataaagaaagcaagaggatattatcaaagtggctggtcacagaggtctagctgggcagcaccaaaggccataaggtactgacagattcaatgaaatgggaaggtcaagaaccagagaacttgaggacaaaaagctgatcctgtgggtttaagatagtgaaataggtgactggtaaggaggctaaagtgatggggagcagctgaagaaaaagcggtgtcctagatgagatccaggttgtagtgattctgatgtgcaactggtttgaaaatacaaaggaaagtcgaccgtctcatgctgaggaactatgaaatcagaatattccaatggtgctggagacactgaaaatgatagcaagaaaaaaaggagagaaaaaaatatgatgcaataggtctgggtccctgtgggcagtaaatgatgacactaaagttttacagaaactgctataattgcatggcaataccttccatgaggattagagtgacagtggtagatcaatgatctggacatagtaaaggaaaacaaaaaagcagtttattcctttttctcttccacatagtcacggaaaacagaaaacagcttttagtgacaaggtaaggtaagatgtgatacctggattttcacggagtcagggtaaagaaaatgattaagagtaaagagaagtatactggataagtagtattttcaaaacacacattaaaagttggtaattcatgaaggagctactgggtagagaacagaaggaaagaggtagtaccactttaaattgtgaggttggggagaagtagcagcaacctgggttgtcatcagataccataaaataggtgggctgaggtgtaaggaacatggaaagcagcagagcaagaagcaaaatggcacattttaaaacaccgtgtgtaccaaggcacaggcacactgttgcttctacagactacagactacacatatgagggctacaaaaacagaaacactttgcacttgcacagtattttataaattgcttttacatatattatttgatcatcattgagtagctattactactatgcatattttcctaaagatgaggccattaggaagggacaaaaccatgataaaagctgtgattctccgtttccaacacatacaccttacatacacagcagacacttcagcatctcggccagccaggctgcaaattcttctctagccagaaggaatagtgggttttattcacttgtcaaagggcttcggagaaaagccactagatactttcctgtttgccttttcccaccttagacccctcaatttctatcaccatcacgggagaaggtagcgaagggtggctccatcagggagaaaactcaagctgaaagttgtattagggtcctcttcccttcacacctctaaacctcagtgacccaacaaatgaagatacgggagaggaaaaggtactatgtagaaacgaggaggtcttcagcaaataaagcttcgagaaaaataatgaaaacgggactggggtagggcagaaaccaagtatagctgagatgggggaggggaaaagaaggagggcaggaactggagggaaatgagagtgtagaagcccccaagcctgaagaacctaaaagagatatgagtggtccaactgctggagaaaagctaagggcccgtgagggtcctgaagcagggaccagcactgaaggaccccagggtttgggtgaccggaagcagagaccccaaacacgagaccagaagggggcgcaggagacaccccgtaggagagaatgaatggggaaggcggtccggggggcggggcaaaggaggggccccgggatgggcggggcacagacccctttccaagtccgaacccctgccccgagagcccggagagaagcggctccgcgcctcccgcactcaccgccggtctcgtcagtaacatagggagtcgccatcttgaaaacgcaaaccacttccggcgtgagcgggctggggtcccgcccccctccccaccggaagtggagtcccgatcgtagcaagccaccatcttagtcttaaagggagagtgcaccatttcatgggcggaggtggaggaggaggaagagtggagaagctgaaatagttaataaaataaagccgtgggctttttactgccaccgataccattactgagcgcttgctgcctgtaaaacagtcctcagggagccaagagaagttccgaggcacagtccctctcatccccaggaactcctcgtacgtccaggacctgcgagggaaaagggcgcaaggcccacctgcacccaaaaagggggccttataaatgaagaaaggaagaatatccaggctctggcctgcacccagatctcagagcggcttggtgacgtggagcagacaaactccaggaacgcactggggcgcacaagtgtttctagggacggttggagaccctatctaaccctaagaaggtggggaggtcgaattcgtgtgccgattgctgtcggccaacccactcaaccaccagagacccgcgggaggggcgtgcaaggcggagggcgccgcgggtcggtcacctgtctccgtagccgcagggctgccggcagcttccatggccgaagaggcagcggaccaggttgggcgggcggccctggcctggctctgccccgctgggcggcgccggggattcggcggcgaagtgatgagggccctagttgcttctcgcccagacctcctaaccctgagtgcctcctcgggctgggccctagggtcagagggcagggtgaaagcttctgggcggacctacttagtattctaattaaactcgtccaaccgctgaggatctaaagcggggcaactcgccaataatccggtcccgtagtgtcactccatttgtagtcctgccctgcgccgtacctccctattctgcagacgaacccatatggtctccctccgccgcccatttcagcaactgttgttccttcagggctaagtcctgttaaacttgtttcccctacagcctgagaggagcccggctgcaggttcctctcctcaggtgtcaactctgccctcctccaccctcatatagctttttccttatcaacccttttaccttcctgcttatatccccactttggcttagtttaatgtccagcagtacccctggaaccagggaggaggcaggaggtaagtattggtgactacctccaacactaggcagcatgtcccatttaaaaaacaaaacaaaacccaggcgcggttgctcacgcctgtaatcccagcactttgggaggccaaggcgggtggatcacgaggtccggagttcaagaccaacctggccaagatggcgaaaccccgtctctactaaaaatacaaaaaaattagccgggcgtggtggcgggtgcctgtaatctcagctactcgggaggctgaggcagagaatttcttgaatctgggaggcggaggttgcagtgagccaagatcgctccactgcactccagcttggacgacagagtgggaccccgtctcaaaaaaaaaaaaaaaaaaaaaaaaaaaaaactaaaaaactgagcaatggctgactaggacctttataagacaaattaggcctcagaagttttctgggggccgcagcttgccttccttcccatcctccatgtctgtgacttccactagaggccaattcagaatgtctgggggtggggctcatttaaaaagtatttccaggccgggtgcggtgtctcatgcctgtaatcccagcactttgggaggcccaggtgggcagatcacttgaggtcaggagttcgagaccagccatggccaacatggtgaaatcccatctctactaaaaatacaaaaattagccgggtgtggtggcgagtgcctgtaatcccagctactcgggaggctgaggaatgaacctgggaggtggaggttgcagtgagccaagatcgtgccactgcactccagcttgtatta

SEQ ID NO: 917067 - DNA, 4001 bp, Homo sapiens
aacagaaggaaagaggtagtaccactttaaattgtgaggttggggagaagtagcagcaacctgggttgtcatcagataccataaaataggtgggctgaggtgtaaggaacatggaaagcagcagagcaagaagcaaaatggcacattttaaaacaccgtgtgtaccaaggcacaggcacactgttgcttctacagactacagactacacatatgagggctacaaaaacagaaacactttgcacttgcacagtattttataaattgcttttacatatattatttgatcatcattgagtagctattactactatgcatattttcctaaagatgaggccattaggaagggacaaaaccatgataaaagctgtgattctccgtttccaacacatacaccttacatacacagcagacacttcagcatctcggccagccaggctgcaaattcttctctagccagaaggaatagtgggttttattcacttgtcaaagggcttcggagaaaagccactagatactttcctgtttgccttttcccaccttagacccctcaatttctatcaccatcacgggagaaggtagcgaagggtggctccatcagggagaaaactcaagctgaaagttgtattagggtcctcttcccttcacacctctaaacctcagtgacccaacaaatgaagatacgggagaggaaaaggtactatgtagaaacgaggaggtcttcagcaaataaagcttcgagaaaaataatgaaaacgggactggggtagggcagaaaccaagtatagctgagatgggggaggggaaaagaaggagggcaggaactggagggaaatgagagtgtagaagcccccaagcctgaagaacctaaaagagatatgagtggtccaactgctggagaaaagctaagggcccgtgagggtcctgaagcagggaccagcactgaaggaccccagggtttgggtgaccggaagcagagaccccaaacacgagaccagaagggggcgcaggagacaccccgtaggagagaatgaatggggaaggcggtccggggggcggggcaaaggaggggccccgggatgggcggggcacagacccctttccaagtccgaacccctgccccgagagcccggagagaagcggctccgcgcctcccgcactcaccgccggtctcgtcagtaacatagggagtcgccatcttgaaaacgcaaaccacttccggcgtgagcgggctggggtcccgcccccctccccaccggaagtggagtcccgatcgtagcaagccaccatcttagtcttaaagggagagtgcaccatttcatgggcggaggtggaggaggaggaagagtggagaagctgaaatagttaataaaataaagccgtgggctttttactgccaccgataccattactgagcgcttgctgcctgtaaaacagtcctcagggagccaagagaagttccgaggcacagtccctctcatccccaggaactcctcgtacgtccaggacctgcgagggaaaagggcgcaaggcccacctgcacccaaaaagggggccttataaatgaagaaaggaagaatatccaggctctggcctgcacccagatctcagagcggcttggtgacgtggagcagacaaactccaggaacgcactggggcgcacaagtgtttctagggacggttggagaccctatctaaccctaagaaggtggggaggtcgaattcgtgtgccgattgctgtcggccaacccactcaaccaccagagacccgcgggaggggcgtgcaaggcggagggcgccgcgggtcggtcacctgtctccgtagccgcagggctgccggcagcttccatggccgaagaggcagcggaccaggttgggcgggcggccctggcctggctctgccccgctgggcggcgccggggattcggcggcgaagtgatgagggccctagttgcttctcgcccagacctcctaaccctgagtgcctcctcgggctgggccctagggtcagagggcagggtgaaagcttctgggcggacctacttagtattctaattaaactcgtccaaccgctgaggatctaaagcggggcaactcgccaataatccggtcccgtagtgtcactccatttgtagtcctgccctgcgccgtacctccctattctgcagacgaacccatatggtctccctccgccgcccatttcagcaactgttgttccttcagggctaagtcctgttaaacttgtttcccctacagcctgagaggagcccggctgcaggttcctctcctcaggtgtcaactctgccctcctccaccctcatatagctttttccttatcaacccttttaccttcctgcttatatccccactttggcttagtttaatgtccagcagtacccctggaaccagggaggaggcaggaggtaagtattggtgactacctccaacactaggcagcatgtcccatttaaaaaacaaaacaaaacccaggcgcggttgctcacgcctgtaatcccagcactttgggaggccaaggcgggtggatcacgaggtccggagttcaagaccaacctggccaagatggcgaaaccccgtctctactaaaaatacaaaaaaattagccgggcgtggtggcgggtgcctgtaatctcagctactcgggaggctgaggcagagaatttcttgaatctgggaggcggaggttgcagtgagccaagatcgctccactgcactccagcttggacgacagagtgggaccccgtctcaaaaaaaaaaaaaaaaaaaaaaaaaaaaaactaaaaaactgagcaatggctgactaggacctttataagacaaattaggcctcagaagttttctgggggccgcagcttgccttccttcccatcctccatgtctgtgacttccactagaggccaattcagaatgtctgggggtggggctcatttaaaaagtatttccaggccgggtgcggtgtctcatgcctgtaatcccagcactttgggaggcccaggtgggcagatcacttgaggtcaggagttcgagaccagccatggccaacatggtgaaatcccatctctactaaaaatacaaaaattagccgggtgtggtggcgagtgcctgtaatcccagctactcgggaggctgaggaatgaacctgggaggtggaggttgcagtgagccaagatcgtgccactgcactccagcttgtattatagagcaagactcagtctcaaaataaataaataaaaagtatttgcatacgatacactgttattgcaagtgttgtgacactgtggtcttaaacccttgctctcttttcaccgattgtacttcagccctgcagggtctaacatcttgtccttaaccttgttatgattagacgtgagagtgtgggatgaagcctctaagaactaatgggatacgttggtcttgactgaactacctcaggagtggtctctgcagctttcagaggctgctcaatagacctttgtgcaggagggaaacctaaagtcgcccctgttcactaccaaccctaggcccccttcccacccccagacatcctgcctcagcactagggttgacaggaagtgaaactcaattgtctgcttagtagacctgcctgggacccaacccggggccccggatgtggccccccaccctgaggaggaacagggcaaaaaaggccggggagaacaggctgttgttttttcctttccctttgttcattgcggtttctttctttctgatttttatgatgtggttgattaaagaaatgagcacctggaaccgtaggcattaaacgcctccttcttagatgtttcttggcttttcttcccccacccacaccccccagtaactgacttggggtatgatggagcacagatcctaaagaagacacaaagaagtctagagtaagactgattccaccttattccttattcgagagataacattacaccccactttgaagtaccaaaaactatcttaaaaggagtgtctt

SEQ ID NO: 917068 - DNA, 4001 bp, Homo sapiens
taaaagaccgaaaaatgtggttttaattataattataatgattttcatagtagacacattctaccaactaataagctgaagaatgcattgcttaccatttgtcctctagagtaaattctccaattgtacaaaagaaattaaatttacataagcattttattctttctttctaaaattagaagccataaaaatgtacaaaaggtaacatataaaagatgctaatgtgctaaggaataaaaggaatgcttcttcataaaaaatagattccagttttcttttccatatgaaagcatttaaaatggtaacttgaaaacataggctgcaatattttataacgttcttacatgacaccttttgggtctaacttctaccagaaatatgcaacattcacgttccagtgaataacattcaacatactgactttttaaaagtgcacaatgtcaaaaatacttacaaactttaaaatttgttgtaaagtatgaagaatgtcacaagtgattagaaactactatgcaaaaagagtcctttaagtatgttaaattttaatgtcaatgatcacagaaacacagtgatgttggtattggaggtctttatatttccagcagcctcaggacactgagtcttatcaaaataatgggcttaggcacaaggcttgttcttttcttttgaagatcattaattgatatggcaacttgaaataaatggaaattaattctttatttgctttggcaatcagatgagaaatttctcttaataactgtaaaatgtaccaggctacacactatacagtactatttccacctgccataaggcagtggaaatattaaagggtaattttctcagaacttacctgccctgcagcttgccaggtaaaattcatggaatggatattgacaggaatagctggcattctctgttgtgcttttctgaaatcatgtgtaaaaggtgccattttcccctctgaaacaatcaggatatcttcttcaaatcctggtttttaaaataataaaacgatcaaaccaggtagacttgaaatcatctaaatcagaagtttcaagcaaaaagaaaaccaaagaattagtgtgggtcatttctgttcacaagcatctgccttcagtaccatcaacgctactaagattaatttttctctgtggatgatgagaatgatgccaacagacccatgctttcagggaaaagggatggacatggagttaaccgacgcaaaaaaatgccgggtgcacctaaaaacgcagggctataaaaattaacaacagcatgatcagaacactagatcagctttggtttcttaaaagagaagtttataagctttcagatggaaaatatctaattaaaagaggggaacactcttttgtggaaattaagttttaaaacacaagaaacgcaggtatccctctttcttgaagagtggagagaggaggacataggcaggggaaggcgctggaggcgggggccttacctatgagtactcttgcctggtgagcatcgatccataggtacaggctctcctcctgcggcggcccggcctccgcccgcagtgccagcaggcacaggaggatgctccagagccagagcgcggcggcagggaaggcgctcctccgggccatgctgctcaggacctcctcgctgccgggaaaactcctcgtgccgcacctacgcaacctggcgccgtcagatactctgctgcgctgcagctccctcagccagggctgttcccgtttagacggctgggcgcgtcgcctcccggcctgggtgccaaggagcctgcgagagcaggaggagggggcaggcaggacgcgggaggaggagggggggaccagcgggcgcgagtcgcgcaagaagatggggcgcgggcgggagtgggggcggcagagacgtaagactggcaaagctggcgaggccagcagtcagcggggcaaatagagcgagaacagaagagcgggaagggctggcgcgagcgaggtgcgagcgaggagtggggcccgcgaggcctgggcggccgccacttgggggcgctgtggggcccccccgggggcggggccgcgagggacccccgaggctgcattcacagtgcggtgcgcccagtggagcgcccgcgaagtgggcgtgtagggctggcggacccggagaagggcactcagagacccctgggacatcactcgccacctcctcgggccaagggaggcttcgggggagggaaatggggagagcagacaacgctgggcttgactgagtgctgatgatggtgatggtgatggtgatgatgatgatgatgatgatgatgaggtgatgactcctgttcctcctccggcgctcactgaaggcgcaaattgcccttcgtctccctttcagccagtaggattcctctctccgccaaccctatgcgctccgttctgcgataggctggcactttgcgcgctcccaagcagttaaaactcgaggctcgactgtccgatggtgccgatggcaggcgctggccttggctcgaggcgcagggcgtccagctggtacttgcccgacacccagcatttggggattcccgtctgtctccctgataacccggcagtgcccggaagagtgccctgggccctggacgatagctgtacctgaccctccggggtagggctcctctaacatcgtggatatcttcacgtttgctgatattttttaaaagttgctgaattcggccgggcgcgatggctcacgcctgtaatccctgcactttgggaggccaaggcgggcggatcacctgaggtcaggagttcgagaccagcttggccagcgtggtgaaaccccgtctctactaaaaatgcaaaaattagctgggcatggtggcgggggcctgtagtcctagctacccgggaggctgaggcaggagaatcacttgaaccgggaggcggaggttgcattaagccaagatcgtggcactgcactccagcctgggcgatagagcgagactccgtctcaaaaaatatataaataaataaataaaataattttttaaaagttgccgaattcacaggtgcgtgggggcaaaaccaaggctctggcctcgtctgtgagaagcatgcttggccggcagtgggctgcagcataacctatccacctggcccagcagaaagaactgatttttgcctcctgcctaattcctcggatgcacaaagaaaacggaagcaaaagggttttgttttgttttgtttttaattaaaaaacttagccttcggactcataaaaggttcatttacttgtgtttgttctttagtacccgaagctgtgacaaatgcctcaaggatcaaatgtctggggctgggcgtggtgtttcaatcagtcctttatagagtagcagatgcctcaagagggaaaaacaaacagaaacaacagaagagatggtggacatgtgcaggcatcaagttaaatcagtgttaggttctgagaatatagatttccaatgaggaaatatttgcagctatacaaccaaccaatagaaaaaaaaaaaaggaaaaaaggaattagacaagaagtctatgactgatttgaacttgcagtgtcttaatttttaaagtacttttattttaagtgcttacttaatcctcacaactcttaagtaggtactactattattcttattttactgacgaggaaagagggctcaaaaagtccagtaagttgactgtggatatccagctggtaaatgagagtaagggttcaaatcccagacactctgatttcaaagcccattctcttagtaacttatacctcatactgataaataaatcataattaagtctatttgcatccaaagcttcacagtgattcttcctttacaataaaaatatttacctgtttcccaacattgcattattttttatttctatgaatattcatgtatataatgtatgaacattaggctacttttaaaacactttaatgttataatgccagtgtcacccaggtaaagataataatttcacagcacaataggc

SEQ ID NO: 917069 - DNA, 4001 bp, Homo sapiens
gtttaatgaacgtcagagcaatgctgctactgtaaggcttaagcatcattaggtagaacaacatcaaacatccaaaaggggcagagaagagtctttttttaataattattttatactaaatgcctgtgcaaccatcaagcaaaatacatccaaaggtacaaggttgttctcatttaaaaagaacagcctgatctcaggaatgaaaacacgcttctacacccagacgcagctcatcactgcagagcctttgatgagattgaaatgcacagaagaagaagcatctgtactttcaacttccccactcattccaagtttcctgccagactctaaaccaggagacaattcgtttgtactaagatgaccttcaccaccgctgcccggtagcaaatccctctggctaccaataattcttatcctatcccaacacctaggcacatgctccacattctcctaatttcagcccctttcaaaagttggcctccccgtcccactcggagtccaacagagaatgccaagtgaagggtgaactcgatcaactggcttcgccgagccaaatttgggatccaaaggaccgtcaaataaagtaggtggggctttacctgcagttcacaccaggcgacttccacggtggtttcagtgtccagacctttgtagaccgtcttaaaggagcctctgccgatttcgatgtcaaacttgagaaagcggccatcgttagacattcccacggccttggtctccagctcttcgatatcatcctgctgctggctccgttcctcctgtggctccttggcgctgccgccgccgctgccacttctcgccggcggcggctcctctttgctccccacaaggctaggctgggacactgggcggtctttgctggtactgctggggacagtcgagggggcagggcccgcgacggcctgttccccaggggcggcagcggctggaggctgctgggctacctgggaagtggcggtggcggtcacggtctcttcccggtggggctccggtggagcactctgcgggacagccgcggggatgctgggctggggcagggaaagaggaaggccgggaagctccagtgcagtggcattggagtcacagatgacgctccggcggaagaagcggtgctcagtggtggtagtggtcgcggccgccccacggctgtccttgtccatagtgtggcggcggcgcctgtactcctcggtcctgccggtcacagcgtcggcggccgcggctcccagtttctcccccacggaggaatcggagctggagccattcttgggggcaggagccggcggcgagaggaacagggaaccgggagtgctgctctgcttctctgcggcgccgccagacatggtcggttcgctggagagaggcgagcgggctcggattcgtgaacgaaaagggcgtgaagggccgagccgcccgcgcagaggtctgcagggaaccgcggccgggcgggttcgcgccgacccggacgacgcctcactcagcaccgacaagccgcaacgagggacaggcggaccgctgggcccagctgcggcgggggctggcaccgaggctgctgcggctcacgaggagggctcgaaggcgggcgattcgggagctgagccacgggggttagcgccgcacggtccgcatccatcctgcggcgagcggcggccgggcgggcggtggcagcagaggcgccgcagtcatgaggggagggccaggggccggcaccgagtcgaggcggatgcggcggacgcggctcccactgccgccgctcgccgagctgggcgggctaggcccagagggcggcggcaccgcgagcacgggaccaggtccgacgcccgggcggtggcggccccggggcagaggagtgggaggggccgaggcgggcgagggaaggccgcggcccggctcccggtcactcgggcggccgcctcctcccacacgcgcccccagcgatggggaccggcctcacaggtcgcccatcgcccagaggcgaagggccggagcctcggagcctcggcgcctgaggagcgggcccccccttccccgaggcctccccgcccgccccaggcctggcaaacccgtctcctcccgggccggtgccgggggctgacggaggagggaacggcggggaggggagggccgctcaccgcggggcccgagctccgctgcttctctgaggcaagaggagaggagacctagaggactgggtgagggggaacagggagagaaaagagcagccacccccaccaggcgccttctgtcaccgaagatgggggtgcggagtggccgagagaggagccgcgtccacccgggaaactctccgcgctaaatggcgccgggagtctgaagcctccacacagcccgctcggatcccgccccccgccgcccggagcagccccaccccccaactcgctccggggcttttgcgcaggcgtgctagccccgaggcaccctgggacttatagtttacgggttggcggggatgaacgggacctagaagaaaagtgcctacgacttccgtgatgccttgcggttgctgtagcctaatgcctcgtgggagttgtagttttctttggaaaccgtcccttctgaaaggctgatgggagcgtcatcacgggtcgctcaaccccatcccgaagtccgcgcgagcttaggaaaatcattatttagggattaattgtggaagaaggaaaggaaggaaaaaaaaaaaaaaaagaagaggaacgagcgggcggggggtggggggggggatggaaagactcccatcatgctctgctaagctagagagctcttagggttgccatgcaatgaaaaatgatctgttgttcatctttaatggagagagcctcagtagtgttgagtgactgcagggctgtgagggtggaagggaagggcaaagcaggataaccggagcctgagctctgagtcggaggaggggaaaagaaactttgtgaagattgtgcatgaaattaatattgattaaacggattggaggaggagacacggaggattaccttccatcctcctcccctcatcaattaaggccacattctcagctcccggccgagacggatattctggctctcaaaaaagggctgccttactgaaatcggggatcctagtgaactctatctttgctttgtctgaaaaataataaaaggggggttgggggagcggtggattcaagaaaagataaggtctacggatctatgggtctttgaccacacttggggggctgggctgacttctgcctttgtagttggttgaaacttattttccacctttcttctgctggtggcttcgtgaaacaacaccccctctttctctagagctcctgaatgtccacatgcaatgtctacaaaggctctgggcccgggaaatgtggatccatgcggcttgccgccatggaatgtttttcttgaaagcatccttgtctgcctggacccctgtgctcttcgcaactactcaagatgtggaggggacgagcaccagggggcaccagaccgagtaggaagccggactcgggagcagactgcagtttaaaagcctcagtccaaccggtggagagcgggaagcgctgaaaacgtacgcaaccgcatcagagcgtccggacgcggccgcctctcttcagcgcccgctgcggaacaagctcgaaagcgcgcgtcggggccgaggaccacgctgcgagcgagcagctagcaaggaactcggcaggaggttccttagcacagttatcggatgagctccacctacagaagtcttgccctgcagttcatgttaattcatctgatacgtaaaatacttaaccctatttttcttttctttctttttttgttgtttatcacaagctacactttcaagtttacaaaaatgttttaaaccaatgatcgttaggtttcatgaagctgacaggttacgaacattttaaaatgccgattcagcagggacaactagagtactaaaatattagtgttccattgctttagaaaatgtatctttca

SEQ ID NO: 917070 - DNA, 4001 bp, Homo sapiens
tagcgaagataaacgccgtttctcgacagcctgtgggagaagggagcggggatcagcgagggggtacgcggggcgcggccagcaccctcatgaagggcttgggaccggaatcccacccccgactccgcactttgagtcctgagagccagggccggcagtgctggaaagctggtctctagggctagtagagaaagcaggtgcgtgggcacgcagccacgtccacgggcgtaatcacaccttactgggagattctagggcgcattttggctcgatagcggaagtggagcagccccagagagacaaaccgaagagaggggagcggaagaaccatacatccccaagacttcttcgcagcccaaaactttcggcccattttggcggtgcaagccttgctgggcgagaggccagacacacgcctgcagagagcagcttcccaggcgcttttgagagaggctgggggaaagcggcggtcagccggcgtccgcgacccgaaactttctttatctggggcagtagctcagaaaagttaagcttcgtttccagggtgcacggctggaaaacgcctggtagaagtctggccccgagctggcgctgggcacgaggcacttggcaaggttgattgtgtgaccctccaggcgcctgggacaccttctctgaactcgcccgcccatgccctgggggtgaccccgcgtttcccctgctcccggaagcgtcgccttcctgggcacccacctcggttgacgatcttgccgaagaggtggggccctggagcagtgggacagttccagcggcgattccggaactgccacttgcactcgcgcacggcactctgcagccccccactcacgctgtgcaggatccccggattttggcgtatcagacgccgctgtttgcggctcaacagctgcagactgggctcgagtaccagttgcagactcttggagtctgtaagcaggttcgtggaggaggctacgttcacaatacccctggtgggacgtatgatagctcaggctcaggaaggggatccgcaccctaaccataaaaactgtgccacccggtcctcttcctgggggtatgtggctggagagaatggcgggagattaataatacccgctctcccaggctcactaatttgaaagaactgggcgtccagacttgtgtgtgcccagtagtcccagggctgctcgcctgagccctaggtccggagactggacagaggaggtacccggagaccgagtgtctaccttggatctccgagcctcttccggtcagcctgagcgagataatcatggcctgcagttcttgcccacccaaggcgtgaaatgcttaggagtcccaccctcttctcccctcctttctaggcgaactcctggcccttcacttcccgaggtggggaaacctgtggtgagccaccgccgtgaggctggagttggcgctcaaaggggaagggcggtgctagatgagagtgggctccctgcctggggtatcttaggcctccgcgggcggatcattcgccccacttgtacagagctggagtctggggcagtttcatgccagatcgcccttcggtgtcgcggagggaagtcagagcggggagggagcctgtcggcagacggatcccagagcgtgggagctgggtagggttggcccctggctctgtgccgcgggacaagtggcgaccccgcaccagctcacttaccaccatcggccactgctgttggcagccagggctgcgggcagagcggccagcgccagcagcagcgtagcagaaacccagccaggcaacagcgcccagagccccatggcctgcctggctttgcccgctctgtgctgcagttgcggcgactttggttgttgcccgcgacggtgggacgggacgcggcggtggcggcagtggcgagagttcgcagtctggctttaacaaccctgggggcgggcggcggacagcatggctcgcggtcccggctggtgggctgaggcggccacggcgggcggcaccgcctcttatagttgcggcgctggctgaagtgacgggaggaggctgcccctccgggccgcactgtggcaccagggcgcaccggttaggggcgcagacaatgggcagcgagcggggctgtggttcccgcccgtctgagccgagagctgacgggttggccgtcggggctcacccccgccccctgcccggtggcccccgcctccgggcctgcactggccgcggacccctccccttgggacaccctcccacgcgcgcccgcctcactcagctgagcgtccggagcccgtcgaggactagcatccgccagggggcgcggcgagagtgtgctgcggggagagcccgccaggggcccagcccgcctcgccgcccgcggtggggttgtcccctcgacgtcaccccgggcccctccgacgtcccctctctcccccatcctgagtgtcggaaggaaagctgtggttctgggcagcgactccggggagatgcttaaccgcccaggaacccccgatggctggacagagaaggaaaaaggggagacgggggcgtgagtgcggctgtggtcagggaaatcccggggatgagttgtgggggtgagctaaccaaaaggagcctagcggtggagagaaacctaaagcaacaggcagtttgctcatgtgcgccagaagaagcgcacaagtggctgtgtgtgtgtgtgtgtgtgtgtgtgtgtgtgaagtggaacaacgtgaatatgggtgggagtgagaatgtgctgtgttctgagggtgcatcctcctgtgtgttggtacgtgcagaaactccttgttctgacgaaggatgttaggaaactttccaaagaattttggaatttagctcaagtcagaaaaggtcatggagtcaccttgtcacagtcaccgcctggggcagtgtgtcaggaaggaggtggcaactgtcgacaggagactcagaagcatgattgagggatgcagagtgtctggactgtgtgtggagtgggtggatgagcatgtgcatgggaagattaaatatgtgtgtatgcgtcattctgttgccctttgtacctcgtggcatcctatggcgtgtcacactgtggtatgtgtcaaccagtgcatgtcattgggggagagagccgagcctacaaccaagatggtattgaggtgaacccagcctggagtggctaagtctctgaggcctaggctcagaaaggatgggaaatggtgcggatgtccactgtatgtatggtgatggagaggactgggaagacaagggttgctggctacattgaacctagatgaggaaacttgtgcctccatgtgtttgcttctctttggatgtttctgccaagtttctgtctttccctaaagctctagttcccaccacactgggatacccagagtgcctgtgaccatctcatccattgtacacttttctcttctctcccagggactcctactcagcttcaaggccatttaggcctcctattgaagaagtgacaggctgggcgcggtggctcatgcctataatccccgcactttgggaggccgaggcaggtggatcatgaggtcaggagatcgagaccatcctggccaacatagtggaatcccatctctaataaaaatacaaaaattagctgagtgtggtggcgcacacctgtagtcccagctactcaggaggctgaggcaggagaatggcttgaacccgggaggtggagattgcagtgagccgagatcacgccattgcactccagtctgggctacagagcaagacttcatctgaaaaaaaaaaaaaaagtggctgcttttccctatatggggaatagggggcactgccagcctggttatcatgccccaccaccacacacatggcccctggaaggagggaagatctcttctctctccccattttgcagaattaaaaatagatcaggcacttgtccaaggtccacgtctaataaatgaatcaatggtagagccagattaaaacccagaccaatttgactcaaagcccatgc

SEQ ID NO: 917071 - DNA, 4001 bp, Homo sapiens
ggagagcagggacccagctgcctcgctggcagcacgcaggtggaagttaggcgcgcaggggcccagacgagtggccagacctggctcagagcggctccggggggggcggggaattccaggagaggcccctcccggagccgcgaaaccatcccttcccgcctccgcgcgcctcgccctgccgcccaccccctagcctccgcggcagcgccgacccgcccagccaggctcaccgcgcttgaggatggcgctgtggtgcggcaggcggccgccgccctcaagcgcggagcagttccagcgctggtcgcgcagctggtgctgacactcgtggaccgcgatgtgcagaccctgaagcgcggacgccgtcacgtcggggttgcgcaggcacaggcctagctgccgcttgctcaggccggacagcgtcaagcacacggtgttggccgtcagcggcggctcgccaggcaacttcaggcccagaatctcattgcttagagccctgggaaccaagaaggcgtctggggtctgcggtccagacccctccaactctccccaccccgggtcggtgtttctatggcctgggagacaaggggaactgctcaccgactgcacaacgccaggaacaggagacccgcgaggcccgagggcggaggccgcggccggggctcctccagcatgtcgaagcccggaggctccggtgggcagatcgatcaggacctgcgggacgggagacttgatgcgggttcaggaatagggcggctcgcttggggaaccaagtgacgcccttcttcgggctcctaacccaccggtgccaccctactgacccttctcattcctcctcaaacaaaacaagaagaaacaccccttgattcccagagtccctgaggcttggaggtcttaaagaagaagagtcaaggcgttgtcccagctcaggactcaagcgagcacccctggaaccttgcccaatcagacacaacgcccggcacacagacacacactcacttgcaaactcagacacacagactcacaaacacttgctccacaacctcgcctactgctcccttttccagggccccacgactagcttccccgccctcacagggctagggagagggatagggaggaggttccccaccacctaagggggtgtcacctccaggtgtcatcaagggcaagtaggctccatgagaaaggtctaagaatgagttccccactcacactgccccctccctgagcagcaaggaaagaggagaggctccaggtgcaggaaagatggggaggagagcctggctccctcctaaaagggaccgtggcacagactgagtcctcttccctatcccccaccttgcctaactacaagctcccctcctccatagtcgcccgtctggtcctcaccccttggctctcacattcattgcattctaaatctgggggcactcctttattctctgtgtctttatctctagcaatatctctggctctctatgcgtctctgtgcttctgtgggtggatgcgtgtctgtctgtctgtctgactacacacgtgcctgtctcttcctcgtgtgcacgtccctgccctccctgctttcccaggtctaattacctccagtggtttgggtgcggggtccgagacaggcacggttgggttgcctgggcttcactagtgctgcttaaaccgtggggagactgcgctgggttctgtccccttgtcagagccgcattcttccagggccgggccactcctcttcaccgcttccccagcgccgccgcggccgccgggaggaagggagggaggaagggagggagtgatcgagagagctagcaagccggcgagcaaaggactgggggctctggctttgctctcaccgagctcagggtggctctgccgggctgacggagctgcagcccctccccgagcctggggcttccccaccctaccctccactcccagccttgaccaggcgaatgcagcctccccctcctcccagcgcgcgcgcgcgcgcgcgcgcgcgcacacacacacacacacacacacacacacacacacactctctctctctcacacaccctctcccccgacgcctgggttcaggcttggccccactgaagaaggaggtggccagagttcctctcacctgatctggggtcgccaaggctgcagggagggtgtagtaaccttcctagggagccagaatggggcccagatggccacatctttcatcactcctctttgcgtcagtttctccaccaagatcagggtggctggaaggtgcctttgacaagatgaggatggagccagacagtctttgggcttctcggtgtgggacagtcacatgtggcacccacagcctgagcgcacccggggtactcagagcgggcaggagaagcacacgtctgggcagcttggttcccaccctcctccaagccctgcgcctgcccctttggaggggacagctttggcctcagagtttggccctagcagaggttcaagtagcaccaaagattgtcagcctgccccgatgcttccttgcctggcagggatgcttgccaacagaggtatcctacccttctcgggattcccccggtctgcactttgggtggcctggattcctgctccaagctgtagacttgcttcttatgggatgaggagggccttgggatccaaaattgagccaagcccaagggcagccgggaaagagcctggtcttggggtgcacaggcaaaggcaaaccgccttagggagacccagtggcagcgaacgggttaggcgccaccgtgctcccgcctgactcaccctcgaagctctaaccactgtgggctatttttgccagagaggggccccaggctttccagccgccccccgcccctgccagaccgcagcccaaggcacggctggccccacgcgccccaggcacattgactcagactgcccccaagcaagcagaggaacagggatgatacccacaaccacagtcacctcttccttggtggtggcgttgcagctctgctgggcagccagcctccagtctgtgctgctggaggtcctgcccgtgctgcaggggtcactgttggatagcgggcacagcagtctgagacaggagatcgagcaaacttacatctgttgggatatttacagatcacctttacgtgccaggctgtgagcagtctggggaggtgaaagtgccatggtccctgacactggacagcctggaccagactgcttttctctgattccctacctctgggatggggaagtgggagcactagagttcctgaccctccttcccatttagaggacaagagccaaaccatgtgtggttttggaggtcaccagaatctgcaagccccatctcatagttttcatccttacacctggattcatgatccccaccagtgtccttatcctttttcttgcagtcaccctgggattcctgccaggtccttggaagaggggaatgaggttgcctaagcctctcttctccatggggacctcatggacatttgtatttctccatgtgtctctgggtcccccttaggtttgggattattttttgccttctgattctacccttgtcaggctccagcatacagccaggtgccaagaaggggcgaggggcagaactactacaataggtttcaacttcctggtgaccctaggtctccccaagcaggactgttccaaatccaaggacccagagtcctgctccttctctctactgaagcccaactctgggacaagaggccacaggccggcagactgggtggcctgagctggcccgcagtgccctcagcccgaccggctggcctgagcactgacccgcaggcggctagagggcggtgggacaggcggggcctggagagggctgtgggtgcacacccattgcctaataccccaagcacgcggccagctccaagaaaggggagggacgggaaccagagagaccttgacgtgggtcagggccaatgacaggagggggaaagtggggggctttcatcactgcagggagg

SEQ ID NO: 917072 - DNA, 4001 bp, Homo sapiens
gctaaactacccttccccagaaatgtgtgtgccattcccagtgataaggtacacaatttgggaagtatatagcaaaacagacccaatcacagtgcagggtggcaggagcgcagaaacaattcctgaggccttcacactaaaatctaatgcctgatgttccagagaatagagcttccagcttccaactcctggtgcctggagcagtgtgaaagtgaccaactcatgcactgtgagaataaattccacaaagtaggcagagcagatccctaagactctgggtccctgtacaattcccagaaatggcagatctcagatgactcatcttacttggaaaagcacaattttctccccaggtatcaagcaaaagtccactggaagtcttattctgtgcagatgataagaaagaggaagttcccttctcctgaatactaataaaatagttttaaaatatgctctagaaaagaaggcagaagtgtataggtcacaggtcagtgtggtttaggaattgtttcaagagaacaaggctatggactttgttttcaagggctggaggattgaggggtgtttagatgctcttgtcctgcaagtaatctattttcaccagatctagagttctggggtattgtactataggggaaaaacatttatttgtgcaattgctactgttttctgcaaattcctgtctacttagagtgaatgaagtaaataaatggacttctggatcaccaccaagggcaggtggataacctctctctatgccatgcgctaattagaataaaaatgtgtcttgtgctaccaagtagaggtactactgtgtttgcaaaatggagcgtatttttaaaggacctggggaaaccatgcaacttttaaaaccaggatcaccaactggcagtcagctagctgtcttttcttttttggagacatcgtctcactgtcacccaggctggagtacggtggcatgatcacagctcactgcagcctcgaactcctgggctcaagcgatcctcccacctcagcctcctgagtagctgggactacaggtgtaagccactgtgtctggttaagtttttaaattcttttgtggagatgggggtctccctatattgtccaggctggtcttgaactcccggcctcaagcaatcctccctcctaggcttcccaaagtgctgcgattacaagcatgagccactgcgcccagcccaagtgtctttgactaacacaatgtttacaaatctttggaatatgaatgtcttggtgggtggcacacaggttctctaactttcccaaatccccactgctctctgctgtctttctcctggctacttcactcattcattttggaatgtttggagcattcacaagtcatgttccaaaagactttcaaatttgccatgcagttcttttttctttttcttttcttttttttgagatagggtctcactgtgttgctcaggctggactgcagtggtgtgatcatggctcactgcagctctgatctctctgtggtcaggtgatcctcctacctcagcatcctgagtagctgagactacaggcacatgccacaatgcccagctaatttttgtatttttttgtagagtttcaccatgttgcccagactagtcttgaactcctgggctcaagcaatccacctgcctcagcctcccaaactgctaggattataggcatgagccagcccatcatgctgttctttaaagggacctcaatatacatattatatatatattttatatattacatatatgataatcattgtactaaatgcatagtcaccatttataaatctggatttttacaggtggtattttctgcaagtagttatattgactctttttctaagcaattctgtaattccaccccagaaactaagtttagataagaagttatggcctcacctgattccagtcttctcgctctcttgagatcttactgaagctgtcaaccttctgcttcaaaaattagcagtttccatttggaagaataggataattgcttcatttttgtaaacaggcaggagatgaatgttgcaatgaatggaacagcggaaggacagcacccctgggtccacagcaccttcaacggcgagccccagagcctgtcttcatcagtcaggtacccaggggcaagcggcaacacagggaccacggctagagggactctaaaggcagagcgtagcggagaggctgcaagcgaattctcctcgtcactcactgctcatgcagaaacgacacctgggtttttatctggggggaaaccagtagctctaagtaatgtgggtccctctaatgctgtccccagctgtcgcccctgtgtctcaaactgctcctttgattgtgcggggaagaccttccaaatcctttgagagaagaggaaccaagcagctttctaaagaaaaccacaggcaaaacaagttcacgcccactcaggcacagcaccagttccttcctcaccgatgagaacattcagagccaaggtggtcagctctcctgtctccccctccaatgctaagcagttcacattccctttgccaaaactagagtccctgctagcaaacctcagaccaggtttgtgggtctcacaggccctagttttgagaattaaataacctctgtggctgcctcaggcaaaagcatgatcaccaaattcaggcctgggcaggttacagaggcttttggttcaccaccaaaattctttagtttcttttatggctctgccaggcttcttttcacggaactcctgaccctcttgctaaattgctccctcgactgcctgttttcttggtgaaggctgcaatgatgggggtcaagcttgctgtctatgctgccccagcacggggctctgcagaaaatgaaggtaacacaaggacagcctctgggaagcacctagcattcagcaggcactcaataaatgttaactgttcatcatttaacacatgcttactgtaggtttactcaatacacagtactgtataggatattccaatcaattaatacaatgctactctcctaggaactcaatatcactgcccaagatggtagccactgaccacatgtggctatttaaattaaaaatgaatttaaattaaatgttcagttcctccattgcagaagccacgtttcaagggctcagtagctacaagtggctagtggctattgttttggacagcacggattatagaacgtttccatgatcacagagagcttatggactgtctcatagtgctggtctagagtggaagccaggcaagaacacaaatcatcacttgtacaaaaccgaaagttccatttgaaatccattgtttaaacgtggtgcagtaggagctttaacagagttacttgcaaagtaccatggcactcaaggtaagggtagcaaactctaacctaccgcccaggagcaagaccccacctaccagccatggagacaaccattttctattccaatgacaacctatacttccatcattgcaggtaatctttaggaaaagcagccattctgcaatgaccttgagagcaatttcccatgatcagaaccaaattgtttgctattttaaatttgctactcagagtaaacgaaaaagttcagacccagtgaaaatgccaaaaagtaatcgaaatggaattctttctgtgactcttaattcaagtcaactaatattattgagcatctattaggtcttactcaaagttgagtaacaggaactcttggttgaataacaggaatctcgtagaggtgaggcaaacatatgtgattataacatttagcagggcaatacgttataatggaggtatcaattactatccaaacagctgagaaagactatgtcgttccaacggtggggatgctttctgggggtgatggtatttgaacctgtccctaagaggacacacaggattctcacagctggagataggagaatgagacccgcccaaggagcaaaggcacagaggcctgaaaaacacatgacacgtagtttcaagtccaaa

SEQ ID NO: 917073 - DNA, 4001 bp, Homo sapiens
agaccaggagccggggtgaggcggagaaagttgcactgatgcttacgtgctgcgtgttccccacaaagaagctcggcctctttccagcctccgcctcccactgctcatcttcccaccctaggacttctgtctcttaccccaaactgtgggaaccctgcacaggacctaatttccaaagaaataatgagctgagaaaccacaaagagaaatgaaaacaagtaatttcaagagcggagcttgcggcgttcctccgttcggcagccgggaggccacttcggctgttgtaaagcatacctgtccttgctgcagaacatccaaagaaatggggcccatcctatccactcccccacgtgcctacctctcattccagcccagagacttatttctctgaccctcaggctctcctttgtaggattaaaacattttggtgaattggatttacctgcacccagggaggagtctcccctctccatctgcgcccttctcaccctcagcgggtttcctaagtcccaacccctgcgtacagatcaaggacttttcactttctcaaggcagcttctctgagaaatgtacaagccacgccgcgaaccgcccgcccggaaagctctggcggctgaggtggtgcctccctaggcggcccctgcccctcccggcaccgtggtcctcgagggcggcaccgagtaccttgcccagcagctgcaccggggacactgccgacgccaggcggcagctctggcatcaaatgcctgagctgaggacgcatcttccagatgccacagcccttccctgctggctcccgggcctcccgcctcttggcctcctgcctgctgtaacccacgcctgttcctctatccgcccccgagagcccctgtccccaggccctgggacccgcagcaggtcagtgctgctagagcgagcctgcgcctcgggacacacggcccctgcggctcccccgcggtcctccggggcccccgtctgggcgtgacccgcgcccccagcggcctccccggggccccggacctgacgagcgcagccccgcgcgccccggctcactgcgccactctcgcgcgtcggcgtccccaggctccccgggagggggcggcgggtgcttcgggtcatcagcccgggaagtatttttgtcctggggccgccaggagaggacagtggcccgagcagggtccaggagagctgggacacagcccttccccaagcccccttttgattttccttctcgaagcctcggctggggcgggggcaccaacaggcaggtgtgtggggccggcagggggcagatcaaagaagacacttgctccttcccctttgtcatgcagagccagctcggaagtgagccggcccccagcccgggactaacagcttccacgcccgactcccctcagaccccccctcctctggaggatgcccctccccctctcctctccccccataaatcctcctcgtcccccggggcagaaggtctgtgaatgcaccggctggaaccacgagagatggagcagagatagggctggcaccaggagctaatggttttatggaggggaggcgaccaggtcccgagtagggaggacgagagaaaagcttcaaagcgtttccttgtccaaatatccttaactccacctaccagtccttcccggggttgcagagctagggccgcccgtgccctcctgcttctccagcctcctccccgcggccccgaagcctcctgcccagcctatgcccagcccgtgcccagcccaccaccctgccgcccgcaacacctactctccctggggactttgatcctcacacatttccaccaccagatagcggagttcttcctccccgcctgtgacacttgtccctcacaccagtgcctctcacctctgtcacccgtccatcaggctccagtggaatctctctggtcctgcagttcctaggttcaaactaggctacattgggggccaccgtttccgagccaaagacaggcctgggtgcctgctaatggtcactgtggctgtgactgcccccaggacaggctgacacggtaactagagccagacttcccaggagctgctaatcccgccctcagtgccttataaacatatatggagacaagaatcactcccgcagctgtttctactccatcccccgccccgggctttccacgaggcggctctcagcccattaaaaatgtttttttttttaaaaattgccccccaaaatggctctaacatgtgcagtggcttctttctctgacttccagatgtgtggtacctgaaactgaactcccccatacacacatatgcacgcgcgcgtgcacacacacacacacaacacacacaccagccccctcaggacgctctctgtcctggcagacagatgcgagccaattcttgagtggccatagaactgaagccaggcagctgtttgccctctcttacattcttgtgctggggtgggctggggtgggaggagaaaggaccccttagaaaggtaaatgctggcgactggtttcatcagcatgggcagaatggaaatttcttgcctcaacccgactgggaaggcaggaagctgtatgggggctgacggttttgtgttaatgagcaggtcacattgggacccctgtttgtgggtcactagtgagatttatagcaggattcaaccaggggaggctctccttgtgtaggaagaaagatctggtaaatgcccaacaggcaggaaaaggcctttgcaataactacagatttccccagggtctaaaaagattccccttcctaagaggcaagtgtcaattcaaacataccaaacacagtagttaagaatgcggggctcttcggggggccaaggtgggcagatcacctgaggtcaggagttcgagaccagcccggccaacatggtgaaagctcacctgtaataaaaaagtataaaaattagccagatgtggtggcacatgcctgcagtcgcagctacttgggaggctgaggcaggagaatcgcttgaacctgggaggtggaggttgcagtgagccaagatagcacaactgcactccagccgggtgacagagcaagactccatctcaaaaaaaaaaaaaagtgggagtcagggtctctattctttagtagtagtgactaggaggctgtggggagggaaagatgcaaaattcccaatcaggatccttccagaagccagaatgagctggtcagacatctgctctgttcctcctcttcattcatccatgcagccattcaatacattcattaatcaaatgaattacaccctgggtgcctaatatgtgccagttactgctctaagtgccagagacatggcagtgaacaaacaaatgtatcataagttaggtccagtgaatactatgaggaaaataaagaggggaccagaatcaagaatgggaaggggtggtagcatacttgatgtagggttcttgggaagactactctctgaaatatctgtgcccccaaaaccactgtgtaggcaggatggtgggaggggatgtaacgatgctacacctccaagaccccctctagagcacatccaaggtccctgctgagatggcactgtcccacttcaccatcacaaccaaagaggtgcgtgttggaagacaggaactccaagatctcctcctttttctgctaggactcagtcactcactttcatttccttaaggggccatgtccatccagcctagagttaagagaccaaaaagagagaccgggacaggtaaagctgagaccccaagcaactctgtgctttccaccatacttcagagcagtgcctgaaacaacatctctgccccacaggatgaggggttgatttcaggtcattagccattcacacaaacccactgatatctagaactgacttccccagcacccagggactcaagcatctcaagactcctgcaggaaatggagccacctcccacatctgcccctctcctcagacaggcaccgtcacatccagaaacctgtccagaaatagccacgagccta

SEQ ID NO: 917074 - DNA, 4001 bp, Homo sapiens
ggccaaggcgtgcatgcgtcttggggtttttttccccttgcataagagacacacctttcccactgagattttatgttcatctgggctggcttgaggtatatccaatatcctctgacttccacgctgtcttctgatggggatggcagttaacaagaatagaggcaaggtccccacccatcagtgtatcctaaatttgcctgatcatacatgtcaccagggatcagcgtctccagtcccgccccacctccactgacttaatctccagtgggagaggctgggaatagattgtttcaatagggaacccagaccccagaccccatttttaccgggtcccagccaccctccgaggaaggtactaggattatcccattttgcagatcaaaactgagacgtgggtggcggtggttcagtggcttgtccactgtcacgatcacacagcttgtgagggacagaggtgactcccatccagacatgcaagtgcgtcccctggcacctgggtacccaggggcacccacccccttggggatctccgttttagggcttggtgccccccgccccgagtcccacccgggagccccctctgtcccggtcgggggatctcctcccgcagaagcccgatcttcccgatcctgtcgccggcgggagtcagggtggcggccactgacaacgaaagtgaaacaaagctggtcgccgggcgcgcacccccgccggccccgcgcggacctcccaggccggacgcccccgccgcgtccagcccccgccccaccccgcccagcccgccccggggtcgcctcccccctccccggggagaacgggccagggccccgccgggcgggaacgggcgcgcccggccccactcacctccggcctccatggaggacgcgagcggcccccgcggcaggcggcgggcgcctcagccccccgggccgcgggccctcatgccgcccccgcgccgcccgccccggccaggccgccgccgccgcccggagaggccatcagctgcttcccgtcacatggcggtgggcgcgggcggagacgcgcgggggcggggcgcaggggaaacggagggggggtgcggacgggataaaaacggtggggggcagctgagggaaaagatggaaaatcggggaggcggtacgctgacgggataaaagctgaggggttgctcaggggaaacgggggcggggaagacgcgcgaaccagataaaaatggggcaggggtggggggagctgagcggaaacggggtggggcgcgaacgggataaaacccaggggttgtgcggggtcctgaggggaaccagcgccggataaaaacggggaagggagggaggtgaacagagctgagggaaaccgggaaaaggggagcgatagaaaccggagtaggggaagccgggctcaggggaaaagggggtgttggagagtggtagagccgggctgagagaaaaaccaagcaggggaagcggcgatccggggagaacggagagagggagaccgagggctgtgggggtaaggggaaccaaaggggctgaagcgaaatcgaggggaggggcaggtgaaaatggagccatgcgaaggccgatgaggggggaaacgggtaaaaatgggggcgggagaaataggttggagggaatactggccgagaagaaacctggggagagctgggcttaggggaaaatggggagggggtggaaggaaggtgtaataaccgggtgctggggaggacgtaagaattggggggtgcggcgagggtcaaggctagggtaaaacaaggggggctactcaatggctccggtaatgggagagggaagtgaggagaacacggggcggtggggagaggagggcagggtgaaaaccggagtgggggtgggaacgagataaaaaacggggcaggagcgattcggaagaagactgtccccttacctacctacggcgacagcctcgcctgtccccgtccccctgagaaacctgctctccctgtctacccgcatagcctcaagaaatggctcgcttgggtcagacgccccctttttaacattccagggccagggcaggagtcatcatggaggcttttcatgcctgaaagaccccatttcttagttgtccggtccccagtagtatcagtggcttggggatttcttactgagctcagctcattgtccccaaaatgcctccccttacccccaactcgagcgcttccctttcctgctttgggcccaagctcttcccgcggttcttggtgtcagcttcattcaagtcactctcccgcctctcattcctttctccccgcctttcttcgcttccctccaagtgccctctccatttgccggtcactggtcccagagctccggatcgcagtggttccattttaaatttctttgcttcctaacgcaacctatgttttctacggtaactgaggttcccgtgttctttttcaccatggtctctccgttttaatgtttcgggtttttttacccaggcccctgttttatgagccctgggtacgtccttcctgtgtcccgtttggcctcctgggttacactcctgttcaccccgcttggccggtttttttttttcttttctttgaacctgccggtttctcagtctcccccttttccgctggctacctgtccctttctcgccgcccatgttaactttagcatgccccgttctctctcttcattttccactgggtattttttatgtttcccaattttaaaaacggcccagcgcacccctttttttgggactccacttttatctctggcaccagtgtcggcctcctccacctctgctcccatttaatcgctaatttcctgcctcctgaggacccccgttttattgtccaggctcccccctcccatttttctcttctctaattttctgagtctccattttttgtctcccaaattccttcgattcctggagtcttacaggcctcgtttttatgtacacgtcatggaaaagaataaaagggtaaggtcgcggggcgcgatggctcatgcctgtaatcccagcactttgggaggccaaggcgggcagatcacctgaggtcaggagttcgagaccagcctggccgatatggccaaacccaatctctactaaaaatacaaaaattagctgggtgtggtggcgggcacctgtaaacccggctactcgggagactgaggcaggagaatcacttgaacccaggaggtggaggttgcagtgagctgagatcttgccattgcacaccagcctgggtgatggaggctccgtctggaggaaaaaaaaaaaaaaaaaacaaaaaaggcggggctgaggtgagaagaatattgttaccaatttttaaaaagctagtaaaaaaaattttttttggcaagttcgtttttccaagtctttcaatttactaaccaggtctcaatcaagatcacaaaagcacttacttaaaaatagctttattccattatcttttaaaaaaggcatatgataacctcagaactaatttctcccaacctccccccaccacatcttaaaatgtaaataatggagaaggagctgcttatttttctttgcagcagttcctggccagtcccaacgtgagaaatatcagttggcacttattgcatcataatacattttgcctagtaaggatgattttctaagtctcagtgcatgggttattgcaattttccatcttgtgttttcctgcggcaattatggggcttgtatgtgcttgtgagaattggggctaatatcaaagccacagaattgtggaggcccccttcccaggctccaccagggtttgagaaaaacaagaaaaaagtcagttgcaatggacctgaagtgtgtatcttcctggtcctgataaatagatctcatggtctctaagttaacaatacatgcagataagattttttttaaagcacagtgtaacaacttggactttgccacacaaactgtaatccactgtcaacaagcttgtggatttgggcatggatcgtcttaaagaagcccgaattctt

SEQ ID NO: 917075 - DNA, 4001 bp, Homo sapiens
aatctaaaacattacattacaatttatttgattacatgtagcaggaatattttagacatgttgtattgaaagagtttttaaattgtcacctagttcttttttcttttttttaatgtggctacttgaacattttaaattacatacgtggctcacattagacttctgttggtcggggctggcctagagggtgcctggcacatagtagacgttcaacaaatatttgctgaatgaataagtgaagtctaaccattgctctgaagatttcaactgttgcccattgtatttcctttacaatgggctttattccatttgaaaataagttaaaactctggccttttttgtacagtaacttggcagctctcaacaaccctgcccacaccctcaaaacgaagttgtcaatctttaggaaaaccccagaactggaaacagatttctgttaaaaaggcaggctagctacagattgctttcagattgaactgtaaggaggcaatggaaatcaaacggaagctataaaaagattcacataggatctacacaaacagtaggggcccttttaaaaagaattctacgggtaacactcactgaaaagaaagcccttatctagatgggaaggagagagagctgcctttaactcaatgcctgacttcagcaaacaaagaaatgtcatttcctaaattaaaaagtaacaccaccccagggaatacccagatttcaaccttcccacccacagtaacaagccatcagcaatcagaaccctccagaccaggatgaagcttgaacttggctgcaagattaccatgaagttctggaacaaattctgagccctaggccttgaacctgctctgaaaatttctcctaaggaaattacatttaaactcgggtccttcaagacctgggactcccggaatcaattctaaatctatcccaagtggggttccgagggaaggtcgttggaggggagagggccaaggcgtgcatgcgtcttggggtttttttccccttgcataagagacacacctttcccactgagattttatgttcatctgggctggcttgaggtatatccaatatcctctgacttccacgctgtcttctgatggggatggcagttaacaagaatagaggcaaggtccccacccatcagtgtatcctaaatttgcctgatcatacatgtcaccagggatcagcgtctccagtcccgccccacctccactgacttaatctccagtgggagaggctgggaatagattgtttcaatagggaacccagaccccagaccccatttttaccgggtcccagccaccctccgaggaaggtactaggattatcccattttgcagatcaaaactgagacgtgggtggcggtggttcagtggcttgtccactgtcacgatcacacagcttgtgagggacagaggtgactcccatccagacatgcaagtgcgtcccctggcacctgggtacccaggggcacccacccccttggggatctccgttttagggcttggtgccccccgccccgagtcccacccgggagccccctctgtcccggtcgggggatctcctcccgcagaagcccgatcttcccgatcctgtcgccggcgggagtcagggtggcggccactgacaacgaaagtgaaacaaagctggtcgccgggcgcgcacccccgccggccccgcgcggacctcccaggccggacgcccccgccgcgtccagcccccgccccaccccgcccagcccgccccggggtcgcctcccccctccccggggagaacgggccagggccccgccgggcgggaacgggcgcgcccggccccactcacctccggcctccatggaggacgcgagcggcccccgcggcaggcggcgggcgcctcagccccccgggccgcgggccctcatgccgcccccgcgccgcccgccccggccaggccgccgccgccgcccggagaggccatcagctgcttcccgtcacatggcggtgggcgcgggcggagacgcgcgggggcggggcgcaggggaaacggagggggggtgcggacgggataaaaacggtggggggcagctgagggaaaagatggaaaatcggggaggcggtacgctgacgggataaaagctgaggggttgctcaggggaaacgggggcggggaagacgcgcgaaccagataaaaatggggcaggggtggggggagctgagcggaaacggggtggggcgcgaacgggataaaacccaggggttgtgcggggtcctgaggggaaccagcgccggataaaaacggggaagggagggaggtgaacagagctgagggaaaccgggaaaaggggagcgatagaaaccggagtaggggaagccgggctcaggggaaaagggggtgttggagagtggtagagccgggctgagagaaaaaccaagcaggggaagcggcgatccggggagaacggagagagggagaccgagggctgtgggggtaaggggaaccaaaggggctgaagcgaaatcgaggggaggggcaggtgaaaatggagccatgcgaaggccgatgaggggggaaacgggtaaaaatgggggcgggagaaataggttggagggaatactggccgagaagaaacctggggagagctgggcttaggggaaaatggggagggggtggaaggaaggtgtaataaccgggtgctggggaggacgtaagaattggggggtgcggcgagggtcaaggctagggtaaaacaaggggggctactcaatggctccggtaatgggagagggaagtgaggagaacacggggcggtggggagaggagggcagggtgaaaaccggagtgggggtgggaacgagataaaaaacggggcaggagcgattcggaagaagactgtccccttacctacctacggcgacagcctcgcctgtccccgtccccctgagaaacctgctctccctgtctacccgcatagcctcaagaaatggctcgcttgggtcagacgccccctttttaacattccagggccagggcaggagtcatcatggaggcttttcatgcctgaaagaccccatttcttagttgtccggtccccagtagtatcagtggcttggggatttcttactgagctcagctcattgtccccaaaatgcctccccttacccccaactcgagcgcttccctttcctgctttgggcccaagctcttcccgcggttcttggtgtcagcttcattcaagtcactctcccgcctctcattcctttctccccgcctttcttcgcttccctccaagtgccctctccatttgccggtcactggtcccagagctccggatcgcagtggttccattttaaatttctttgcttcctaacgcaacctatgttttctacggtaactgaggttcccgtgttctttttcaccatggtctctccgttttaatgtttcgggtttttttacccaggcccctgttttatgagccctgggtacgtccttcctgtgtcccgtttggcctcctgggttacactcctgttcaccccgcttggccggtttttttttttcttttctttgaacctgccggtttctcagtctcccccttttccgctggctacctgtccctttctcgccgcccatgttaactttagcatgccccgttctctctcttcattttccactgggtattttttatgtttcccaattttaaaaacggcccagcgcacccctttttttgggactccacttttatctctggcaccagtgtcggcctcctccacctctgctcccatttaatcgctaatttcctgcctcctgaggacccccgttttattgtccaggctcccccctcccatttttctcttctctaattttctgagtctccattttttgtctcccaaattccttcgattcctggagtcttacaggcctcgtttttatgtacacgtcatggaaaagaataaaagggtaaggtcgcggggcgcgatggctcatgcctgtaatcccagcactttgggaggccaaggcgggca

SEQ ID NO: 917076 - DNA, 4001 bp, Homo sapiens
gactgcagtgtcaggtgattggagagaacaagggccctgccatgtagtcaaggatcacctggtgcttggtgggacagggccagcctccctggggaaaacagcacccagatagatgccccacacaagacccaaaagcaggtagccttggcaccgttgagcttcactctttgctaaactctacactcagcaccctccaggcaccatctcagttagtcctctcagccctgtaaagtaggaactgtgaacttcccatcctacagtggaggagccgaagcgtggagagggaagtcactggtcaaacttagatctgatctgagacctaggtctcttaaattctaaattaagatcccctcctgggattacaaaaatctcatcagtgacaatcactcagggccatagagtgtctcaactgaactgggacctctgaggatacatgaaatctcttcatttttgagaagcagcaactgaagcccagagaggtctagtgatttgcccaaagtcacacagcaaatgagagccaacttgaagctcaatctcctgacccagacccagggctttttccaggacatcaagcaccagattctgacgccctggaggaattcttgggttttggcagcctagggacgcagctctaacttggcctgagatcggaatcccacctcacaccccaagaactgtcttaaaaacaacacagcaatgctactccgcagaggcagatgcccagcccaagtaggtagcaccatgccatctatggggctgtgaccacaggggcggctctaaaatgatcctcagagaccaggtgatctccttggagcatgctttttactaatagaaaaaatcatctagccaaacttatgagctgtgcatggggctcagcagagcctctaggggcctagagtgtggggatgagaatgtcaggaggccctctccacgtggcccttccagccccttttctgcaaaaagtttgcacctccccaggctccaataggaatggtctcattgagcagccaggaaacttcccctatttttttgctcacctaaggagcagcccctttgaagctgtaagaattaggaagtgacctccacccttcctagtggttctgccaaggaggtgagttggctctttccaagatacctggggctgctggaaaggcttgcaaggaggcgatttggctgagttggtcccctagtctctagttccctctctctctttacacacacacacacacacacacacacacacacacacacacacacaccccagaatggacataagcaaatctgcaaggcaccctacacaaagcccattgcctgggcagctctggctgttggcatcagatgacaggcagccttattcaccagagtatcacccccaagaaacatcttctacagccaacttggaaatatgactagctccctctcccttggaactctgcactggccagaaagagggtgattcataaatcaaatttacggggcccactgcctccccgctggcccacctccgcgggagaagcccttgaatgcatgcctgtagggggcacaggaatgcccagaggaaggatgcctggatgagccggaatgtcccaccctctgccagaggagagaaagtttgtcatctacgcagagctgggctgtcaccactctgggttcctcactcgccgggctctggacgacgagcccccaacctgcggggaagcgtctggaaagcgaagcccagatctaggggcagaagacatttcgcaccagctccgcgcccggctccctcctggagccctcttcccaggtccaggcacctgagtccttacctgaagggtctccgccacttgcaaactctgccagctgagctcagcaggcgcccggggtccctctctgcgactcccgcgtcccgcttggcgcgcccgctctgtgggcgccttcccagctgctgcagtggctttaaggaaaggggagcctggatttcctttctcgccaccaaggctcctcctgccgggccctggggctatttctccaggtctggctcaaggggcatcctctgcgcctccagcgggaaagtgggatagtgtgcgccttgaattgcagcagcggcgacagcggtggccggggacgaggaggcggtggcgacgccagccggcgagccagggaggcgggcggaagcgagaggaagtgaaagccgggctcctgtgagcctggcgctcgggcgggcggcactgcgggtgccccgagccgcggcgaggccccgcgcgggcacccgccccggggatggagatgcccgggcccggtgcgcgcagggcaccggctgcggctcggcgcggagctccggccgcctggctctctctcgctgcctcgccgctgcctccttggctgccttgctcgctcccctggacttcacgtctccagccctagctcccgcgccgctgccgccgccgccaccagcagcgcgcctcagcccggcgcgctcctcgcacggagccacagcactgcctaccgcttaactccttgcatgccacctggccctcccgcagcctcccggggagccgggcatagccggtgccaggccggctgagcatatcgggcaggggcctcagccttccggcctcagtgtcctcttctgtaaaatgggttcgagacccaagcccaaaccatagggtcgctggaaaaattcactgagcggattacgcaaagtgccaagctgcctgacatggggagtatgcaccccaaatggcagagtgcttgctgctgctgctactgttgtcgaccaagaagcttagcacggtgcctcacaaatagtaaacacccaataaagcgcagtttcggtttttggtatttagtttgtagttttaacaggtggtaagttttagctgtgtaacctctgggtgatcactcgccctctctgagcctgttgctttccaatctctgtgaccttgggcaagtcacagcacctctctgaacctttgtgtccccatctgtaaaatggggacagtaatgcccgtagtcaaagaattcccagagaagctctggcagaagagcccttctcatgacggggcagggcatctaacgggagctggacatcttttctttcttgatctggctggtggctgcacaggtgtttgtgacaagtcgttgtactgtacatttacatatcaagtgcttttctgtacatgggttaaatcttaactgttttttgtttttttgtgtttcttttttttttttttttttgagagaccattcttgagcaaaacagaactgggttcaagcatgggctctagtactttctggttgtgtcaccgtgaccaagttatttcatcttaaggagcctcagtttcctcatccataaaatgggaacaatgataatacctactggataggtgatataaggattaaagggtttcaagcaaaatggcagatataaagcttgaggcctgaactcaaccagtatctgctggtactgatcacatattctacagtattatatatgtcccatagtaaggggtgtctgggaaataacaaagagaactgaatttgaatctcctcaacagttgccaggtaaaatacaggatgcccagttaaatttttagtataagtctgaaattttacatgggatatactttcactattttttttacattgtttactcagaacccaaatataattggatgtcctttattttattttgctgcatcttgcaatcctaactccataattaccagctgtatgtcctaaagtaaatgacttagcctctctggccttggttgcccaatcggtaaaataggactaaagatttcttctaatgttgacaagagaatgaaactgattaaagtgggtgggtgttcccagcagcacatgttaagccctccacatttgttccgtacacttcctgtcaatcatctccctccctcctcttcggttcttcctctttatccctacctgtcttgaggttgccagggctctgcacaagcattgtttagccctcttgctggccttcaaaactagcagattat

SEQ ID NO: 917077 - DNA, 4001 bp, Homo sapiens
ggctgggcacggtggctcacgcctgtaatcccagcattttgggaggccgaggtgggcggatcacgaggtcaggagttcgagaccagcctgaccaacacggtgaaacgccgtctctactaaaaatacaaaaattagctgggcatggtggcctgcgcctgtaatcccagctacccaggaggctgaggcagaagactcgcatgaacccgggagggggaggttgcagtgagcggagatcgtgtcattgcactcccgcctgggcgacagagtgagacactgtgtcaaaaaaaagaaaaagtgcttaagcttggtcaagtcactctgaagctatcgggagaaaaatgaagtggccctaaggaaaacatagccaataaacccaaggaaacaaactagttaacagttgtcactacagaaagaatcccccacatagaaggcatttggacgatcaatatgcagtggaaggccgggcgcggtggctcacgcctgtaatcccagcactttgggaggctgaggcgggcggatcgcgaggtcaagagatcgagaccatcctggctaacacggtgaaactccatctctacgaaaaatacaaaaagtagccaggtgtggcggggcgcacctgtaatagagctactcgggaggctgaggctgcagaatcacttgaacctgggaggcagaggttgcagtgagccgagatggcaccactgcactgcagcctgggcgaccgagcgagactccgtctcaaaacaacaacaacaaaaccccaaaaaatgtttcaatacggtaaacaattatgcatcttgcaaaggttcttgggggaaggcaagcaacatacttaaaatattaagccttaacttttcctggatagccattaagaatcaaacaatttggaaaaattcctctacacctactgaagactgtttcaaatactacgactgaatctttccagccttttaacaccacgctgacaagtcggtttaataaaacgtaactctcccccaacccccgcccgccacaactaattagcactttcaaaaagtactcgtttttctggttacagggaaacctcatgcttctctagtcctgcaggatggtgaggaaggtttgagaagaaatggagcgtccgtgctggccaattactgcacagaaataacacttttcctttttgtccaggggtgggggaagaatcaagtttgaggtctccacagttgataacgctacaacgatgactaacgggcttcggaaccacaggcgatgccgaccctcctctgctagccttgctcccatccctcccccgatccctcccctaaaggaagcctcgtggcaattcgggtgatgaaacaccaagcaaccgccggccacgcactcgggacgcgctcctcggcggcggccccggctcgtacccacccccacccggtccgcccagccagggggtgcaccgccatagagggtcccaagcctgcaccctccctggcgtcgggactcccccgggccggtccgccccggccaacttcctcgaagcctcacgcggaccaaacctggtcccggtcccgctgcccccgagccccgagtcaccttccctatcactccatcccgcctcccagcctgcactccagatggtcagccagcggagcggagcggcgcggcacgcagagagctgggagagcggccctcgtccttgtcgccgtagtcctccgccacggccgcagctacaacgccagagacggtgctggccgggaccgcgcgcctctagtcgctctgcgtcccctggcaccttctcttgcgtggcgccgggcaggcaggcaggcaggcaagcaagcaagcaagcaagcgggcggggtcggcgccccaggaagggaaagagcgcgagggccggctaacgccgccgccgccgccgcagccgccgccgccgctgagtcagcgcgaagcgcgctccccgcgtcggtgccgcgcgggcgggcgccggcgccagcagtctcttggagagtgcgggcggcagcccgcgggctgacgccggaggcctacaactcccagcatgcagggagcggccggcgcttccgggcggcgaggcgcacacgcgctccctggcgctcgccggaaggcgtggtcaccggggcttgaggtgcatgccgggatgaggcatccggcccaggagtccctacccagctcctaaatccccggctgtgtctgcgtggtgtcagagctcaagcgtcaggttcgccccgagcattccacaaagggcttctagtagttgagagtacggattcacgaatcaggatgacgtggttctaaccacgtgtgagtcaatttaattgcttgtctacggccccaagtgtcccgagtacagcagtgtaaagctctgatgagtgctgacaggttttcaaaattaattaattaatttatttatttattctttgagacggagtctcgctctgtcgcccaggatggggtgcaatggcgagatcttggctcactgcaacctccgcctccggggttcaagcagttctcctgcatcagcctcctgagtagctgggatgacaggcgcgcgccaccatacccagctaatttttgtatttttcgtagagacagggttgcaccatgttggacaggctgatctcgaactcctgacctcaagtgatcacctgcctcggcctcccaaagtactgggattacaggcgtgagccacggtgtccggtccaaaatttattttaaacagactaaaattttgtccatgaaaagaaggagagcattcttaggaagtcctactcacgggatctttcgatgctactaaatgtcacttcatttatttggtcacagatttattaatttattaatgcaacatagaggcagtgtaggcttaggctgcctcgacttgactgccactccgcctcctcactagttgacctcaggcactttactttagtctatccatgcttcagtttactcgtatgtaaaatggggattgttaatagtaccgacctcaaagggtttctgtgaggtttgagttaatacatgtgtttgacacacaatgtgctcaatatttacatttcattgttgattattcaatgtgtactaaatacagactaggttgctgccacagactacaaacaaaacttggagagggaggaatggtaagagcatagaataaaactaatgttttaacagctacctttatttagctgtccaagacactacaccaggcatttcctatataaaataccttgaatcactcttgcatcatgtttctaatttatgtgtttaaaatgtcaggctagtggctacaagatgtcgctaaaggagaactgggttttaattttttcttgtttttagagaaagggtctcgctctgttacccagtctggagtagagtggtcatagctcactgcagccttgacctcctgggctcaagcaatcctcctgcctcagccgcccaaggagctgggactacgggtgcataccatcatacctggctatttttgtttgtttttgtagagatggggacttgctctgttgcccaggctgatctctaactcccaggctcaaatgaacctcccacctcagcttcccaaagtgttggaattacgagtgtgagtccctgtgtcaggccttaattttcttcacgctgctctcagttggcttcccaacgaaataggttctttgttgttctggcatacaaattttcttttgattgtaatccttgcatgcattatgtttctactattcaaattattaattattcaaattaattataaacaagaagtatctcttgttttacttctgagaaaaccaaagtcatggtattctcaagactagagataattcaacaaagcctgtgaatctccctcatttggaatctctctgggcccaatctgttttccactgctagggcgctgctgctaaagctatatcatatgaaaccaccctccctaaaagctcagggaccatctccaaataggagggcgagtgaaactgtaagagctggattgatgggtggaatctggaagctaa

SEQ ID NO: 917078 - DNA, 4001 bp, Homo sapiens
gttgcccaggctggagtgcagtgatgcaataacagctcactgcagcctcagcctcctgggttcaagcaaatctcctgcctcagcctcctaaatagttgggactgcaggcatgagccaccacatccagctaattttttttattttttgtagagacagggtctccctatattacccaggctggtcttaaacatctgagctcaagcaatccccctgccttggctccccaaagtgctgagattacaggcatgagccaccgtacccagccccataaaatctattcttcacaacaaccctaaaaaaggtattttccccttctctttttttacaataaggatagtgaggatcagagaagttaagtcaccttccacacctgaggaaagggatccgcatttgaacccacatctaactctgcaacccatactctttccactctattccactttgaagcaccttcaaggcagggtgctaactcatctttctacttcccccaccagaacctgggaggcactcaatacatatttgtacagtaaatacaatatcatcattctctccccttttaccctcaactccccttcctcctcctacctccctgagtctctacaagcaggtaatcccaagaaggttggaaaatctttcggtggttgacttttgaactgtgactgactagctatgaaatagtaaccttgctttgggacaagtatgtttaagactaattttctgaatgtatctgaaagtaaacttaagaagtctatgtcaatgtaaaggaattaagaaatcttctctagtgcaatgtctctgggacgggagagaaatttgtcaatgggcagttgtgtccctgtttaacccacagcagttcttaacctttgtggggtcgttggcctctttgagaatatgatgaagctattaactctctcccccgaccaaaaaaaaatacactttgggccgggcgcagtgactcacgcctgtaatcccagcactttgggaggccgaggcaggcagatcacgaggtcaggagatcaagaccatcctggctaacacggtgaaaacccgtctctactaaaaatacaaaaaattagcagggtgtggtggcgagcgcctgtagtcccagctactcgggaggctgaggcaggagaacggcgtgaacccagtaggcggagcttgcagtgagcaaagatcgcgccactgcaccccagcctgggcgacagagcgagactccgtctcaaaaaaaaaaaaaaaatgcacttaggggcacacacacacacatacacacgatttcacagaccatttcagggatttctacgctctgaagcccattcatgcatgaaccacttccaaggaacggtaggtttgcaaaactgcttttatatttttacagccttggtatgccttaattacatttttacatttttacagcctttgtgtgccttaattaacctggctggcactttaaaacttggcctcacccttaccctgaagtcacagtgtggctgcataacttatgtaagaaatcggaggatctgtcacaacagtgagtgacaaaaaagggcagacaaattcattccacaagccaaaaacagcgacgaaaagggtctcagcgccacctctagtggggaaactgagcctcaggctcccaacccagcccccatgatgcccagtctgtctagactctgtgctgaacctgaagcccctggccaggtgttgcccaggcccttcctcgcccacccggtctcagacccattctgtggaaccacagcctccaggtcatggctcctacttgtctccagcgtcttcaggagcctaagctggcacttctggttgctggtgaagaagctggagaagaacccttgctggggattcccctgggccagacgctcggggaagacctggcaagagacgtgttgctgctgcagctgctcccctgccgcggggccccgccggcgctcgtccggagctcccgccatgcctcccgcagacctcgccgctgcttcctcctggctcaggcggccagagcgagactgggaaaggtaacctccctcccgccaacgcgaccgcccaggccctccctccgcagggaagaagggcagcctggctgggctgaagacgttaggcgggagggggctttgaacctgacggggagcgcgggaggcggggcgagaggcgaggggcggggcgagaggcgaggggcggggcgagggatgaggggcggggcgagggcatggggcggggcgcggggcccgatgctgttgggcggagctgggtcttgcgacttccctcaaaggctgtaacaacccggctgccgcggatttcgctgctgccctcccagtgtgggtgacatgtctttataagcgttgttctgcagcttcctgctgcctgctgagctctaagggtgtcccgcctcctcgcagacactccttcctcacctcggggcgaatattggccactaactgctcttgtgccgccgaaggtctcggccatcctcccactccctgccttcttccggggcaagccagttgtcatttctggcccgccactttcccgacccctgccatccctcagatccactctgcccaaagatgcctctggccatattgaaagcagtgtttttcagaaacgttttaaaactataaagaatgactagtcacatcaaaatcctcaaaatgtaggaaccaactacattttttcttcccacctgtacccattcgtttaccctactcttctgccccaccccccaccaataactccctgataacaaagcgcaccctgtttacttctacctctcagccttaactcatactgtcatttccatctttaagctccttgcctcagcccctatgattggggcccaggtcaaatctgcctactccacagggcattcccagataccttaatcaaaattaatgtctcctgatctcccaatgtacaaagcactttgtacctgttaatcattttcatcgtagcctgccaggttttatccaatttgtgtgtttctcttttcctactaaattattccactcagctcacacatttattcagcacctactatgatgggccaggcaaggtgtaagagactgaggaaacacatgactaagaaaattgctaaagatgaagagcagcatgtggtttatgtaagaaacatatctgaaaaatataggctcagcaggcctttagggttatgaacagtgctttatgtgtcatagatgctcaatatctaaattgagtgggatgctaggatagtcattcatctggaatattataaaaatacaaacaactcctatgtacatagactattaaagccagaagtcaaaaaaaaagtaactactttttaattaaattcaccttggatacattatttccaatcctcactacaaccctgcaaagtaagtattatctctaatttgcagataaagtgggctcagcaaaattcaataatttatctaggaccacacaactagctttcaatccagttattgaactaaaacacacatatggaaaactaagccattacaattcagtgtgattagtttggaatactgaaggcaggctagatatgcctagaaatggaccatagcctatatacatttgaaatactatttggatttttttcatgctttcttttttaatacatagattcaggtggtttatgtgtaggtttattatacagatatattgtgtagtggtgaggtctgggcttctagtgtacccatcacccaaacagtgaacattgtacccaatagttaatttttcaaccctcacccttcccctcccactctccccacttttggagtccccagtgtctattattcccctctgtatgtccacgtgcactcagtctttagcttccacttataagtgagaacatggggtgtttgattttctgcttctgagttatttcacttaggataatggcccccagctccatccatgttgctgcaaaagacatgatttcattatttttatggctgcatagtattccgtggtgtatgcataaccacattttcttt

SEQ ID NO: 917079 - DNA, 4001 bp, Homo sapiens
gggtccaaaaatagtaaccacaatcattttagcaaatactttttttctttttggaatgttctgttgtaatcccttaaatttagcatacgtttgaaagtttgctttttgaatatgaaaaatgtacgaaatattttatcaattgtgggaatatacaaaaagcatatgatgatttacaaaaaacaagcatgtcaaaaccagcgagcttcactgagaaatttttcagataagttactgtcaaccattcctgtctctaaattttaaacttaataaaattctgtaaagtgttttttaaaaaatcaagatctcattttttagaaatctaacgtctactgaatatttgtatatgtcaatattacatgtgccttcttttttaaagcaacagtaagattagtatgcttattgttatagtttagtttctaatggactttgtaatatcaaaatacatatcttctctaaatattaagtaataaatcacaggattatatttaattcaaagggtaccttcgtataagaatcaaggagctcgataactaagtgctgacagattaagaatgccactgactgaatttcctggatgattttctttattcacttaattcaaagtcattttttaaaagacagagttattatactgcaagcttacaataaataaagtctgaaaataggcagagatcttttcatctcatttgtctaagagactgccatttaatcaaactaaagatataaaggtactttcagtaaaaatctgttcctgtgactgggctcatctccaactacttatttataaaatattagagtactggaataaaaacactaaataaaaccttgatctgacccttccagaagtacatgtagaaaaataagttttaatatattgtgtattctgcaatcagatacttttctttctttaggaacgaaattaaattacatcctttgctcctaaagagattttatgggttttccttgatccccacacactaacacaacaatgcagccaacatttttatacccagaatggggagaggggcattacacccagcgatacgaattaaatcgcagtagctaatgcctcccttaaataatttattctctcttggcagcaaaaaacgttacagcctcttcaattacccctcaccgcaaaccatcgcctgggttgcgatcaatgtgacccagttcctatcgccacagccacctccgtctgcctcctcccgccgggtccgccagtgtcatgggagggggcggcagccgcaagggcgtcctctggtcgccaccccgccggccggcggcgcgaggggcaggcccgggactcaccgggtggaggtgcccttccgcacatcgcacatcatgcacttgaaggcctcggcgctgttccggaaggtgcagacgctacagtcccagtaaccctcatccgaggacggcttcggctgccgcttcggcctgcaggacacaacccggacacgacgcggcgcggggtcaccagcaggccgcgcccggtgcccgggccccgcggccgcccccgccccgccccccgccccaattctgcgacccccgccccgcgggccctcggcgcgccgcgctccggctgagggggaagggagtcaggaagaggcagggcgcgagcgcggccgcagtcgccgccgccacagccgctctgacacccgggcggccgctccggtcgccgccgccatcgcggctccattgtggggcggccggcgccggccccctcaagcggcagcactcgcacaccagcggcgctgcccccgtgctcgccccggtgcccgggcggctagcgaggcggccacccgaagccctgcacgagggccctgccgcccgcacagtccgggccccggggcccgggcgctgttacctggtggggctcttcttgtctcccatggcttggctatcaccgcacgccgagagtcgccgccgcgaccgctctgtttgtcaataaggaggataataagccgggcggaagcgggcgggggaggagggagggagggggcggggaaggccgcaccgccgcgctcgggagccgccgccggatcccacgcagcctccagctgtcggggaaactcctgcctgggcgcacgtgaccctcgccggccaaccagcagccgcgccggagacttcaaacgcggccagcgcggcccagcacccgcggcgagttagccggcgggcggtgcgggggtggccgcggtggccgcggctgcctcgggcgccggcgccgcctctccgcgctgttcccccgttgcccccttggtacccccggctgccggggactgcctcgcgctccagagcccctctgaggaggaaaacgtctgtcccaccgactggcaggggatgctccgtcatcccgtgcgaagcctggtccaaggtagggccggccggcgttcggaggcctgtccaggtctggacagaagtgccagcccgggatctccaggtagaacgactttcctggcctccgctgtccttagctacccagcccccgcctgcagtataccggggggaaggcgggaaccaacacgcagcgccattgctacatgccttaaagcactgtctggtttatgcacacagatgctctaacaagtagggattgtcaaccctaacttagaggaattgaaatcaagactcaagagagattaggtgacttcctctaggctatataattagaaaatgacaaagccaagagtctaactctgttttaattccaaacgcgcccttttggcctctcaggcctctgcagtagctgcttttgaaagaaacccctatatactcataagtcctttttaaatataaggagtttgcatgtcccctcaacgctgtctgctaacaaaagaacaccttcccaggtctctacgtcaacatactaaaggtcctcatactccagactccagcaacagccatctaactggtctccgaagctccacttctacctccccaatgtattcagtaatccacaaccagattaataataaaatgctgttaatactatgccaccactctgataaagaaccactaacgacttgcccacactccttagcctggcattcaaaggcttcacacattttccctacctctgcctccctctcccataaggaaagctgcctcctgacaaagagtgcagatgaaattcattcccttaccagaacccttccttcatgcacatgggttacttctgcataaagtatatccctctttaactgtgctgtttctgtccatctttctaggtttacatcaagtccgaattcatgtaaaataattttatagctaaactacataggaaataatacagtcagaagcccaggattctcagcctgcttctcctgtttcttagctgatagaccttggaagtattgcttaatttctgtaattctcaacgttttcatattctgaattgcatctatatgagattgttgtgcgattaataataacattttttggccggttgcggtcgctcacgcatgtaatcccagcactttgggaggccgaggcgggcggatcacctgaggtcaggagttcacaagaccagcctggccaacgtggcgaaaccccatctctattaaaaaatacaaaaattagccagctgtggtggcgggcgcctgtaatctcagctactcgggaggctgaggtaggagaatcgctggaatccgagagtgagaggttgctgtgagccgagatcgtgccactgcactcgagcttgggcgacagagcgagactccgcctctaagtaaataaataaataacatttttttgagcactatgtgccaggcactttgtaaatccctgcgcatagatgcatattttaaaggactcaaagtactatgcacatggcctcatcgactgcagatgctcttcgatttagaaaggggatacttcccgataaatccaccttaaatagaaaatattgtaaattgaaaatgcatttggtacaccgataaatccatcgtaaagtagaaaaatcgtaagtcgagccattgtaaatccgtagtctagcccttctt

SEQ ID NO: 917080 - DNA, 4001 bp, Homo sapiens
gttgtaatcccttaaatttagcatacgtttgaaagtttgctttttgaatatgaaaaatgtacgaaatattttatcaattgtgggaatatacaaaaagcatatgatgatttacaaaaaacaagcatgtcaaaaccagcgagcttcactgagaaatttttcagataagttactgtcaaccattcctgtctctaaattttaaacttaataaaattctgtaaagtgttttttaaaaaatcaagatctcattttttagaaatctaacgtctactgaatatttgtatatgtcaatattacatgtgccttcttttttaaagcaacagtaagattagtatgcttattgttatagtttagtttctaatggactttgtaatatcaaaatacatatcttctctaaatattaagtaataaatcacaggattatatttaattcaaagggtaccttcgtataagaatcaaggagctcgataactaagtgctgacagattaagaatgccactgactgaatttcctggatgattttctttattcacttaattcaaagtcattttttaaaagacagagttattatactgcaagcttacaataaataaagtctgaaaataggcagagatcttttcatctcatttgtctaagagactgccatttaatcaaactaaagatataaaggtactttcagtaaaaatctgttcctgtgactgggctcatctccaactacttatttataaaatattagagtactggaataaaaacactaaataaaaccttgatctgacccttccagaagtacatgtagaaaaataagttttaatatattgtgtattctgcaatcagatacttttctttctttaggaacgaaattaaattacatcctttgctcctaaagagattttatgggttttccttgatccccacacactaacacaacaatgcagccaacatttttatacccagaatggggagaggggcattacacccagcgatacgaattaaatcgcagtagctaatgcctcccttaaataatttattctctcttggcagcaaaaaacgttacagcctcttcaattacccctcaccgcaaaccatcgcctgggttgcgatcaatgtgacccagttcctatcgccacagccacctccgtctgcctcctcccgccgggtccgccagtgtcatgggagggggcggcagccgcaagggcgtcctctggtcgccaccccgccggccggcggcgcgaggggcaggcccgggactcaccgggtggaggtgcccttccgcacatcgcacatcatgcacttgaaggcctcggcgctgttccggaaggtgcagacgctacagtcccagtaaccctcatccgaggacggcttcggctgccgcttcggcctgcaggacacaacccggacacgacgcggcgcggggtcaccagcaggccgcgcccggtgcccgggccccgcggccgcccccgccccgccccccgccccaattctgcgacccccgccccgcgggccctcggcgcgccgcgctccggctgagggggaagggagtcaggaagaggcagggcgcgagcgcggccgcagtcgccgccgccacagccgctctgacacccgggcggccgctccggtcgccgccgccatcgcggctccattgtggggcggccggcgccggccccctcaagcggcagcactcgcacaccagcggcgctgcccccgtgctcgccccggtgcccgggcggctagcgaggcggccacccgaagccctgcacgagggccctgccgcccgcacagtccgggccccggggcccgggcgctgttacctggtggggctcttcttgtctcccatggcttggctatcaccgcacgccgagagtcgccgccgcgaccgctctgtttgtcaataaggaggataataagccgggcggaagcgggcgggggaggagggagggagggggcggggaaggccgcaccgccgcgctcgggagccgccgccggatcccacgcagcctccagctgtcggggaaactcctgcctgggcgcacgtgaccctcgccggccaaccagcagccgcgccggagacttcaaacgcggccagcgcggcccagcacccgcggcgagttagccggcgggcggtgcgggggtggccgcggtggccgcggctgcctcgggcgccggcgccgcctctccgcgctgttcccccgttgcccccttggtacccccggctgccggggactgcctcgcgctccagagcccctctgaggaggaaaacgtctgtcccaccgactggcaggggatgctccgtcatcccgtgcgaagcctggtccaaggtagggccggccggcgttcggaggcctgtccaggtctggacagaagtgccagcccgggatctccaggtagaacgactttcctggcctccgctgtccttagctacccagcccccgcctgcagtataccggggggaaggcgggaaccaacacgcagcgccattgctacatgccttaaagcactgtctggtttatgcacacagatgctctaacaagtagggattgtcaaccctaacttagaggaattgaaatcaagactcaagagagattaggtgacttcctctaggctatataattagaaaatgacaaagccaagagtctaactctgttttaattccaaacgcgcccttttggcctctcaggcctctgcagtagctgcttttgaaagaaacccctatatactcataagtcctttttaaatataaggagtttgcatgtcccctcaacgctgtctgctaacaaaagaacaccttcccaggtctctacgtcaacatactaaaggtcctcatactccagactccagcaacagccatctaactggtctccgaagctccacttctacctccccaatgtattcagtaatccacaaccagattaataataaaatgctgttaatactatgccaccactctgataaagaaccactaacgacttgcccacactccttagcctggcattcaaaggcttcacacattttccctacctctgcctccctctcccataaggaaagctgcctcctgacaaagagtgcagatgaaattcattcccttaccagaacccttccttcatgcacatgggttacttctgcataaagtatatccctctttaactgtgctgtttctgtccatctttctaggtttacatcaagtccgaattcatgtaaaataattttatagctaaactacataggaaataatacagtcagaagcccaggattctcagcctgcttctcctgtttcttagctgatagaccttggaagtattgcttaatttctgtaattctcaacgttttcatattctgaattgcatctatatgagattgttgtgcgattaataataacattttttggccggttgcggtcgctcacgcatgtaatcccagcactttgggaggccgaggcgggcggatcacctgaggtcaggagttcacaagaccagcctggccaacgtggcgaaaccccatctctattaaaaaatacaaaaattagccagctgtggtggcgggcgcctgtaatctcagctactcgggaggctgaggtaggagaatcgctggaatccgagagtgagaggttgctgtgagccgagatcgtgccactgcactcgagcttgggcgacagagcgagactccgcctctaagtaaataaataaataacatttttttgagcactatgtgccaggcactttgtaaatccctgcgcatagatgcatattttaaaggactcaaagtactatgcacatggcctcatcgactgcagatgctcttcgatttagaaaggggatacttcccgataaatccaccttaaatagaaaatattgtaaattgaaaatgcatttggtacaccgataaatccatcgtaaagtagaaaaatcgtaagtcgagccattgtaaatccgtagtctagcccttctttttaaagacaaggcaattagggcccaggttaaatggtttttctttgatgagcaggccagggt

SEQ ID NO: 917081 - DNA, 4001 bp, Homo sapiens
gtaatcccttaaatttagcatacgtttgaaagtttgctttttgaatatgaaaaatgtacgaaatattttatcaattgtgggaatatacaaaaagcatatgatgatttacaaaaaacaagcatgtcaaaaccagcgagcttcactgagaaatttttcagataagttactgtcaaccattcctgtctctaaattttaaacttaataaaattctgtaaagtgttttttaaaaaatcaagatctcattttttagaaatctaacgtctactgaatatttgtatatgtcaatattacatgtgccttcttttttaaagcaacagtaagattagtatgcttattgttatagtttagtttctaatggactttgtaatatcaaaatacatatcttctctaaatattaagtaataaatcacaggattatatttaattcaaagggtaccttcgtataagaatcaaggagctcgataactaagtgctgacagattaagaatgccactgactgaatttcctggatgattttctttattcacttaattcaaagtcattttttaaaagacagagttattatactgcaagcttacaataaataaagtctgaaaataggcagagatcttttcatctcatttgtctaagagactgccatttaatcaaactaaagatataaaggtactttcagtaaaaatctgttcctgtgactgggctcatctccaactacttatttataaaatattagagtactggaataaaaacactaaataaaaccttgatctgacccttccagaagtacatgtagaaaaataagttttaatatattgtgtattctgcaatcagatacttttctttctttaggaacgaaattaaattacatcctttgctcctaaagagattttatgggttttccttgatccccacacactaacacaacaatgcagccaacatttttatacccagaatggggagaggggcattacacccagcgatacgaattaaatcgcagtagctaatgcctcccttaaataatttattctctcttggcagcaaaaaacgttacagcctcttcaattacccctcaccgcaaaccatcgcctgggttgcgatcaatgtgacccagttcctatcgccacagccacctccgtctgcctcctcccgccgggtccgccagtgtcatgggagggggcggcagccgcaagggcgtcctctggtcgccaccccgccggccggcggcgcgaggggcaggcccgggactcaccgggtggaggtgcccttccgcacatcgcacatcatgcacttgaaggcctcggcgctgttccggaaggtgcagacgctacagtcccagtaaccctcatccgaggacggcttcggctgccgcttcggcctgcaggacacaacccggacacgacgcggcgcggggtcaccagcaggccgcgcccggtgcccgggccccgcggccgcccccgccccgccccccgccccaattctgcgacccccgccccgcgggccctcggcgcgccgcgctccggctgagggggaagggagtcaggaagaggcagggcgcgagcgcggccgcagtcgccgccgccacagccgctctgacacccgggcggccgctccggtcgccgccgccatcgcggctccattgtggggcggccggcgccggccccctcaagcggcagcactcgcacaccagcggcgctgcccccgtgctcgccccggtgcccgggcggctagcgaggcggccacccgaagccctgcacgagggccctgccgcccgcacagtccgggccccggggcccgggcgctgttacctggtggggctcttcttgtctcccatggcttggctatcaccgcacgccgagagtcgccgccgcgaccgctctgtttgtcaataaggaggataataagccgggcggaagcgggcgggggaggagggagggagggggcggggaaggccgcaccgccgcgctcgggagccgccgccggatcccacgcagcctccagctgtcggggaaactcctgcctgggcgcacgtgaccctcgccggccaaccagcagccgcgccggagacttcaaacgcggccagcgcggcccagcacccgcggcgagttagccggcgggcggtgcgggggtggccgcggtggccgcggctgcctcgggcgccggcgccgcctctccgcgctgttcccccgttgcccccttggtacccccggctgccggggactgcctcgcgctccagagcccctctgaggaggaaaacgtctgtcccaccgactggcaggggatgctccgtcatcccgtgcgaagcctggtccaaggtagggccggccggcgttcggaggcctgtccaggtctggacagaagtgccagcccgggatctccaggtagaacgactttcctggcctccgctgtccttagctacccagcccccgcctgcagtataccggggggaaggcgggaaccaacacgcagcgccattgctacatgccttaaagcactgtctggtttatgcacacagatgctctaacaagtagggattgtcaaccctaacttagaggaattgaaatcaagactcaagagagattaggtgacttcctctaggctatataattagaaaatgacaaagccaagagtctaactctgttttaattccaaacgcgcccttttggcctctcaggcctctgcagtagctgcttttgaaagaaacccctatatactcataagtcctttttaaatataaggagtttgcatgtcccctcaacgctgtctgctaacaaaagaacaccttcccaggtctctacgtcaacatactaaaggtcctcatactccagactccagcaacagccatctaactggtctccgaagctccacttctacctccccaatgtattcagtaatccacaaccagattaataataaaatgctgttaatactatgccaccactctgataaagaaccactaacgacttgcccacactccttagcctggcattcaaaggcttcacacattttccctacctctgcctccctctcccataaggaaagctgcctcctgacaaagagtgcagatgaaattcattcccttaccagaacccttccttcatgcacatgggttacttctgcataaagtatatccctctttaactgtgctgtttctgtccatctttctaggtttacatcaagtccgaattcatgtaaaataattttatagctaaactacataggaaataatacagtcagaagcccaggattctcagcctgcttctcctgtttcttagctgatagaccttggaagtattgcttaatttctgtaattctcaacgttttcatattctgaattgcatctatatgagattgttgtgcgattaataataacattttttggccggttgcggtcgctcacgcatgtaatcccagcactttgggaggccgaggcgggcggatcacctgaggtcaggagttcacaagaccagcctggccaacgtggcgaaaccccatctctattaaaaaatacaaaaattagccagctgtggtggcgggcgcctgtaatctcagctactcgggaggctgaggtaggagaatcgctggaatccgagagtgagaggttgctgtgagccgagatcgtgccactgcactcgagcttgggcgacagagcgagactccgcctctaagtaaataaataaataacatttttttgagcactatgtgccaggcactttgtaaatccctgcgcatagatgcatattttaaaggactcaaagtactatgcacatggcctcatcgactgcagatgctcttcgatttagaaaggggatacttcccgataaatccaccttaaatagaaaatattgtaaattgaaaatgcatttggtacaccgataaatccatcgtaaagtagaaaaatcgtaagtcgagccattgtaaatccgtagtctagcccttctttttaaagacaaggcaattagggcccaggttaaatggtttttctttgatgagcaggccagggttag

SEQ ID NO: 917082 - DNA, 4001 bp, Homo sapiens
tgatacaattcaaatggagatgtcttatctctgtttagccaaacagcgttgccagcagactttcccagctttgctccagttgtacttgtaattagaggaacggtgattccaaatacatcttctccagtcaacctacgcataaagaacaatttcattatgtgcctcaagcacaagtggtggtaggttctactgttcaccttccagatttctttctggttacttgctccaggaaaacttccttgacctcctaaatctgaattcttgttcctcttatgtattgttacagtacttactctattcattctgaacctcatgagtggttccaggcaggttctaggcaggccaaggggaagtgctacataacaatggactagagattttgaaaggctgagtgggaaggagaaaactgggtgaaggggtgtcaggaagagacactaaaggaaatcttctaaacgccttttaaacatgtgctttgctctgttgcacatgagctagccctatccttcacctctctcaagaaaatgctattagacccgcattacttgtcaattatttggagttgaaaaaactttttgagataccaaccaaggactaacactagtttcatggagggtgcagagctaaagcagaggctagctactcaaggaggcccagtcacgttctggtataaacacacaaaagcagtttctctaattagagaggacgacttaggcgaagcaaaacagaccgaccaaatcttcactagtggtctgtttcccttttttttttttttttttttgagacggagtctccctctgttgccccaggctggagtgcagtggcgcgatctcggctcactgaaaccttcgcctcccgggttcaagagattctcctgcctcagcctcccgaatagctgggattacaggcgtgcatcaccacgcccagctaatttttagaatacaccgtttactcttaatacccttaattcagccctttaattcttattagccagtgttattaacgccattatagagccttaatggggataaaaccaacaagagctggaacgaagggcagcaactacaatcctaagagtgaatcacaggctactagtgtgtaaattatttggtcccaggatttccccaaggtttaaaggcacttacttgttgatgaactcatatccggacatgatgttgcctagttgatcagatccgcccagctggaccctgcatccataacgctggaagaggtaatagaagtcataggcctggagcacctggtaaaagaactcggccaagctcatgccctcggggctcttgagccgcagctgcacgctctgccggctcagcagcgtccccatgcggaagtgaccccccactgccgccaggaagtccaccaggtgctgcttctggtaccaggccgagttgtccagcacagtgaagctgccccaggagcgcccatcagtgaaaagctgctggtgattagccgccagggcctcaagccctaggcgcagagctcgcgcgttggctcgcacgcgctctgtctccagcgcctcgcgttccttggtacggccgctcgggtctcccaggcgcgccgtggcgcctcccaccagcgcgatcacgttgtggcccgctcgctgcaaatgaaacaggcccagcagcgcaagtagatgacccacatgaagcgagtctgccgtggggtcgaagccacagtaaatggtttggggaaaactcgccgtgccacggtcgaagagctctgggagctctattttcgtccccgtctccgggaagaagtccttgaacagacctcgagccttctgcgctgccagtaacccctgagcgcccgagtgggccttacgcagccccaagggcaacaatactgagagatttagggtaccagaccaccggccccaggaaaaggaccgcaagatgggcgccgccatcttggtagcggcacgaagggaatgctgggattgcagaggctcccaccacacccacctacttacagctcctagggaaggtgcttcagtgtttttctgcgcatgcccgagacggttacgtagttacggagcttgcgctctcagcagttgagtcccgactccaagtggcgattccgcctcagagccgtcgccttacgttcccttaaacttaatttttccatcagcagtgtggatctgcttatgatagttcctacctcataaggctgttgtgagccttaaaaattaaagcatttggcacataacgcttcacaaatgctaacttgtatttacattttcacgtaaaaagattgtgatgcgcaagttctttgaagtcttggttccatgcaaaaagctgttcacagaggttgagaaaggttaggaattggtttaagttcgcggagagatagggagttgctgctgagacgcaagcaatttcatagtaccgattccctaattgcacctcgtccccagtattcatcggctcttccaggaggtggcagtcttgtccaaggtatagcaagaaaaactcagtgcaataaagtacatgcatcaagtcctgtggtttatttattttaaatacagttaactaggttgggacacagcttagcatgagtggattcaagttagtaatcacatcgtgcagcgtgacaggtgctctgaatactgaccagggatgaggttcttattggcagctggctggcaggtgatctagcttcaaaatcccatgttagagcctgatttctaggaccgctttcaaaatcgtcttaggtagaattccctggactctgagttgggggggagactggtttgcaggagggtaattggagtgtgctcttaagaacaacacctataatggagtgagggaggccgggttgggcggagggagaaagaagttgaactgtgaacaatttgtaatagaggcctcaggcaatccagtaagggctctggagccgggatttcctttcagagtcatcctgaattgaggccagggggcagacctttagaccctcttactgactgctcattaaatgtgggatgtttctggggaggaagcaaaacgctgggttaaggcttttggagagtgagatgtgcaggaagggactcagctgtgagcaataagcaaccaacactcccagcagctgggggattgagtgccttggtcctgtgactgggatctgggccatgttccaaatcattccctacaggacttttccattttttaacgttataaagttatctaacaaaatgaaaacttattttaataattagtttctttgcatgtataattatcagtgaattagtttctcattgccaaatagtaacttcaataggattttgagatactcattcaataggctattaaacatactcccaactgcttaagaaaatagtgtgttcaaaatatcttaaaatttgcaatcataacctgttgatcttcagtgttttttttttttttaagtgtcactctgttgtccacactggagtgccgtggcaggatcatggttcactgcagccttgaactcctaggctccagcgatcttcctgcctcagcctcccaagtagctggagctacaggtgtggactaccatgcctggctaatttttattttttgtttttgtagagacgggggtctcactgtattgcccagggtggtcctaaactcctggcctcaagcaagcttcccacctctgcctcccaaagtgttgggattacaggcatgagctacttcgcaaggccaatctgcagtcatatggtccaccactttgatcagggacagatttcagtaggtatggcaggaaattctcctgagcacacgtaaggaaactcacatctgggccacttgtcacttgaaagccaaaaacccaagagaagagctgtagtgaaagtaaagttagctttattcaagagaccagcaaccctgggggatgcagtgagctagcgttcaaagaccacctctggtttttaagggcaattaagagaaaggatgataaaaagatttttgtgaaacgtgtgcagtctcaggtcggcagtaaatcattgcttt

SEQ ID NO: 917083 - DNA, 4001 bp, Homo sapiens
cagaacagtacaggattaagtgaaaaaccgcaaaagctttctacaaaataaggtatcattaacaatgttatcctaacactgctttggagaacacaaggttttctctctcagacatctggcagaaagtgttccaagaaatatttgctagaaacaacatcacaatgtactactgactagatttaagcaacttttagtccagcaaaatcaggcctattttgtttcttaacctacacaggttacaattagcatgttgtttggtagggacttagtaaaagccctagaaaaaaaaaacaagaaaatagtcctctcaaggtggggaatattgaatacacttctctcacattgctccctcaactttcttcccaaaggggaagtagggctcagagagatgagacaaacatgccccaccccaaatagtgaagaggtctccgaagcatcctacaccatctgttaacgttcctgtttataagagcgaacgatatggacacacaccctttagggaggttattcaccacccacctgctttgcaagcgtttaagaactcacacaggggcgttacttacgaaaagaacgcttgttatgtgactaaaccaacaaccatcacagaaaccctttccatccactgcccccccaaatctcaacatttcatcttcctgtttcccttcctacgttacaagtgccaaggtaacaatgttttgaactaacgtcatacccccacttccgacaaagttttttcagctgctacaccacgtgcgttcccacagtccgggaagagggaagcgtgtagccattggtggacactgaatggctgtttgcagccgtgggcacagagagggggaggaagacgtgggactaagacccaagtttcccggagacgattgcaacatctctttgctggcatgtggccaacaggagcatggcgtctttcccatgcccatgtgggaagggcgtcagggacagacacctgacccttcctggcaagaagcttttctatctttccctccccgtctccttctagcgccctcctcttccccaaaggaaatgctctcctttcccagatcccaagcaaggaccccaaagcgccaggcccacgtgtcggtccttcccctacatccatccctacccaaggtcccctctcccagactgcctctcctttcttctccaaacgcaggcattttccaccacgcgaatccgcaacagtgcccgtctgggagacagaagttaagacctaaactttctggcccggaaccagaagggagatgcacacggccgccaggagcgcagggcgcagcgcgctcacctgggagcgccggcaagggaggcggccagcgctggggacccggagacccctggggacccggagatccctggggaccctgtgctgtcagcgtctccagcccgggtgggagatgtagcgcgagctgcccacacgtgctccgcggccggctgggcccgccccactacggcagcccctgccctccctggcctgactcaccgagaacttttttctccgcgtcttcgctgccggcggcggtggctaaagaggcggcggccgcggtgcccgtggctgcgggggccgcgtccccaccggggtttcctgcgacgtgggcggcgggcgccggggccgcggcctggggcgcaccgctgcccaccgggctcttgggcgcggggtcctggggagccgcggcggccgcctccgtcggagcctgcgggagggtggtggtggtggtggtggtggcctcgcccgcctcactcatgcctcctcctcctctgctctcgctcaggcgcctcggtggcggttggtcggcggttagcgcggctggtggtcgcggcggccggggctcgctctcggggaggccggggcggatctcgcggcgcaggcggcggcggccgaggtggggtcgcgcggcggaggcggctcgagcttcgtgctgcgcgctctctcttgggctcctcgctcgatcttactgccccaaaaatggccccgcacaagtttttctaggcggcgcaccggcccgggagggaagggcgggcgaggggagagggtggggaaacttggctcgggagtcgggccctggactctcattagcatttaaaggcgcccggtgcgctttctatggctccaatccgccgggacgcgagcgcgcgggtcgcgttgcagaaccaaggaaagccagggtgaacggggcgcccgggttgtcttctggagcgttccgaggagcccgcgctgctgaccctttgttggagcggggtgcattggctctcctccctcaacccgtcttgacacccgcagctgacaaggagaggtaaaatagggcacccaaactactctgcgctttaccctctcaaacacttgtttttaaatcctttgcatctagtcagtcattcaacatgtatcaagcaccagcagctattcgtagcacagctgttaagacctggaataataaaaccttaagactatttggcaacttactcctgaaaggtaatatacggataatttcatctgtaacacgcagatgaggaaattgacctcacagatttaatgtaaattcagagtttacaccaatttaaccgcaacaaataaggagctgtcaatatatatttaataaggaacacacacaaaaaaagctgaataaatccacttcctaccttctgctccagttgcctctgccagctggtgaaagcttaaggaactgagccctcttagcctcgaggatgagaggtatagagaaacagatcacccaataaacattattcccaagttgaagagcccacatgccctttgagaatgggctggatggtagtaaacacagggccagagggtctgggatctgtacccaaagactgtctggaatacaggactatttggcccctagggttcagacagactaggtataaattctggctttgttttttattaaccaggttaacttgggacagagattcaatgtcccagagtcggtttcctgctttatgagaggttctcaaaggtgacatgaaaagtagatgagattatcatgtgtcactccagtgtccggtccacctaaagctcctttgttttgtttgttttttaagttattgcctgttccctcaaacaatttaccaaatttttttccaggaatatgtctgtaatgtcgatgtctaccttaacatcagtagggtaactatcaagtgtaattcatctttgtatctccactggttagtacagtacgtagcacagagtttggacatagtgaatgtttacaaaatgaaaacagaccaaattcttccaaactcaattacttatctgcacatttgctatcaattattatgaaactttcctgaattcttactttcttatttcatccacaaaaaacacaaagaaaataagttatttgaaaaaatagcaaattatgtaattttgagcttttctatgtaattcatcaatatttaaaaaattacaaactcttaaatgttagattcatattttagtttgacttcagtatggagcatacagtgatgttatataaatgtagatgcttttaaaatgctggtctaattctaagaatgattaaattatttcttcatgtgaaagattatggtcttaattacaattaaattataaacatgatttattctggtgaggactgaccattgactttcttattcagcaaaatgattatcattgctatttacctttcagaattacattacaagaaaaaaaagtaaggagattgaactcttcaaaccgatccaacagtaaagccttttaaaaaaattcatccttggaagtaattcataactaacaggtgtgatctccaacctctggaagaccctaaaataattacagatgcaccctgggatttcctagaatttgtgctggactggcttccaaaactactcatcattgtcatccaaacaaagcagtgagcagctggaagttgttggtattgtactaaataaatctaaagaaaattagaacaaatatgatctatgttttaataatcataagtaggaagcaa

SEQ ID NO: 917084 - DNA, 4001 bp, Homo sapiens
catgaatctgaaaccaatggctcagttacagaaatgtatctgaagaacaatgagcaagatttaccacatgtgaaaagtgctgagtgaatgtaaccaacaacaataaaaatgaagaaaagcggccaggcacggtggctcacgcctgtaatcccagcactttgggaggccgaggcgggcagatcacccgaggtcgggagttcgagaccagcctgaccaacacggagaagcccccgtctctactaaaaatacaaaattagctgggcatggtggcgcatgcctgtaattccagctattcaggaggctgaggcaggagaatcgcttggaggcaggagaatcgcttgaatccaggaggtggaggttgcggagagccgagattgcgctagtgcactccagcctgggcaacaagagcaaaactccgtctcaaaaaaaaacaaaacaaaacacacacacacacacacacacacacacataagtattttaaaacctactaattattgctattttttttttaaagaaacattgtcttgctctgtcgcccaggctagagtgcagtggcacgatctcagctcactgcaacttccgcctctcgggttcaagcgattttcctgcctcagcccctctagtagctgggattacaggtgcccgccaccacgcccggctaatttttgtatatttagtagagacggggtttcaccatgttgaccagcctggtcttgaacttctgatctcaggtgatccaccctcctcggccttccaaagtgctgggattacaggcgtgagccaccttgcccggccctgcacgttaatttttaaggcaggacccactggctcctgataaaaacaactatttgtaccccttctgatttttatttataaaggaaaggaaatttttctttaaaaagaatgaaccacggctgggcgcggtggctcacgcctgtaatcccagcactttgggaggccgaggttgcagtgagccgagatcgtgccattgcgctccagcctgggcaacaagacagacacttcgtctcaaaaaaaaaaaaaaattaacgtgccaggggctgtgtgagggaaataaatattacaatgtcaaacattacgctagggtctatggtaatttcatcaaaaacaaaagaagttgacatttactgaatgttccccatgtgccaggcacagtgttatgctcttgctttgaggctttgtgaacaccatgaactccagcaaattttcttagctttcgtatgcctcggtgtctcagttaccgcacttggaaatactgcgggtaagcgctcagcgactgtttgctacagttattgttatcctcacaccaggagggtggcgtcaccgcttcaccaataacctagattggcagcgaatgtgcaccaagctgagctttcccagccctcggagtcgcccgtttccttggcagccacgtccgggtttccccaagccaccatttatctgtttgttttttggcgggggtgggagttggcagtgacgcgaggaagttggggcccaatgaacgccggtttttcgctcaatggctctgactcgctctccaacctgaaaccacggttcaaacccgaggagaaaaggcgcgaaaggaaacccagtgggccctccccgcgccgcgcagggaggaaccgaggcgggagagccaccccggaagaggggcggtccgggcactgacctttactctcccgccggagtcaggcccaaattcggccattctcttgaacatattgtcccacggaagaagccgccgccgccagggaaagagaccggggctggcggggtcgccgctcccctcagagaccgcgctcctgtcgcgcgggcccaggcggagggtttctagccgaaggagggcgagttacttgggctcacggcggtgagtaaccgtcaactcctcaggccgactgtgctcctgaaggccattcaggcccgcgcaggtggagaacgccgcgaaaagaggggcgacggccgcaccgcgcgcaggcgcaacgggctcgcgtatgcgcacgcagtgtacactgcgcacgcgcctggcggctgcagtcacatcacaggaccagtgcaggagttccaaaccaaaaaaaaaatgaaaggcaggaaataataaatgacttcaaaaagttgtccagatgttaaggagatgagtttccacactgaaagatcctactaagcacccagcacaaatattaaagcatccacgtcaaggcatatcattgtgaattttctgaacatcgaggaaaaagagatcccacacccttccaggttatacagactatagaatcagagtggcttcagattgctcagttagaatctaggaagccatacggcactgtcttcaaaactctgagggaaaattacttccgatttagtcttcaatactcatccaactaccaatctagtgtgtgaatagaatagagtttcagatgtgctaaatcactacacacaaaaaatagtacctatcttacctttctcagtacctccaggaagatcctgtagatctgatccaccaaaatgagggaataagccaagaaggaggaaattatgaaatgcaggaaatacaataaataacaaacacagaaaatagtaagatcccaagatgatactgaaagagctccgggaacaatagctgtgtataggcatagacggcaacgcatctagattagattcggtcagaaatctttgggagacactgcttcagaaggatgggattgacaaaattccagctggcgttgaatcaagaggagatttgaccgagagtttggagtttaactcatgacaggtacacagaaaactaagcggctgtaagaattatgcagctattaattctagggaaaacaaaatcttgtgcaagaaaggaaagtaattgtatttattgttacataaatactgagtattggccgggcgcggtggctcacgcctgtaatcccagcactttgggaggccaaggtgggcggatcacgaggtcaggagatcgagaccatcctggctaacacggtgaaaacccgtctctactaaaaatacaaaaaaattagccgagcgtggtggtgggcgcctgtagtcccagctgcttgggaggctgaggcagaagaatggcgtgaacccgggaggcggagcttgccttgagccgagatcgcaccactgcactccagcctgggtgacagagcaagactccgtctcaaaaaaaaaaaaaaaacaaaacaaaaaaaaactgagtattgatcccccctccccctcaaaaaaagaattacatttagaaggatgggctttggagaagggtactatgcttgatggggatggaggaggaggaaatagagcttaatctttaacttccatagtaggaagtcagtatcttaaaatggaaaaatcaagaagaagcaatataggtgtaatattgaaaagcatggagataaatattttaaaaaataagctaaaagagtagaaaatactgctgattgtaatttttagtaattccacttaacaactgtaaagaaaatactttttaaaagacttcactaaatagaagtgcaagggatgtgctcagggcttagttatattagtgccacatgaagagctcaattgtcatatggatgtcactgcatttcaaccaagataggaactgagtttctttgaaaatgatcaaacattgatattgatttttattctgttgccagaataagagtagaaatttggtttgggggcgtaattatatttaaaacaattggtatgactaagaaatatttatcaaaaactaaagcaaaatctccaacaaacattgctttccctcttcagtctactttgtctaatctctggcagtttcctcaatcagcctgtgttgttgggttatcctggcacttcttggacatgtcctatctctgtttctcagctgtcactcttcaactctctctccgctaccttgactcatcctttgtacacctcagggtatctcgatatgcataaactcattcgtttttagtttaatcacgtcagaatgg

SEQ ID NO: 917085 - DNA, 4001 bp, Homo sapiens
gtcaggggcttggccctggcagtgctctccagatcaggaaaggtagagtgacaggcctggaggaggtcctccatacccagacgctcagctacctcgtagatgaccccaacattgatcaggtctgtgaagagttctgaagtgtagacaaagctcagaaccttctcaaagttggcaggggtgatgaagtccaccacataggtcctggcagcatcaagcccagtattcaggaagaggttctggaagtagccagctgcacaggccagcacagccttgtgggccgggaaggagcggctccccaccacaatggtgacgtcgcacatggtctctgagagccggcacttgttgagttccttcagcaggttgttggggtggttggtgctttgcagtttgatcctcatgcccatcttagcagctcctatgaaattacctccttatcagcacagttaatctgtggatagcaagagaaaaagatggatggccaaacacatccgtgcaaaagaggggctatgcaggagaaaataccatcactctgaatgcttccaagccccaggtagggatcaggagtaaactggcatggagagttcctccattatgacaaggcaatgacatctccccctgtatatactcaaagagttatgacaaaaaccaaaacgactgatgacaatctgatagcttggttttaagctggtgcctagagacgaaccagaggcattcccttggacacaatcttatacttcattaccagagccactggatcaaatttttctcctattaatttcctcccaaatacaagctttcctaattcattgagcatattcttttccctcatgatgccaaataccatgcacatgcttgaacacaactatcaaagctccactagctactgaggaacatataaggtggttccgttttttagctttgtcattgctgtgtcttcaacctctcaataatctccaaataaatctcacgttcttgaatccccatctctctctgcctatactacatacccgctctctggcctttcgataacccagagcccctccagatattgctttatcacagtccctgtattctgtgaagttaaaacactcagaatgcacagtaagaaaagtagaacacaactgtggtagtatttaatattactttaatatgttgtattctttttcgccacccttttcggggtttatattttgttgtccctgcactaacagatttacttgatgccgcaagaaagacttctaattatacaggtaagactcctagaggcttgttcactaccactttctgccctttctgactcctgcacgactaaggaagaagagctacttgcatccctgttcagtctcacaactctgcccaacacagcccctttctccatctctccagattctaacaactcccaactttttctggggcccaggaagcgtctaagtattgtggggtaccggccaagcatctcccgggccctggtggccacccctgaacgatgggcgggtcggagcactgggcagccagaggagagggtgggagagggggaagctgggaacttccaaggacaccccaacaatccccgggcgccgcggtctcccctccggagtcgcatctgggagggaagggcgctgcatcggctggggcgctccctctggaggcaacgagcgcctcagtccctccacaaacagcgcggggctcacccgggtgagcctgttgggggcatggggctgaataaggggccaagcgaggggcggcggggccggccggggtcggcgcgcgggcggggaggatgggtccggccgaagggagcgggcaagagggaccccagcaagagcgagataaatgccgggccgaaggtcgggcttcggccaggggcagccctcggcctggccgcgcttacccggctctgcggcgccccgagcaccatcgccgccgccgcttcacacaaaggccccggcccgccgtgcccggcccgacgaggaggcggcgccgccggccgcggccagactctccatccgccgcgcggctcgccgcgacggcccgggccgcccccgccgcccggcccgcagcgccccccgccgtcccggaggaggcagcgccccccgccgcccggccgcagcgccccccgccgcccgggaggaggcagcgcccccccacggcggggccgggtccaggacctgcgcgaggggtgcaggggcttccaagtccccaggctggctttttctaagcgcccatccactgtgcgcgggacttggtgcctgaagagtgaaaaaccctatccaaactctcttcacctcccctgttctacgctcacagttccaaaagcttctcctcagaacatctactatgggcattttacaaaatgttgtaagattgtttgattactatatatctcctccactaggctgtgggcttcctgaaggcagggatctgtggctttgcacacggccgcaggtccacactgacccttaccacacttcctggcacaataagtgcttaatacattaagcctgcttgaatgaatgaaggagcacttgagggctagaccgctactactggacccttctgataatccactgctgtccctccttccatctaggtggccaaatgaagaaagtcaccggatctcactgtactttggcaccccaggcctgcttcctgaagcctgccctccccaactctgtgtagaactcgatcactcttcctccccacccttctcccaaatcatcttttcaaatgcttctgcccaagaattgtcatcaaacgaaaaccacctacactgcctgccccacccaccaccaccaaagacattagaagtcttcgtcatgtcgccctccctccctcagtacagaggaagctcttaggctccaagacccttcagtttcatcctctctcccatcccatcccagtcactgcctgaaaatagcttgcagccaaggacaaactcccaggacaggcgcatggtaggattcagtaattccttgatggataagtggaaaggaagggacacactgaatgttgccaacagatctaagccagtttggccattcagcaattgtccattctcttgatgaatttgggagattgtgtgtcctcctttccacaacctcattaactggtggcagactatactgaaagcaagcactataccaaatgctgccaaacatgtaacatttgttagccaggagatacaaaaacagccatagaactgttcttatagtttggggatgaggcatctcactttaccatctagtgaaagggtcacttagaggttgacacaatgtttcagtggcaggcccagctctcacagttgtgcaaggtgactgagtctccctaaagtggaatatcacacagccagcaggtccagacctccagcatgactctggagacagagggctgctgggcttgcaagggcctgggcctatacagtctttctaaccaactgccccagccatctctggagggttgaccccaataaacttcacatgaaaacaaatcatccaaaagacgcaggtgaaagtatataccacttatactgaagtctttttaaagtaaatcaccatatagtcacaataacaaacatatacaaagttaaatggagaagaaagggccaggaatttagtcaaggtcttgtggaccagatctctttaggcatcaactgttttacaacaggaaagggagggtcaggatcccttcacacattcttcaagtacaaacacaggaatctaacttaacatttgtcttcatttttttctggagtccccagtactgcaatttttgtcagtcccactagagagcaatctttctgcacttaatgttcctacttgcaaagcaattgtctcatctcagcctataagcctaactcccaccaagtctgagcagaaccaactcttgtagctttcatgacccagagaaagcccctagactctgcaaaagtgtccccagttttaagccctatagatagataattttgaaaagtcaaagagatgactcactggaaaaagggtcta

SEQ ID NO: 917086 - DNA, 4001 bp, Homo sapiens
atctttccttttgagctgaccttattaaagttgtggaagtgaaattaaaactgcagtcagtatctgaatagtctggaaggaaactgggaatagtgcccaagatgggctactgagctactagggctgtagaagatgggacactggtaacaaaacttccttaaccccctttccttttcctcaggtaagggctctgtacacatcaaatctctagaagccaagaaatcctgggtgaagagactggtgtcaccagcttgaggggagtctcaaaacctgtcatattttagtattccctcccagccatcatcactgtcaacggcagagaggtaagccccttctatttcaggataggagttctaagttagagtctccacttctagatttcctaggacaaaccatttgtgataaggtcaagtgggaaggagttaatttcacaggaacaagtgacctttccccattccccacccccttcctactcccctatgtgaagatcccactgacatccaaccacaccattcctcaacccagaaagatcctctttatttatagactccataaaagctttttaagtctcctatttcccaagagagctttggaatgtcagtccactgccctggttctagccctcccctctctccacccccagtaagacctggagtccctgctaccacgtgtctgacctcccaagcctttcctatgcggtgttcaggctccccctgctgctgaaataggaaaacttcatattgttccctttgagaataagggaatctttcctaattcctttggccttgacctacccccaccccactactgtgactttgccttcagatctccctaaaatgaactaaccaaaccagaggccagagttacaagagaatctgtaagagggtcctcctcctctaaagagaggtagtcccagaataatagaagcaatcaaggaaagaagtggtaaaagaagatacaaacttttagtaaaggggaatgaccaggtgaagtacaaatgccatctatccaagcctggctcacgttgcaagtcgcaccagcagcagataattagttatgatgctcctccccaccccactctcccagaattgatacctgaggtagctcaggtgaagtccggggctcctgtgggtctccacctccacatcactgctgggttctgagcaggaaaaaaacagagacttgggtggaagaaggagtaagagtggaggactatggggtggttgtcacaagaaatctgacaaaacggcaaagcttcgagaacgtgaggatttcctcagggttcaaactgaacttcacctgtccaagggagaagttgccagtaagaagagtaaaactaattcggagggactgggaggaggggttggaaaaccagccctgagtgaacaaagagtgcggggcgccctgcctcaagatgaaagaggatgtgagggtcagagcaccgccaagggctggagttagtaatggctagtgaggaacctcaaaaaggcagcgtctgacagtgcattgggatggccgattagacttgaaggcagtgattgtgacgcttcccaacaccctagagtttgcgaaagaagtcctaggagttttcccgcagcaagtcttctagcttggcaggttccgtgcagtgccgccggcgctcagccgtgggctacgtgaatgggacactaagggcgcgcgaagtgaagcggggagctggagctccaggtgtcatcaagctgaggggatgggcagggttgtgacgtcacgaagctggcgtttgctcgcgatgcggggtcactcagaaaaggggcactgccctggggtgtgaggacgagccagctcggttctggggggccttctgtggcctggccgagcccagccgctgggccggccccgactcctcccctccgggcgcggcctccacctaagtctcccgcctccctcacctgccgccgccgccgtagttgctgctgccgcctgccggtcctctagcttcgacaaagagccgcctacccgatcgctcttccgcttcctgcggaagaagtgacgctctagccagcagacccggaaccatactctatggtgtatgaagtacgcgtgcgacatgccgcagggcgttcccagcacgctttgcgtgtcactatggcaacccaacccaaaggcacgacatggtctaagcggtagtcgccaaggcagccctcctggaaaggggcggtaccagcattggcccctaataacccgcgaaacctaaaacctgcctccagagacgtaccatatcccatccaactccagcgagatgcaaaccacaccacgtaacccgggctgttgcctttatagctttgataccctccatagcacaggtagtgacagggcaaactctaatgacagaaaacccccacccgatggaaccataaaaaacataatagacaagatgatttaattcttcagctaaaacagcggaagaggtgatttattatatggttgttacactcggccacaaataaacacagaaatagtccagaatgtcacaggtccagggcagaggaccaacatgggcattttgtttatgagcaaggtgggtctcagaggtgatcggcgatcagagggcgatgaagttctagatccattgagacaagctctagacagtagcatgcagtcccacaacttgtaccagcatccccagcgtctggcattccatgtttctgctcctgtggcctccacggtgcaacaagctagcggtttacttggacctctgcctcatctttcttcttttgcgcttcagcctgaaaagcagacacaggaatggaatacacctcaaaccagagttgcctttccctcccacattaaatcaaacgtccacataaagaatgaggtggtaaaatgaacaagcactacggttctatcgttctctgttctgttaaatcctggctccagggagaaaacactcaaacgtttttctcctaaagatcttttaagatttccaaaccaaatgtttctcctaagttttgtccaaggaacttccctcctcctgggctggcaaagtctcaacgtacctgcgcattcgcttcttcctccactagcaaccgatcacaagcagcagataattaaaaaaaaaaaaaaaaaaaagggatgaagcttattagtaggcttagcaaggatatgaaatgcactctttagaaccggacagattcttaaccaagaagtatgaaagattggtcgtaacaactacatcagtaacttggacaccctcccaacataagatcagaattccacccttttctaagcccaccctctctacccatagcacttaaccgctagctctctcacaaactaccttctctctcccaccagctcttgggcacccttgaaacccagtagttcaggaggtatggcggacttgccttcgtctcctcgctactactcgccaactcctacctcccaagcttactaccaggaaccgctcaccttggctctcatggcgcagaggtttctacagggaaagagagaaaggctacagttagtttgctgtgatgatgctaagtgccgaggtcagatgtctatggattgtacacggaatcccaacgcaggaaccaaaaaacactcacccaaaaaaatggcgctaaggccgagagaaaggcgaagttccgtctacggctatttaatggagcgccgggtgtcgtcacttccgctttcacgccctttgccccccccaagggcggggctacccaatgggcgtaacagtggttttcggaccctcttgtagaagggtaggttgagttagttctttcggaagaccgagtatttggttttcgagttaccagttcccccccagatttagtatgaggacgctgtgttatttaaacgtcagcacctatttccaatattggacctagaggtgcagacggggaaaaaatagtgaccgccaccttccctcgcattgcttcttgggagttgcagttccctggagaagtcctccattttgctatggataggcgcggactgtacagaaattcttgttt

SEQ ID NO: 917087 - DNA, 4001 bp, Homo sapiens
cgaacatatattctaagacacgatcctgaagttcaacagactaacaaactgaaccaaaaccattattgaagcatcagtgttcctgtcaaacctttcaacaaccactatgtgataaagagaatgcagtataacgagctgttaacaactttagaatttggaataaatctatggatgtccactgtagaatcctttcaactttttttttttttttttgagacacagtctcaccctgtcgcccaggctggagtgcaatggtgtgatcttggctcactgcaacctccgcctcccaggttcaagggattctcctgcctcagcctcctgagtagctgggattacaagcacgcgccaccacgcccggctaattttgtatttttagtagagacggggtttcaccatgttggccaggctgacctcctgatcctcatgatccacctgatcctcatgatcctcctgacctcatgatccacccgcctcggcctcccaaagtgctgggattacaggcttgagccacagcgcccggcctcaactttttgtattctgaaaattttcctcacaatgtggaggaagacgacattctgaaaaaataaatcgcgcttcacaaaccttaaaaactgatatactgactgggcgccgtggcgggcgcctgtaatcccagctattcgggaggctgaggcaggagaatcgcttgaacccgggaggcggaggttgcagtgagccgagatcgcgccactgcactccagcctgggcaacagactgagactccattccccgaccccgtccccctaaaaaagctaacatatcagccactttcagttctctacaaattttaaaaggaaaactacccgaaccaaagttatctatctacctataaaactctacgaacgtaaaaaaaaacatactagcaaatcaagaaaaatctgcaatcttgtaactcaagtctaacagaaacttctttggcgcgttttcctcaaggcgttgcaaagcatcttcagcacagaagcgagctccgagtggaagaactctaaaattaatccccaattttaatcaagcaattaaccaattatctcagcacacccggattccttgaggcccccaactctgcattctgggaccactagcgtttgccccggtataaaaaccgatcccgcgtctaagcagccggtatttcatcacctacaactgtaacatgacggcacaatttgagcgtggctgcgaaatatgaaacctcaccacgacctcaaacagaggggggcaattaagggcttgtgtacaatctgtcaggtgagcagcctaaaataaccctaaacacggcacccgggtgggaggcaggagtgggtctggtcaggagacggcctccctgaggggaagaggtctgcgccgaggcagcctgcgcgccccgaaccctagactctcggtccgccggcgggtgacagaaagcacttggaattctggccctcctggaacttccgcccgcgccctcgccctcgcccggcgctgccccggccccacgcctggcgctgccccggccccacacccgggtgacagggcccagcgagaggaaaggatattctcggcgcggagctgctcgatggtctcctcgcactgccgaagccgctcccgtagctccgcgtcgccgaccccattttcgtcctcctcgtcgccgtcgtcgtccttgaagcgagtgtgaacgggcttcggaatcgactcctctgggtggtcgaacggctcgaagagctctagatcgccaaaatacacctctgcggccattttgggctgtggaaaagattcgagaagaggcggagccggccaccagggcttggggaagaaggttggaaggcggcaccactctctagagctctggccgcacggagccacccgctagggttttctccagacgcaggccgcgaaagctgcacacggggcggggccagtcgctagagactacaactcccggaatgcagcggggcctatcgggcttgcgattgcccggaggacggcatgctgggacgtgtggtttctaagcgactggtactcattgtctgcattgcatcctgggattggtgctttttgaaatgtgaagaaagctggagtaggtcagaatgcgctaaagcaatctgggggcagggcggggtggctcacacctgtaataccaactactcgggaggcagaggtgggaggatcacgtgagcccaggagttggagaccaccctgggcaacagagcgagacccagacactacaaaaaaatataaaaattagctgggcgattgtagtcccaagtactcggcaagctgaggcgggagggtttgagcccaagaggtcgaggctgcattgagcccagatggcgccactgcacaccagcctgggagacaaagcaagaccctgtctcaaaaagaaaaagaaaaacaaaaaccagtatgggatgttcctgttaggcaactaagggtgaaaaatcagagcacgacgcatagcttctcacagattctggtgtgcgtgccacaccagagaataaggaactccatagcctgaaagggaactgaataaaaataaacataaaagagaataagaaactccagctttgctacagagatgactgttgtagattagtttattgagcttgcttcgtttttaatgtaagattagctagactcaactatttgtctgttgaggctttctgtcattcaatcacattatttacttacaccttcgatgggccaggcacttgtctaggacctgagtatggttacaagagtaaccacaatagagtaattcctcctctcacgaaggctgtagtccacaaaaagcaacaaaaaccccataattataaatgttcctgttcttgggtcgagatggttgttgatggatattgatcacacaaagaaatgtgggccgggggcggtggctcacatctgcaaccccagcactttgggaggccgaggcaggtggatcacgaggtcagaaattcaagacgagcatgaccaacatggagaaaccctgtctctactaaaaatacaaaaattagccaggcgtagtggcacacgcctgtaatcccagctactcaggaggttgaggaaggagaatcgcttgaacccgggaggcagaggttgcagtgagccgaaatcgtgccactgcactccagcttgggcgacagagcaagactctgtctcaaaaaaaaaaaaaaaaaaaaaaaggtgaaaaacacaggaagttatgaatatttaacaaacaccctagtctgtgggagtcagtaaagtgaggaagtgagactttaaggatcggcaaagttgggggtgggaggatggaagagtgtcttaggtgtaaggaccaccatgttgagtgaaaaggcagagtggagcaagatgaggttggaacactgctaggtcagtgctcaaaggcccttaaggaagcctctttccgtttacaacattgggaagtcacttacacattttaacattttttttttctttttgtggacaacaggatctccctatattgcccaggtaggtcttgaacttctgagctaaagctatcctcctgcctctgcctccctaaatactgggattacaggaatgacccactgtgcctggccatttaaattttttttttttgaaattttattttttgagacagagtctcactgtgtcacccaggctggagtgcagtggcatgatctcggctcactgcaacctccgcctcccaggtttactttcactgaaaaatctgcatgaggcctggcgtggtggctcacgcctgtaatcccagcactttgggaggcccaggcgggtggatcatgaggtcaggagttcaagaccagcctggccaacatggtgtaacccgggagttcaagaccagcctagctgacatagtgaaaccccgtctctacgaaaaatacaaaaattagccgggcgtggtggcgggtgcctgtaattccaattactcaggaggctgaggcaggaaaattgcttgaacccaggagacaaaggttgcagtgagctaggatcat

SEQ ID NO: 917088 - DNA, 4001 bp, Homo sapiens
aatcagtctaaaccaggattctttttttgttgtttgagacggagtttccctcttgttgcccaggctggggtgcaatggcgtgatctcggctcactgcaacctctgcttcccaggttcaagcaattatcctgcctcagcctcccgagtagctgggattataggcatccactaccatgcctggctaattttgtatttttagtagagacagtgtttcaccatgttggtcaggctggtcttgaactcctgacctcaaatgatccacctgcctcagcctcccaaagtgctgggattacaggcatgaatcaccacacctggcctaaaccaagtattattaattccaaataaaaccaatacatcagaccagtctgggtattatttggaaaaaaacaaaaaacaaaaaccaataaagtattaacaatcaccgatttaattatgccagatgtgtacaccttccttacattttaggaagttaggaacaatgactccagcaggctgaattaaggaattcctttttcccagtcaccacttaaaaaaaattcttttttggttcttcttctttcaagtattctttataccaacactttcagtgccagattgtatgggtagggagacgggttttgaacagatgaaggaaaaaccctgaggctactcctaacttccactcagaccatgagcaaaaaaaatgctctattgaatatgtactgtatatgtacattacctgcaccttgctcacccaggtcagaaagagcatggggactcagacagaaccttagccactgatttttgctaatacacagtcatgctatgcttaatgaaggaggtatgttctgagtgttacgtgatttcacagtgcagacatcacagggtgtactgagacaaacctagatggtctagcctattgctcctaggctacaacctgtacagcatgttaatgtagtgaataatgtagacagttgaaacacaatggtaaatatttacatagctaaacacagaaaacgtacactaaaaatatggtacaatgtattacactcttaggagaccactgtggtatatgtggtttgttgttaatcaaaaagttgttatgctgtgcatgcctgtactatggctgggtaccttttttgcttgtcttaatattttttttctctggagtggtgtgttaagaggaaaattttcttttccccttttagtatgatgttaaggagtaaatttaagctttatgtatcgacaatataaacttctttcgaaacgctaattttgcttattgccaaattatgaaatgatacattatataaataggcttggtgcctcgaagagacagacctgtaggtatgtgtgtatatgtatataaagtttacaaatgtaatcagtaattttcacatcttatcttacaaagtcagcaaattaccgtgaaaatatcaggctcaaccaaattcaaatttctgatttaaaaagagcgtgcggtgtgtatttgagatgggaagatcaaccatcacaaatggaaaaatactgactctatggcatgccaattcgtgaaggaatgagaaaactgcctcatgtttggtgttatgggggaattatttagaaaacttcaggaactcaacatagatacgtcgctttttaagtttctcatttgaaactatgcgttacacgttctgctgagagccgcgaaggcaggcagaggttaaggtcctggaataaaaagggtggcgggagagaggggcagagcgttttggcagccgagtctggggagggggccccgcaggagagaaggccgcagctgaggaggcgtttaccttcaggtgggttgggcctgggagaccagaagagtgcgagccctcggctcagctggggctcaaccccgactcttcgtagccgctcgcagcggccttggcatcacgagtcctgggaggggtcaggcgcggagagcagataatagcagccacggtgcttcttcccgactgtttgagatccgggccccgaaggcgggcccagaggcgagcgcttcgctaacgtcattgcgcgcgccggaagtacctacctgggataacggcggcgagcggacggctgcatttacggggtctcccggagggccagagtcggtgagcgctttttacctttcccagagatggatgcagagcgtgtgcgggctgctaaacgggggggagtgggcgggagttttctgtgtcgggtcctggattctcctgcctttgaattgtgtgacaattctgcccatgcggttgagggtggagagacgcagtggagtttggaataaagggaagtattgagtctaagataggggttcgcctctctgtagcgccttaatatgcaagaagacgactgagctaggtaacttcagtgacccgagaggagtcaggaagtcggtaattttactgaaggtgttcacggtacccagctattaggcactttgggaactacaaaataaacagaccttttatgttttgttttgttttgttttctggtgaagatctcagtctagttggggagacgaggtcaacttggggagagttggattcacagaatgactcatctttagtatgggtatggacaagtgttgatcttcttggcaccttttctcttcctgtaaatctataatggctacgcactgctttttctctaagaggccataacatgcccaccattcctacagaaaaatcagaacgtaatgcaaggtaatttatacttctgcctaccagcacatacagaccaggcctctaaccactccctgggagcctgcgttccagcagcctggaacccacagcctctcctggagcctgcacaatcaatccagagtgaagccgatgtcttctatagagacggaagtacaatccatccagggcgcagctgaattttgagaggcctgaatgcctccgtggccgacaggagaccgctggcactaattctctaggcatacttgtggccagccaaacttaccatgctttacatctctgttatccttggttaccgcccaagatgtaagcttctgtggtcttctgtgctatagtctcatttccatgctgctttgtgctttctttcgacttaggctatcactgcttcttcgtttcttccccatttaacccctcaacaccccatctgtgctttctgaaacctctatttcctgcttaaactattttacatattcaacttctttagtgaaattctccttcatctcctaaccttaactattgataacacgtagattttcctgccagccatttcagttgagccctttctctgaccctgcatttaaaggttgggcatggctgtagccatgttgaacggatttcaattcctcagaatactttcttccctcagtatcttcacaaaggctcttttctctctctgggacatttgagctccctgtttcctcctatctttttctggataacttctattaaagatctgagtttagctgtcactttacttgaggggtataccctaacttccatagagttaggtatttttgctatgtactcttagctgtcctgcacttccctcacggcatttatcacatgtatcttaattgcttctttgccatccctactaagcgagactgtcggtgagggactgtgtttgtctcgtttatctttgtaactccagtagctaatacagttcttggcacataagacagtcagttatttcttgaatgattgcaggtgctgaaggtatgctgcagagatcaggcagttaacgttaatgaatacttcacccttagaaggggtcacctgccactcagctacagctgattgtggctatgtgagaatatgatcccagttttgccagaacatctaattttttcaaaaaaagttggaaataccattttttaaaaagcatcctctcccagtttttaaatgttgtcagtggaatagaattttattaaaaaaaaaaaagtgggtcaaacacaagtctcatatggcctatcagtcactagtttggaatctgttttaagtcttgtagggtttatataatgggctttgtggaga

SEQ ID NO: 917089 - DNA, 4001 bp, Homo sapiens
aaagtagcaaacaacagtactatattacaaagcaaaggtttatgaagaacagtatgctaaaatacgtaagataggcctggcatggtggctcatgcctgtaatcccagcactttaagtagctaaggtgagaggaccacttgagttcaagagttcaagaccagcctagacaacatagggagacctcttcttctacaaataataaaaaaatcagccgggtatggtggcgcgagcctgtggtcacagctactcaggaggctgaggggagaggatcacttgagccctggaggtagaggctgcagtgagctgtcatcgtgtcagtgcactcctgcctgggggacagggagaaaccccgtctcaaaaaaataaactggataaacacttaagtgtttgaaatactttcacgaatactttcacaggaacagatgaatagaaatcacttagcaacattttcaaggcaacatctgaaaactactttgtctatttcctgacgtatgttagggcctaagtgaaccaaaagagatgtctacaatgccagttctgaaaatgttaccactttggtcagacaagtgtttagtcttactgtatagttctgtttatcagaaacccagagtagccttttctactgagactggcacaggtatatattccgaaggaactgtcccatgtgtttttgataaaccaaagtgacgaatgagagggtggttgagtgttaacatgcaacataaaaggatggttgtcattattcactttttaacaaaaactagtggcatggtacaaacccaaatccagaaaaaaacagaatcactccattgcaaagtaaccaggtagagacttccatgtttgttcatcctacaacacgactgtcatcttttaacctcatgaaaactacccgagttcttcagcaaactgtgccgctgccgcatacagacatcactgtggatcactaaaaatcagaatgcatcaagaattgcttccaagccttaactagcactagctcagctacaaactcggaggtaaacaagcacagactgactgactgtggagcggggcactgtttacttacatgggaagacactcatgttgtgatgggaaacgtgttgcactgtccacccctagctcctagaaaaacggtactttgacaagctaatgtgagtgtaagtctattcccaaaagtttttacctctcttcttaatcgcttaaggacaaatgctcaaaaaaggacgcccgacacaaggtgcccgaggtgctacccatggcattacctggaaggacatcactatgcccatgaaactgtcccctcacagtggactaaaaggaagcaatagataccgtcattcaccctggcgaaggaaaaagaaatcaaaaccagacgcgcttccacctggccccaagaggcttggagcaagactagggtctaagctgcggttcaaaaaccacaccaggcccctccgcctctgctctcaaacgcagcgcggcgacacagcagaaccatcaacacctccacctctgtcctccaggcacagccagggactgcgtcccagagcccgccccggtcgggcccgccccgctatctcctcccccgttatccgctcgcagccgcgctcaggcctggattcgcctccccaccctccccaacttcggcacgtcccactaccccacacacgtcggccgccgccctcggcgagtccggggaagaaaggctggagggccgcagggcaaggaatccactcagcacggttcctcacctctgggtggagaaggggcacacagcccgcttcggtatcgtactcatccgggccgtccgccatcttggtgttaaatccctcctcccgctgcatgctgggagaaagcgtttcaccctcccggggctcgggcgaggcggagggcgagcgcggggcgagcgcgagccccgccggaggcgacgcgggcctcctcctccttcttctcctgcccccgtgacgccccctctgtcccctcccccctcggagggcgcgggtttctccgcgcgtgcgcggaagcgcggcccggccccagactggatcgcgctctgctgcactgcgctggggacggcggagggctctgggcgtgggccccgcggctcgggggcgggtcccggctggaggtagatgtgaagctctggctgcccgggggaggcggccgggcggttgagacagtcgcttgggaaacctagcagctgctcaggagcgagaacagagctccggagccgcacgcagcacaagtctggagccccaggcagccgaggagcccacgcccacgcgctcccacttccgctccgggacccccgggacccctcttcaggaactcgggcagagtcgtcagccagctccagggaggtttgggcccgtcaggcttgagtcgagacctgcatcattcctgaagacaaaagcagcttccctttcctccacacttgaaaaggtcacccgcaacctgtccctccgggggacgcccggaaaaacatggatacaactcgggacttcctactagagaacccttttttttttttttttttttttttttttttttttaatgagacagagttttgctcttgccgcccaggcgggagtgcaatggcgcgatctcagctcactgcaacctctgcctcccggttcaagcgattctcctgcctcagcctcccgagtagctggaattacaggtgcacgccaccacgcccggctaatttttgtatttttagtagagacgggttttcaccatgttggccaggctagtctcgaactcctgaccttaagcgatccgcccgcctcggcctcccaaagtgctgggattacaggcttgagtcaccacaccctgccgagaactctttttaaaatgatcccaacctgctctcaatcgtcttgaattagtaccacacaaaaaatttacgagctcaaagcccacacaccgccatctgcaacatttcgatataatccaggaattcagaactgaagccacttaaactgaattcgcttaaatgcaaggcagataaaatgactaaagccattttttaaaggattttagggcggtatgggggaggtgctccctgtaaatgggctgatgggacagttttagatagcatttgtctttccttttagctgttaaaaattgtaagtctaaacagctgagaatttagcagagatcatgaaagttgacctattagagatcctggtacttactaatctgtctcctgttaggccagaaaccaccaggaaaaagcctgtactccgataacgtcaggccaatttgtaaatcaggagggagggcactccaaaggaagcttggaatgccactggaaaaggaaagaggaagcctcctttgtaagattagtttcccgccaaaggagtctgaggagggtctaaggagagccagaatcagttctgcatgggacgccgtttccgtggcggcatgaagaaaagctgggatttacgagggattggatgctgtcttgaggatacagcaatttagtaattaggtacctccagtaataaagtagcaacactagtaagagcagcagttactcaaagaggggtgaatatggcgtgtcatagctactgcacggctgtgggagaaagaagtttctcagttaactttgctgctggctttttctgtatctgtcctcccagcacaactactttttctcatttcagtccgagctgattttcattctgttcgtcctggcccaaactaggagtcatcttttacagctagatagtctcagggtcggcccttggagcatcgaattgttttcagtcatatgttaacatggacataagtcattttcactcaaaaatctcaattttttttttttttttgagactgagtttcactcatgcccaggctggagtgcaatggctcgatctcggctcactgcaaccaccacctcccaggttcaagcgattctcctgcctcagcctcccaagtagctgggattacagacatgcgccaccatgcccggctaattttgtatttttagtagagacagggtt

SEQ ID NO: 917090 - DNA, 4001 bp, Homo sapiens
ctgattgtcttccaaataactgtcattacttttaagtttcatatataataacgaaattaaaaatcatcacactatgtgaattacaaccagtaatgaaagtctttaaacaatttttgcaatgatcacagattaagtcaagatagtgttttacaaacccattataaaacaggaaaccttcggatgattgattcctctgtataaatgctgagtaaactcagtaatgtttaaaactgagaataaggttagaagtaggaaaaatctggaatgttactatttcctttctcaacttacccgtaatctccaccctcgcatacacattcctccactctaacgtattaaaataaaaatgctgataagtttatctttctctctctggccctcatttagtcagcacgaagttacacaatgtgcaaaagtgaacacagatagaaacgtaaaggaggtaaagtgttccaaaaagatcaaatgaatcaaaaagctctgaaacagacttggtaaagacaccagagttgttttttttttacccctcccccccccactttaaaaggcagcaaccggaataaatcaagataaaaacagaatcacaaaaatagtgcaggactgtgcagattaaaactttacaattttcaacgtcaaactgcaatatgataaagcaacaatattacttaaactgtttatgaatattttttctctaacaatccaagtcaacttcatataaaacacaaagtttctgtaccagcaaaaatacaaatgctaatgaaacttgggcttctaaggtattattacaaatcagacttaactgtcttagatttcataagcttaacccaatccacagcacgttaatatacccaatgaagcagtcttaagaataacgctatagtgtgacacatggggaattaccaaagaacaacttaaagtatactgacacagggagaaataagcggttctgatgattcaaagttacactcgtctcacagacctagtaatgacgctaaagggaactttagtgacacacccagcgccgaccgccacgttaaggatacagctcttccgaggtggagagggctctcgccagctctgactgctgctgaacccggatcctgctcctcctcccagaggaggtctgcaccccggcttgcctcctcgctcacccactcctcgcccccgactccagcgactcccaccccggtaaggcctgcctcgaaagcggaaacggtccaaggcgaggtggctccgctcccagaaagacggccggggactgctttcggacagtgagctcgaaggcatccgtacagaaggcggatgagaccggaacggttctttgggtcggtagctgctgggtcccctgaggtggccccgctcagacgcgtgccgcgagcgtgagaaattcctcagctgctgctgagaagaggacgatgacgaggaagagccaccgcctccgccagatccaccgccccgggccgagtgaggaggccttcgccgcggatagggtaacagcccgccgccgctgctgctgctgctgctccgactccgtatctggctgttattatcgtcgtcactgatttccccatcttcaagctccccttcttccttcggcgagaggccactggaggccggggccggagtatctgcggtcgccatccggggagcagcgccttccacacaaccttagccctccgtccggggatccgcccgacaattgcctcgtttcccttctttcctaacggactgggtcggtgcggtcttaccctactcggacaccaagcggcctctgctccccaacttccccgcaccccagcaccccagctctctctcgccggaccgtcgcaacccagttccctttcctagcgcccccttgctcctcagcgatcggggttcttccgcctcgcgagaaagggactctggtagcggctgtacccgaaacgtcacttcctgcgacacgcaggaaacaaaggctcccagttcacgcgataataagaccaactcgatactcactaggatttgtagtctttcgtctttcttcgggtttactcttccggtcctagggtcacacccaccgcagggtctggcttggtacagttgggtgcatgcagaagtaggtggagctgctgttgcagccttgagagagttttattgtaaaactcttgtaatttatagtaatcggaggggaaaacacctcttccttttaattgctctgaggaccgctgccaaagaaacgcagtagatccgctccctcttgggggcggggagaaagaacgggttgtgtccgccatgttggtgaagtcaagcgaaggcgactagagctccaggagggccagttctgtgggctctagtcggccatattaataaagagaaagggaaggctgaccgtccttcgcctccgcccccacatacacaccccttcttcccactccgctctcacgactaagctctcacgattaaggcacgcctgcctcgattgtccagcctctgccagaagaaagcttagcagccagcgcctcagtagagacctaagggcgctgaatgagtgggaaagggaaatgccgaccaattgcgctgcggcgggctgtgccactacctacaacaagcacattaacatcagcttccacaggtaacctgggcagggagtgggggtgacggaaactggagttcctattgtggctatcgcttgtgtggaaggaacaggaggattctgctaattctaataactttcccagctggtagcagggaagcatcgtatgtcctttgtgtttctcaaatctgcccaattgttctctgctttcggggaagctttactcattttctaaaagaaatccaagtactgtttggtcattaccccttagtaaaaaaaagtaacaggaggatatcgtaattttctactgttttattcctctgttagaccgggccttgacatgaatgacgccgtaagggagaaagagatcttcccaatcagcaatcaccgtaaaagcctgctgtgttcccgttaaaattaggaaattctcactagatgaattgacatgggaggcatttagatttctaatagtcacatagtaattctgcggaggaattgagtcatctttgatagccatggaattaagcgatgttaattaaagtgcaaaagataacctttctgttcttactagaatagagtaataaaaagaacctaggttttcttttgtttgctggaagaaaaatcaaaattctttagttctgtcaaaccagaactcttgaaagcactttgaacaatgcctggaaaataacaggtactctgtaaatgtttaccttctctgcaagtgcctgccacgtgcccgaagaaaagacacattaaaaagttaagtgacaccagtcctgattttatatattttatatacctaacaacgtatatgttagtatgtagaaattatatccttgacctttttccctacctattacgaactgtacttttattaaaagctgccacttaaaaaaaatcttgtgatgtttctgtttttaaactagttcatgcatatgtagtgctttgttcattcatccatcaaatatgtacggagttcctaattacctgacattgtgctaaggatccagaaagttctaaccctcctggaatttagaatttaatggtggagaaagacataaataattaagtgccacagaagaaacattcagagacctaacttagtcttggaaagtcaaagaacactttttcaaaggatgtgacatttcaaatgagaccaaaggatgacagattgggtcctgtgtgctacttaagtattttctgttttatcctaagagtacttgagaaaccatggagggtttaaaaaagaatggcacgattagatttgcatattgaaaagtcctctggctgcagtgtagagaatcgtagtgttactgaaagtgctggtcaagcatcatcgggaatgaacttgatgagaaaggaacttattacagaatattaatttacctatttttttccttcacagggaaatcttgctacaatgtcaact

SEQ ID NO: 917091 - DNA, 4001 bp, Homo sapiens
atgagacatgctagaaagagtactgctgatgaaagtaaaagagtctcttgtaggcacaacagagatattaacaataagaaatttctttttccttaaaatactttttttttgagacggagtttcgctcttgttgctcttgttaatttaagatgtgtatctcaaatctctgcccttgtgactggcatatgttaattagctgggcatggtggctggcgcctgtaatcccagctactagggaggttgaggcaggagaattgcttgaacccaggaggcagaggttgcagtgagccaagatcgagccattgcactccagcatgggcaacaagaacaaaactctatctcaaaaaaaaaaaaaaaaattctcagattttcttgacaattgaatataatctataaacagaactgtttttattcttactcatcctttattcttctagtaagaattgcctagtaaggttttgaagtttttctcatatagttcacatatatttctagctaaaattattttcttcctattgtgaagactttttaaaaataaaagtatgtgctaacttgttgaggacggcaatcaatctattagcttatatatttccttttcagtcactttactacaaattattgatagtaattgaatctcttctcattttggggacttaattagttaattaattaacaaggataattttgtaatctcttttccagaaggtaagcctcatatctacttaaatattgtcctaagtagaatttccagacagtgcttatataaaatactgataagcagaaattctcatttaatttatgatgtgtatctcaaatctctgcccttgtgactagcatatactaagagctaaagaaatgcatgctgagagaagtaatcaaaaaacaaatgtaactttcaaaaagaggcaggagcgtgtgcaacttaccatccaagaggctttggaagatgggggacaattttagtaaaacagaagagattagttatgtcacaagagaaaagttagtgtggaggtaattttcaaaagggtagggaggatttgtgctatccagttctcggagacctaactgcagtcatttctaacctaataacacttgttggctggcattctgggtgacatcctgccttcccttttacttttttttttttaattaacagtatctttctgcaattaatgtatagctggaattgaaattgttcaccttctgcatacactttgggtgggatctacgtacgaaatcttgatgttaaccttatctttgacactcatattatgtgttagatggcgtatatatatctagtgtcaagggaaaataaaaatatagtaattaaacttatgatctgtctctgaaaataaaaaaaatagattaaccacacaaacacgccttcagttaatctatctgattaaaaaacaaaacaaagatgaggaagctaagagctagagatgcaggatttgtttttaaaagaccacacacgaatcggcgtcactatttcaacaaatactagaaaggccatatgcaaaattttaaacatctatcccagctggggggaaaaatggaagttagactagaagaaaccttattttgtattactgaaaatatctggttcaaacttaccaccaccgccgcccactctgcgtcaatctccaggtgcagccgttattctccacagaacaagaacgtccgccgtgaacgccggggccgcgcgagggacagaaagtgactgaggcaaggggtgacgatcaccgttaaattttttcattgacgaaattaccgtctacctagaaatacgaagctaatacactgctacattactaaagggctcaacacgcgcctgatgacgatgcaaacacaaaattcagcactttcgtatatacctgcaataagcaactagaaggttcgatgggagaaagcgatcccgtcacaaaggcagcagcaacagcaaaacagagaacgcgactccattcaccagcggagcgcgaagagcggcgtcagaggtgagtctgaggccggctcggcacggcggcgccacctccccgtggcctgacgtcacgcacgcgcacgcgccccgcccccattggtcctacgcccgcccctgctgcgaacgcacgcacacgcacccacaacacacaccgttacgcacgcgccccagcctggcgttcaggccacgctccgcccccagcccgtcagccgcgcgccccgggaccctagagccggcgattcgtcgccggcgccgcagccgccactctgtgccggaccctgcgggccttcggcccagagcgcgtccgtgacgcacagaccaggcccctctgcggggcggcgcaggagctcctgggaaacgtagttcggcctcgcgtccccctcgggcgggaccgcggacgcctggaggcaggcactgaggacgggtgagcatgcgggcctgtggctcgttcacccgggacaagtccctcgtgggatcagcctggcccgctgagttctcctgcgtgcagggatcgcctcacgggagtctgagcagcagggagcctgcccgggaggcggcggtgggagaggcccttgagggaggaggggctacttaccgggtgcgagtggagcgcggggagcgagtggggaccaggggcgcgcggggcggaggggtcccgggctggctgcgggtgccacgcagggagcgctggggggccggggatgcgcgtttgcctccttctctaagcaacacgggagggctaaagggtgcacgcctctgtccagcagcctctcttgaatctctaaacctagtaatgagttgaatcacagccatcgtttttttcacctattgccttatactgtggttgaatgcgatatggttttatttctttaatactctggtgtattcaattggctgtttccctttgacttcacctatgctcacaagattgtgttttaatctttttgtgtactatccttgcccgttatactaacaagattttacaagcttcatgaataatttggacagcacagtctctcttctattctgtaaaacaggtcaccacccctcaccgccccccgcccgcctccaaaagtttggtgctatttggtcttaaaatatttagtacgcatttaacttctgactcaattttttttttttttttttttgagacagagtttcgctctttgttgcccaggctggagtgcaatggcgccatcttggctcacagcaacctccgcctcccgggttcaagtgattcttctgcctcagtcttgtgagttgccgggattacagacatgagccaccacgcccagctaattctgtatttttagtggagatggggtttctccatgttggtcaggctggtctggaactcccgacctcaggtgatcagcctgcctcggcctcccaaagcgctgagattacaagcgtgagccaccgcacccggccctgactcaattttttaaaaagtctcattgattaggttttttagttcgtattctgttttagatacctttcctagataattgtttttaatctaatttttcaaatttattggcataaaattgcccatgctattttatcactgtaagtaatttctatggtgatttttaaaatcaccactttttaatattttactgctgtaattgttatttttttcttttttgaacctaattatctaggcctttttttcttgattactcctataaggtatatgtgtacatagtcttttcaaaaatgtagatttggttttggtttttttgttgttttgttttggtcttttttggggaggggggtcctattacagtaagttttgctcttaatttttaaatttttcttttactttgtctctgtttttctacttttttttttttttcgagacagagtttcactctgtctccaggctggagtgcagtggcgtgatctcggctcactgtagcctctaccacccggattcaagcgattctcctgcctcaggccccaccacgcccggctaatccagctaatttttgtttttgtttgtttgtttgtttttgagaca

SEQ ID NO: 917092 - DNA, 4001 bp, Homo sapiens
caaaaagtaggataaagaagtggaactgaaatgagggactcattttgaatagttgaccctgttatccccactgctgtgaagcacaattaccagccaagcccttaggccaaatcaaaataaaaatgtgttccttatgtcatgtctgaaaaatgagctctgaggattcggagattttgttttggtcacttctgcatcctcaagacttagaatgagttgcacattagaatcacttggaaggactgttagactgctgggccaaattctcagtttctgattcagaaggtctggggtaggactcaagaatattcatttctaatacgttctcagatgatgctgatactgctggtccaaggatcacactgtgggaaccactgaaagtagaggttcagtaaaaacatattgaataaatgaataaaggggcgctggagtaacgtaaagcactcctcattctaacactgtgggaaagaggaggcgatgtaacagctggcaccctaccctctcaccctaaaacatgccagccaggtcagaaaccccgcccacatctggatagcttcctgtcactctcttcatgtatacttaagtataagcacctgaaaaggaggaacaagggacagggtcctggggttctgccaggcaggtggttgtaggagaaagaaagccacgtcccaagtcctgaaaaacacggctgcacttcacaaagaaaagcggaaacaggccaagtgggttggctcacttgaggccaagagtttgaggttacaggatgctatgatcgctccactgcctgggcgacaggaggagaccctgtctctctcttaaaaaaaaaataaaaatttatatatatatatatatatatatttatcaatcattagcttacctgagacatagctcacagaagggaaggaggagatcagaaaagtgtaaaatggcagacctggcagagagagaaaggagccctgagcgaacaggccagctaggccgcgcccaagtcactagattcccgcactggggattcccgtggcccccgctccgcgcctcccacgtagagagcagggcgccctgagagatcgcgcttggaccactggcgccggctttctcttcctgccacggcgcgcctccccagaaccccctcacctaacagtggccacagaaggatgcgtttccgtggtgctttccgccaggtgggcgtagcgttccagggctccggaccgagtcaccgcccggggccatccggcgcagaccgggagggctcctttcgttgcctacagccaacacaggccagacgctcggcgccgccccccagggcccctccgcgggcgtcgcaggaattgcgtcttcagaagcctcgccgacgtcaccccaaccaggccgccggcctcaagaaactacaattcccagaaaccaatgcggccctgcgcgcaagggcttttcgttcctactggaactcccagagcgcctcgctgccgtgcccagaacgccaggagacaaagaacgagggcctgcgacaactacaattcccagagccatcgcggcccggtgcgccagagcataggggctatcctcccacgcccagagccgagaaacaaagaacccgggtcctaggcaactacatttcccagaaataaccgcggccccccgcggaagagtacacagacctttgtgttcctataactgccagagtgtctcgcggccaagcgcacaactagcggagaaacgaagaacgtggaactcaggccaccacacttcccagaaacaaccgcgaccccgcgcgagagagcatatggctttccccgccccactgcaactcccagggtgctttgaggccaagcgcacatcatcgaaagacaaagaacacgagcttcaggcaactacacttcccagaacctctagcgaccgtgcgcaaaagagcggaggacgttcttcccctactacgactcccagagtgcatcgtggccacgcccaaagccggaagacaacgcagagctctggcgactacattcccccaaactcctgcgccgcacgccagagggtatagggttttcctcccctactacgactcccacagtgcttcgctggcgtgcacacacggcccagagacaaggaactggagactcaggtgactacacttcccagaacacaccgcggcccagcaagagcccaagaccgcctctattaaacaactaggattcttaacaacgactgtggagtcagtacttcagtctaagaccttttgctactggaaaggggtccggatctcagactctaagagagggttcttggatcttgcacaagaaagaatttgaggcgaatccataaggtgaaagcaagtttattaggaaagtaaaggaataaagaatggctaatccataggcagggcagccccgagggctgctggttgcgcatttttgtggttatttcttgatgatatgctaaacaaggggtggattattcatgcatcctctttttagaccatatagggtaacttcctgacgttgccatagccactggtgggcagtgaggacaatcaggtcgttctcatcgctatctcggttttagtcggcttctttactgcaacctgttttatcagcaaggtctttatgacctgtatcttgtgccagcctcatgtctcatcctgtgactacgaatgccttaacctccagggaatgctgcccagcaggtctcagccttattttaaccagcccctactcaagatagagttgccctggttcaaccgcctctgacagtggaagacgtagcaatgaggacagccagaagtcactctcattgccatcttggttttggtgggttttagccggcttctttactgtaaacttttatcagcaaggtctttatgacctgtgtctcatgctgacctgctgtctcatactgtgagttagaatgcctaacggtcttggaacgcagcccagtatgcctcagccttattttacccagttcttatttaagatggagttgccgggtgctgtggctcatgcctgtaatcccagcactttgggaggctaaggcgggcagatcacctgaggtcaggagtttgcaatcagcctggccaacaggccagagtgtaacctcgtctctactaaaaatacaaaaattacctgggcatggtggtgggtgcctgtattcccagctacttgggaagctgaggcaggagaatcacttgaacctgggaggtggagcttgcagtgagccaagttggcgctactgcactccagcctgggcgacagagtgaggctccatctcaaaaaataaaaataaaaaaaaaatacaggccgggcgtggtggctcacgcatgtaatcccagcactttgggagactgtggccagcgaatcacaaggtcagaagtttgagaccagcctgacaaacatggtgaaaccccatctctactaaaaatacaaaaactagctgggcgtggtggtgcacgcctataatcccagctactccggaggctgagacaggagaattgcttgaacctgggaggcgaaggttgtagtgagctgagatcgcgctattgcactccagcctgggcgaaagagcgagactgtgtcaaaaaaaaaaaaagagcaaaacaacaacaacaaataaaataaaaaacaagatggagttgctctgattcaagcacccctgatgctttggcttcgtataactgtaataaccagaatccttgcaacgctcccaggtcaccttgaaacagtggtctcagaggatgtgactccgagtccctcgtggccttatggagcggcccagtctctacttggtaccggcacagccatggcttctccctctgggattcccccagcctcgagcagtctctgagcagtctcatgttacctgagaaggaacgctggagcggccctggtttttcatgtgctccagctcgagccctcccccagaagccttctggaaagaggcgctggattgcacctacaggggctggacgcccagtgacctgggggcgcctctactcccagcattgtgtggggcactgt

SEQ ID NO: 917093 - DNA, 4001 bp, Homo sapiens
tggaggatcccttgagcccgggagttcgaggctgcagtgagttgtgactgttccactgcactccaacctgggcaacagagtgagatcctgccttgaaaaaaaaacaaaagatttactataaagaccagcctgggcaacatggctaaactccatcgctacaaaatatacaaaaattacccggactgggtggcatgtgcctgtaatcccagctactcgggaggctgaggctcaagaatcgctcgaacccgggaggcagaggttgcagtgagccgagatcgcgccactgcactccagcctgggcgacagagcgagactccgtctcaaaaaaataaaaaaagacttattacaaagctacaaaaatcaagacagtgtggcagtgtggtattagtgaaacaacaaatagatcaatagaactcaataaagagcccagaaatagacccatataaatatagtcaactgatctctgacaaaggaacaaactcacagggggagaaatccactcctaactttctctcgtttctttagcacaacagcctttctccaccgtgtgtcctttcctttcattaacctgagtcctcacctcggtcctcttgagggttccagttggtcacactctgagcttccacgaatacaataaggtgtctttatgtatttccagtttagacctcccatgtgagttacaggctgaaatacaggcattggatattcaacacctgcgaaagtcattcccagggtccctcttccaatagcattcctagtctccggctgtatagctcaatggtagagcaccacatccggcaacgtcgtcaacaccactcaccgagggcaaaggatttggcaatcaaatcacttgtaaagactcccctctggttcactccatcaataattcataaagtcccgatgatccactggcccgccccttacctttcggactctcgagctccgctcctagccttttctccctattcattcacctgtaattgcgtccatagttcactagactaccctctccaccaaaccaaagctcctctaaaattaggaacatacataatttatctctgcattgccagcaccagccttagagtccagcagacaaaaggacactccataaacaagcatttggccaaacgaaaaaggaggaactgatcatttctccagctaagttctaagggtctccataagacaactttgtgtagaaaacatgaaatgatggaggatcctcagacttcagggcccgcagctggccatgaagtgcagtataactgcccgtcacagaataccacaggcacgtttctgcagggccagagcttgggcgagcttcagaggcgctttggtttggtggggagggtagtctagtaaactacgcacacaattacagctgaatgtgagttcagttcccggagtaaccctgaagagattaacgtggccaccctcagtatccagtcgaattttaaacacggaaagtctctacttacccagcacgaagctgtccggaaactggtggccatccccacgcccacgttcgcgcgctgcctgcgggggcaggacccgcgggctgcggagagaccgtgagggatgcgtccgcccgaagacaggtgcgggaccagggccccaggctcctgaccgtcccggggccgagtcgttggcagggacgccggctcctcagctctcgcccaacacagaccgcgcgtgactagacaacctcccggtctgggtaccaggagtcgcacggatggatttgtgcctttccgtggccctgactcgggagagcaggaggctgatctggccccgtccacgccccggaccgacggaagtgtttagctggtcaagtctctggtctgcccaggataatccgagccgcttagctccgcgcctccgcggccacagagactcagccaggtacacccgctggccagattccggtccactgagtctaagccggaaacagccctgcacgcgcgcacccgactaaggccgggagtgcggcgcatgcggaagtgcgtcctgcgtcgatgcgccaggacgcgaaggcgccggaaaaactacatctcccacaatcctcggagaaggctccctcgttacaggcctggcttccagctgccgcggatctagagaggggcacagcctgacgggaaaggaaggctgggagggggctccgccagcggcacctggttcaccctcccacggctgcgccaggttcagtaccatcctcggagcctggacgcccagtttcccagggcctgtagaactgactcagagtccgaccccagcagagacgcaggcgtgctgaggttttgatatcaaacaagatagggttcagaccagaaggcacagcaaaaaaggacgctttgtaaagctaaaagctgcagttcatagggttaaataacagttttgaatatcagtgcaccaaataatacagtaaccaacttcataaaggagaaactatagtagatgtgaaaaacaaataaatagaaccacaccagtaatgaaactgcctttgcaaaaattatatcagtgagaaaattatagcagtgggggaggtctaatctaaccaaacccccaactctgcgcgcctttggctgtcaagatgccttcattattcctgggcttaggccaagctaactttggaagacatttaggttatagttcaaatgatagcccttttccaaaacccaactgcctttgtaaaacctatgagagaccaccaagctagcgggaggagaggagcctgaattctgctaagatgtggattggtcacaagacacgcaacttccccagttactcctacagataacaccactattgtagattggccttttgagatttaaaaatgtgcaaaatggccaggcacgatggctcacgtctgtaatcccagcattttggagggctgaggtgggtggatcgcatgagcccaggagttggagactagcctgggcaacatggtgaaacctcgtctctacaaaacatatcaaaagtaagccggatgtggtggcatgcatctgtagtctcagctacttggggggctaaggcagcagaattgcttgagcccgtgaggtggaggttgcagtgagccgagattgcaccattgcactccagcctcgatgacaggagtgaaaccctgtctcaaaaaaaaaaaaaaaaaaaaagtgccaaacatctgaatagacatttctcaaaagaagacatacaaatggcaaacaggtatatgaaaaggtacacaatataattgatcatcagagaaatgcaaatcaaaactacaacgagatattatctcaccccagttaaaatggcttttatccaaaagacaagcaataataaatgctggtgaggatatggggaaaagggaaccctggtacattcttggtgggaatgtaaattagtacaaccactatggagaacagtttggaggttcctcaaaaaaataaaaatagagctaccatacaatgcagctatcccactcctaggtatatacccgaaagaaagaaaatcagtatatccaagagctgtctgcactcccttgttgactgcagcactattcacaatagccaagatttggaagtaaccgaagtgtcaatcaacaggttaatgaataaagaaaatgtggtacatatacacaatggagtactaggaagccataaaaaagaatgagatcctgtcatttgcaacaacatggatggaactggagatcattatattaagtgaaataagcgaggcagagaagacaaacttcacatattctcacttatttgtgagagccaaaaattaaaacaattgaactcatggtgatagagagtagaaagatggttaccagcagctgggagggtagtgggacactgtgggggatggaaatagtcatttggcagaaaaaatagttagaataagacctagtattttctagcacaacaggatatactcaaaaataatttaattgtacattttaacataactaaaagtataattggattgcttgtaacacaaaggataaatgcttaagggtaccc

SEQ ID NO: 917094 - DNA, 4001 bp, Homo sapiens
aggctggagtgcagtggcgcgatctcggctgactgcaacctctgcctcctgggttcaagcgattctcctgtctcagcctcccgagtaacagggattacaggtgggagccactgcacccagccacctcctctcctttctcaaaaccactaatttacttaaacccttatattctcttacctgctgcagactagactgttctaccctcaaatccgttgtgaaaacacttcaataagtaaactccttcccctataccaacagtccccaaccagggactcgttttgtggaggacaatttttccatggacgggcagtcgggtgcggcgatggcttctggatgaaactgttccacttcagatcatcaggcattagagtcccataagaagtgcgcaacctagatctttcgcatgcgcagttcacaatagggtttgtgctatgaaaagctaatgcagcctctgataggaggcggggctccggcagtcatgctcactaaaccgccactcgcctcctgccatgcaccccagttcctaacagaccacagactggtaccagtctgaagcgtgggggttggggaccacctgccctatgtgatacaatccaagtttttaatggggtcctcaaagccctctatgatcttaggcctacggctctagcctcattttttaatataactctactatcaccattaaactcaacattttagcaaccctaaagtgcccaaagttcaccacatgaggtcatttcaagcctctcaaatttgcacgttacttctttttcctaggctggttttaatcctttgtctactttaggtttgtcatctttcaaacctaaggttaagaatctcttaatcattgaagcatttgggagtaaggggttagggggtgtccttacttccaaaactgacccattcctgcatgtctccgtgtatttccacagcctgctcccagagcactcattaacttgtcattgtctttcttatccaccattcctagaccactgttcttcaagacagggatgataagcaacccatctttgcatttttagcacctgccccagggtccagcaaacaaaatacaataaaaaaaaatgttgaacaagtgaataaaaaagtttgtaatttccaaaataaggtttaaagatcccagatacagaaggccctcagtaaataaaggctgaaaaaactgaaagatgtgtgagtatcccttgtttaactccaaagttcagcgtacaaagttgttagaaaagagattgatgaaaggaggaaaaaaggaagtcggatgacaagaagcatttctggaaagtctaacatgctataaatgacgatccagttgcctaaaagagcggtggggtgagaaagctcctggcaaattcagactggagtagatggagtgcgcacacgttggcattcagggagagcttttcaagaatgaaagaaaacccctactcacccaaatagaagctgtccggaccctggtggccatccctacggtcagttttgtgtgcctcgctggaagtgacaggacgcgagggatgctagaagagagagcacagtgaagaaagaggtcacccagcagtccccaaacccagagggggagggtccgaggcaccagggctgcctgccattctcggagctgaggctccttccctcccacagcacgggattcaccatctccacaccctcaccaacacacaggttagggtcaggcaaccgccccgggtcagcagcaggagagagctaaggcagattagttctgtcccgtcccgccgccttgaaaccggaggaattccgcacctccggctcctccaaaccctgaaggggcagcagaatagagtccagggtactgcctccacctccagatctgcagccagaagggttcgcaaccactccagactcggctggcccgttgaccacgacgggcgatgaacgctatctgaggaacaaggatctcgccatcggcgcggaacaatggcggccgctacgtatgtcgcacaggaattgcgtcatggagaggcaaaggcaaaaaaactacaactcccagaggcctctgcgaggagttactcccgcgccggagggctccggccaagggccaccgggagggggcgtgctaagatgacccggaagctcaggccttcctggccaggtccctgagctcccgcgcttgcaggttttaaattttaaagagaattaaaatacttgacaccaatggctcaacggttggagggatgtaaattaggttacaagtgttctagtccctgctttactgaaatggtaaaagtcttattttgctttacactttaataacagattcgtaaaattcccattacatgttaacataaataatattttaatgaaaattacatatattttacaaaagaaaaaatttagtaaggagtggcttcgctttttaagtcttttctgacttactagaaagctggattctcatatctgcttctatgtttaatctgttgcgtatgttgtttttgttaaagtatataaagatacaagtcgaacaagggatagttttgttagtgtacaatctgaaaccacgtagatgaactttttctactctattacataaaatccgttggtctacactgcactttgaatggattcttttatcacgcatgatttcgtaacatcatgtattggccagttggaaaatattggtttactttaatggcaaaagccgcaattacttacttttgcaccaacggaaaatatccactaatcattattgatcttaagtattgggaagaggtgacattcacagaggcagatacaagttttctagaattcttttgtttttggcttttaaaaacttttataaatttatgaggtacaagtgtaattttgttacatgcatcagttgtgtagtggtgatgtcaaggcttttaaggtatccacgccctatagtacgttatatgcattgtaccagtcaggtaatttatgattatccctgaaacccccccacaccttttgagtcttcattgtctatcatcccacactctacatccatgtgtacatatcctttagctcatacttaaagtgaaaacatgtgtttttctttctgtgcctgagttgtttcactgaagatagtggccactagttccatccatgatgctgcaaaagacaatttcattctttcttatggctgaatagtattccattgtgtatatataacacattttctttattcatccattcatggacatttaggttaattccatacctgtgatattgtgaatagtgctgtgataaacatatgagtgcaggtattttttttatatatataatgatttcctttgggtagatactcagtaacaggattgctttatcaaatggtaattctatttttagttctttgagaattctccacactgttttccataggttatactaatttcactttctcaccaacagtgtataggagtttccttttctccacatcctcaccaacatcttctttgtctttttatttttattattttattttattttttgagacggagttttgctcttgttacccaggctagagtgcagtggcccgatctcggctcaccgcaacctccgcccaggttcaagcaattctcctgcctcagcctcctgagtagctgggattacaggcatgcaccaccacacccggctaattttgtatttttagtggagacaggtttctccatgttggtcaggctggtcgcaaactcccgaccttaggtgatccggtcacctcagtttaccaaagtgctgggattacaggcatgagccaccgagctcggcctgtttttgtttgttttgatttttttttccttttgagacggagtctcgctctgtcgcccaggctggagtgcagtggcgcgatctgggctcactgcaagctccgcctcccgggttcacgccattctcctgcctcagcctcccaagtagctgggactacaggggcccgccaccacgcctggctacttttttgtattttttagtagagacggggtttcgccgtgttagcc

SEQ ID NO: 917095 - DNA, 4001 bp, Homo sapiens
tcctgtctcagcctcccgagtaacagggattacaggtgggagccactgcacccagccacctcctctcctttctcaaaaccactaatttacttaaacccttatattctcttacctgctgcagactagactgttctaccctcaaatccgttgtgaaaacacttcaataagtaaactccttcccctataccaacagtccccaaccagggactcgttttgtggaggacaatttttccatggacgggcagtcgggtgcggcgatggcttctggatgaaactgttccacttcagatcatcaggcattagagtcccataagaagtgcgcaacctagatctttcgcatgcgcagttcacaatagggtttgtgctatgaaaagctaatgcagcctctgataggaggcggggctccggcagtcatgctcactaaaccgccactcgcctcctgccatgcaccccagttcctaacagaccacagactggtaccagtctgaagcgtgggggttggggaccacctgccctatgtgatacaatccaagtttttaatggggtcctcaaagccctctatgatcttaggcctacggctctagcctcattttttaatataactctactatcaccattaaactcaacattttagcaaccctaaagtgcccaaagttcaccacatgaggtcatttcaagcctctcaaatttgcacgttacttctttttcctaggctggttttaatcctttgtctactttaggtttgtcatctttcaaacctaaggttaagaatctcttaatcattgaagcatttgggagtaaggggttagggggtgtccttacttccaaaactgacccattcctgcatgtctccgtgtatttccacagcctgctcccagagcactcattaacttgtcattgtctttcttatccaccattcctagaccactgttcttcaagacagggatgataagcaacccatctttgcatttttagcacctgccccagggtccagcaaacaaaatacaataaaaaaaaatgttgaacaagtgaataaaaaagtttgtaatttccaaaataaggtttaaagatcccagatacagaaggccctcagtaaataaaggctgaaaaaactgaaagatgtgtgagtatcccttgtttaactccaaagttcagcgtacaaagttgttagaaaagagattgatgaaaggaggaaaaaaggaagtcggatgacaagaagcatttctggaaagtctaacatgctataaatgacgatccagttgcctaaaagagcggtggggtgagaaagctcctggcaaattcagactggagtagatggagtgcgcacacgttggcattcagggagagcttttcaagaatgaaagaaaacccctactcacccaaatagaagctgtccggaccctggtggccatccctacggtcagttttgtgtgcctcgctggaagtgacaggacgcgagggatgctagaagagagagcacagtgaagaaagaggtcacccagcagtccccaaacccagagggggagggtccgaggcaccagggctgcctgccattctcggagctgaggctccttccctcccacagcacgggattcaccatctccacaccctcaccaacacacaggttagggtcaggcaaccgccccgggtcagcagcaggagagagctaaggcagattagttctgtcccgtcccgccgccttgaaaccggaggaattccgcacctccggctcctccaaaccctgaaggggcagcagaatagagtccagggtactgcctccacctccagatctgcagccagaagggttcgcaaccactccagactcggctggcccgttgaccacgacgggcgatgaacgctatctgaggaacaaggatctcgccatcggcgcggaacaatggcggccgctacgtatgtcgcacaggaattgcgtcatggagaggcaaaggcaaaaaaactacaactcccagaggcctctgcgaggagttactcccgcgccggagggctccggccaagggccaccgggagggggcgtgctaagatgacccggaagctcaggccttcctggccaggtccctgagctcccgcgcttgcaggttttaaattttaaagagaattaaaatacttgacaccaatggctcaacggttggagggatgtaaattaggttacaagtgttctagtccctgctttactgaaatggtaaaagtcttattttgctttacactttaataacagattcgtaaaattcccattacatgttaacataaataatattttaatgaaaattacatatattttacaaaagaaaaaatttagtaaggagtggcttcgctttttaagtcttttctgacttactagaaagctggattctcatatctgcttctatgtttaatctgttgcgtatgttgtttttgttaaagtatataaagatacaagtcgaacaagggatagttttgttagtgtacaatctgaaaccacgtagatgaactttttctactctattacataaaatccgttggtctacactgcactttgaatggattcttttatcacgcatgatttcgtaacatcatgtattggccagttggaaaatattggtttactttaatggcaaaagccgcaattacttacttttgcaccaacggaaaatatccactaatcattattgatcttaagtattgggaagaggtgacattcacagaggcagatacaagttttctagaattcttttgtttttggcttttaaaaacttttataaatttatgaggtacaagtgtaattttgttacatgcatcagttgtgtagtggtgatgtcaaggcttttaaggtatccacgccctatagtacgttatatgcattgtaccagtcaggtaatttatgattatccctgaaacccccccacaccttttgagtcttcattgtctatcatcccacactctacatccatgtgtacatatcctttagctcatacttaaagtgaaaacatgtgtttttctttctgtgcctgagttgtttcactgaagatagtggccactagttccatccatgatgctgcaaaagacaatttcattctttcttatggctgaatagtattccattgtgtatatataacacattttctttattcatccattcatggacatttaggttaattccatacctgtgatattgtgaatagtgctgtgataaacatatgagtgcaggtattttttttatatatataatgatttcctttgggtagatactcagtaacaggattgctttatcaaatggtaattctatttttagttctttgagaattctccacactgttttccataggttatactaatttcactttctcaccaacagtgtataggagtttccttttctccacatcctcaccaacatcttctttgtctttttatttttattattttattttattttttgagacggagttttgctcttgttacccaggctagagtgcagtggcccgatctcggctcaccgcaacctccgcccaggttcaagcaattctcctgcctcagcctcctgagtagctgggattacaggcatgcaccaccacacccggctaattttgtatttttagtggagacaggtttctccatgttggtcaggctggtcgcaaactcccgaccttaggtgatccggtcacctcagtttaccaaagtgctgggattacaggcatgagccaccgagctcggcctgtttttgtttgttttgatttttttttccttttgagacggagtctcgctctgtcgcccaggctggagtgcagtggcgcgatctgggctcactgcaagctccgcctcccgggttcacgccattctcctgcctcagcctcccaagtagctgggactacaggggcccgccaccacgcctggctacttttttgtattttttagtagagacggggtttcgccgtgttagccaggatggtcttaatctcctgatctcgtgatctgcccgcctcggcctcccaaagtgctgggattac

SEQ ID NO: 917096 - DNA, 4001 bp, Homo sapiens
tccagacctacttctggagtctactccgtacagttttatccacttcactccagactaaccatgaagcagttttttttttcccctgaaaatttcatcttgccataccaaattcaaataaccctgtgtcacagattctaatcactccacagacccacttctaacactccactggactatttgggataggaactccattctaaactcagctctgcttgttccagacacaggaaagcaattccataaggactatattggcatttagggtctttgtgtcccaaagcagaataaagatttcccctttggacacaaggcaacactattcagtggcttcacctgagcatttcatatttcattcctgatgagcattagtaggaatggaaagtgatgggggatagcgccaactttttacacaaaaacttcctgaccctcaagagataatagaaaaaaactgatttctctccacaacaatctcagcattacaattgctattactttaagtattctatcacattgtgaaacacacacacgccccatttggttgtgaccccttctcccccaaaaccagaaaagccattaacccaaaaatcatcttaccctctctctctcttcctcctgccgtcttattccttctcctttccagggctcctgaactttctgtaaacaaattgtctaggttacaggggccaggcagggtgcagccaccagagaactgtggagaacctcaggaattatttgtcagcagtcagtctggaaggcaggcagaccccccagccagcaatccaaagacgggtggatataataacagcagtctagtgctaccctctacgtggatacaagagaaataaatccaattcccagaaactaagacgaattctatcaccagcgtttgggtttcactcctaggctcagagactggtccttgttcgttcccaggccacaggtaaccaggggtcagagaacattagagatggaggaggaggagggtctgtgcccctgaggagtggcttcagaaggcaaagctgagggctgggggatgcacaagaccttgtggcaggcacagtgccagttcaggcccagccacttcctctagccttccccccacttcttcgaggacttcgccccctgcctacccgaggccttgtgccaagaagtacctccctcagcctgcaccgtggtctatctactggagaccccagctgtcccctcaaaaccttcgctcccctgagacagttcctgggagccttctcctgatgtcgtcccctacccctttctcaaagacccttccttgggacgtccctccttcccctccagggagctgaactctgccacccaccagacaggcacccgccccctaaacccccccattccttcccatcgcccgctcctccacaaccacttccggttccgggacggacacacacacagtcacatcgtggacccccccttccccgcctgcccaaggaaaaggggaggggggaggagcaagcagcttggcgcgcgccggctgtagcggcgcgagactcaccgggcggcgacggctgcggcggcgccagagcctgagccagggcgcgggaggggcggcgtttgctgggaaaggagggagccgaggagggtgggaggaccaggaaggggcgagggaggggaaaaagcgcaaggcgcagcgcgcgggcacgcacttctggagcgagacagacccacacactcacacgcacggaacgcgcgcgagacacccgcagggcgggggcgcgaggtagtgggtggccccccctccttgctgccctccccttgcactcacccggaagtggtgctgcagctcgtgctcccgcgaaccccagttcctccacgcccccctccctccccccaacaggctcagagaagagctctgcggagagaaggcgggagcgccggaaacgaaaaggggggagggagggaaatagcaatgtagggggggcgctaatggagaaagaggggcgtgcagaagccgagtcacttccgggagtggctggaacacttccggcgccgctagcgctgcgagatattcagggcagaagttacgataactcggggcggaaatagcttctgcccagcgactgggaagaggggatgtgacgctatagcggaagtgaaggcgggttccgctaggggcaaaagctgaaaccggaggactccggccctgagcttccggaagggacatctggggaaggtgggggggtggaaacgcgacaggttcatgaattatccatcaaggtaggagaggaggtgtgggttcttcagatgctgggaccccgtttctcttccctctggatgttgaataagctgatgtaggaaattaccattattttttctgatacccccaagaatgtctcaatgctttgaatatgcgggaaaggactaggacgtatccttgtttttcggaggtccctacttaggtccagttagaaactctcccagccatcaaaatctgtctctctgacacatcccttactttactttggtcttttcttgttgcccatacccacatctctatccccttaccctgttttacttaaatatagcacttattactgcctgatttattgtttgctgtccacctctcccaactaaaatattggctacaggacagcgaggactgaattgttcgttgctgtatcctcatatcctggcagttaagtggtctgtaaactcttgttgtataaatgaactatagttcattatgaacacctaaatatgaacccttttaggaagccttgcctgattgctccaacctgtaatggtccctctgaattcccatagtatttaatacgtaccttttattgatattttaactatttcatacatgtgattccccagcaagattgtcagttcctcatggaaggaaatacgttgctttgctgagcatatagtaaatgctgaatatgttgtttgaacaagtgaatgctgttacaagcgtgcaccccgacctggccagaatccccctgggctcagctctaagcagaactgaggtctctcctactaatggtaagagcctcttgctgagaaaaataaccttttttttttttttttaaagacagagtgtcaccctgttgcccaggctggagtgcattggcgccatcttggctcactgcaacctctgcctcctgggttcaagcgattctcctgcctcagcctccctagcagctgggatgacagtcgcccgccaccacaccgggctaattttttgtatctttagtggagtcggggtttcaccatgttggccaggctggtctcgaactcctgacctcaactgatccacctgtctcagcctcccaaagtgctgggattacaggcgtgagccaccacgcccagcaaaaaataactttaacagaaataattataatgctcattttacagataatgaaaataagcctgtaaaggattaagtgattttttcccccaaggtcaaagcaagaaagtaacaaagtacgcctttaaatatttaaatagatgatgcatttcattgtaattgtagtttgtatcttttttaaagtgtctgttccctttatcacatttttgggctcagcactcagtctctgttgactgagtagcaacagttggcagagtaaggattttaagggctcagatgtgaccagacctattgctgtgtgggttagagattgctgattcaagaaaccttgacatcaggggctggtattgaaaggtgggaacaggaaatagtaataatagctatacgttctggttctcctcctgctcttttcctatttatgttaactgggcacttcctgggtctccgtgtctccgtcagccctattcctgcccttgctataagaaggaagtttcccagctacttgggaggttgaggcaggagaatcacttgaacctgggaggcgaaggttgtggtgagccaagattgcgccattgcactccagcctgggcaacaagaactaaactccatctcaaaaaaaaaaaaaagaagtttcaagtgctttgaactccttagggaa

SEQ ID NO: 917097 - DNA, 4001 bp, Homo sapiens
taaatgatggatctggggaatgtgaggccaaaataaataaataagactggagaagaagagatatgtacccaatatttaatcaacaacttggctcagaaacccacagggcattttataaaccaacctctgggatcataagttctgaactcaaactctttaggtccactcactgtcattttcaggctacccgaaactcttccagacctacttctggagtctactccgtacagttttatccacttcactccagactaaccatgaagcagttttttttttcccctgaaaatttcatcttgccataccaaattcaaataaccctgtgtcacagattctaatcactccacagacccacttctaacactccactggactatttgggataggaactccattctaaactcagctctgcttgttccagacacaggaaagcaattccataaggactatattggcatttagggtctttgtgtcccaaagcagaataaagatttcccctttggacacaaggcaacactattcagtggcttcacctgagcatttcatatttcattcctgatgagcattagtaggaatggaaagtgatgggggatagcgccaactttttacacaaaaacttcctgaccctcaagagataatagaaaaaaactgatttctctccacaacaatctcagcattacaattgctattactttaagtattctatcacattgtgaaacacacacacgccccatttggttgtgaccccttctcccccaaaaccagaaaagccattaacccaaaaatcatcttaccctctctctctcttcctcctgccgtcttattccttctcctttccagggctcctgaactttctgtaaacaaattgtctaggttacaggggccaggcagggtgcagccaccagagaactgtggagaacctcaggaattatttgtcagcagtcagtctggaaggcaggcagaccccccagccagcaatccaaagacgggtggatataataacagcagtctagtgctaccctctacgtggatacaagagaaataaatccaattcccagaaactaagacgaattctatcaccagcgtttgggtttcactcctaggctcagagactggtccttgttcgttcccaggccacaggtaaccaggggtcagagaacattagagatggaggaggaggagggtctgtgcccctgaggagtggcttcagaaggcaaagctgagggctgggggatgcacaagaccttgtggcaggcacagtgccagttcaggcccagccacttcctctagccttccccccacttcttcgaggacttcgccccctgcctacccgaggccttgtgccaagaagtacctccctcagcctgcaccgtggtctatctactggagaccccagctgtcccctcaaaaccttcgctcccctgagacagttcctgggagccttctcctgatgtcgtcccctacccctttctcaaagacccttccttgggacgtccctccttcccctccagggagctgaactctgccacccaccagacaggcacccgccccctaaacccccccattccttcccatcgcccgctcctccacaaccacttccggttccgggacggacacacacacagtcacatcgtggacccccccttccccgcctgcccaaggaaaaggggaggggggaggagcaagcagcttggcgcgcgccggctgtagcggcgcgagactcaccgggcggcgacggctgcggcggcgccagagcctgagccagggcgcgggaggggcggcgtttgctgggaaaggagggagccgaggagggtgggaggaccaggaaggggcgagggaggggaaaaagcgcaaggcgcagcgcgcgggcacgcacttctggagcgagacagacccacacactcacacgcacggaacgcgcgcgagacacccgcagggcgggggcgcgaggtagtgggtggccccccctccttgctgccctccccttgcactcacccggaagtggtgctgcagctcgtgctcccgcgaaccccagttcctccacgcccccctccctccccccaacaggctcagagaagagctctgcggagagaaggcgggagcgccggaaacgaaaaggggggagggagggaaatagcaatgtagggggggcgctaatggagaaagaggggcgtgcagaagccgagtcacttccgggagtggctggaacacttccggcgccgctagcgctgcgagatattcagggcagaagttacgataactcggggcggaaatagcttctgcccagcgactgggaagaggggatgtgacgctatagcggaagtgaaggcgggttccgctaggggcaaaagctgaaaccggaggactccggccctgagcttccggaagggacatctggggaaggtgggggggtggaaacgcgacaggttcatgaattatccatcaaggtaggagaggaggtgtgggttcttcagatgctgggaccccgtttctcttccctctggatgttgaataagctgatgtaggaaattaccattattttttctgatacccccaagaatgtctcaatgctttgaatatgcgggaaaggactaggacgtatccttgtttttcggaggtccctacttaggtccagttagaaactctcccagccatcaaaatctgtctctctgacacatcccttactttactttggtcttttcttgttgcccatacccacatctctatccccttaccctgttttacttaaatatagcacttattactgcctgatttattgtttgctgtccacctctcccaactaaaatattggctacaggacagcgaggactgaattgttcgttgctgtatcctcatatcctggcagttaagtggtctgtaaactcttgttgtataaatgaactatagttcattatgaacacctaaatatgaacccttttaggaagccttgcctgattgctccaacctgtaatggtccctctgaattcccatagtatttaatacgtaccttttattgatattttaactatttcatacatgtgattccccagcaagattgtcagttcctcatggaaggaaatacgttgctttgctgagcatatagtaaatgctgaatatgttgtttgaacaagtgaatgctgttacaagcgtgcaccccgacctggccagaatccccctgggctcagctctaagcagaactgaggtctctcctactaatggtaagagcctcttgctgagaaaaataaccttttttttttttttttaaagacagagtgtcaccctgttgcccaggctggagtgcattggcgccatcttggctcactgcaacctctgcctcctgggttcaagcgattctcctgcctcagcctccctagcagctgggatgacagtcgcccgccaccacaccgggctaattttttgtatctttagtggagtcggggtttcaccatgttggccaggctggtctcgaactcctgacctcaactgatccacctgtctcagcctcccaaagtgctgggattacaggcgtgagccaccacgcccagcaaaaaataactttaacagaaataattataatgctcattttacagataatgaaaataagcctgtaaaggattaagtgattttttcccccaaggtcaaagcaagaaagtaacaaagtacgcctttaaatatttaaatagatgatgcatttcattgtaattgtagtttgtatcttttttaaagtgtctgttccctttatcacatttttgggctcagcactcagtctctgttgactgagtagcaacagttggcagagtaaggattttaagggctcagatgtgaccagacctattgctgtgtgggttagagattgctgattcaagaaaccttgacatcaggggctggtattgaaaggtgggaacaggaaatagtaataatagctatacgttctggttctcctcctgctcttttcctatttatgttaactgggcacttcctgggtctccgtgtctccgtcagcc

SEQ ID NO: 917098 - DNA, 4001 bp, Homo sapiens
ttcagaactgaaacctttgtagggtccctgggggtccctgggggtggggccggagccctggctggcagcttcctccctctctccttccttcctcatagagggctaaggtatgtgggctttgccagacttcccgcactctgtgggcttggcataaggagggaattaattacagtgtcctccagggggatgtgagggtaccacttgtggctgtggtccagtttcagaaaatgtggacccaggaattattcctgtggctggggtcttggtcaggctccagcaagcaggtccttgatgtccttttcagggcctgctgaccagggaaagcacggcttatgccagcctattctgggcaagcatgatgctgcctctcgagctgtgcccagggtggagccagggtgcagagatcacacaggttggaggaatgtgggtcctgtgctctgggggactgagtgcaatgtgtgctggtgggggtcactctagcatcagggtggtattcatagaagggtgggtaataccttcccctgctggagaggctcttgagaaggaggcaggcaaccagccattcatgccttcgttcagtcatccattcaatagataggtggagtgccaggtggagggggtgagacatacagcagagagagactgaggacacacaggaggaggagagaaaaagagatggaggaagggcagaaggacaataggtagtcaacagggataggcggtgaaatgaaagaaggtaagaaaggaagacaaatagcagagggactcaggagagggatgagtgcaggagccagtcaagccctccaggtaccagcatggagccaggtgtcctcggttgggggcagggagaccacaggtgtctaggcctggttggggggctcccatcataaacagatcccagaaaccagcctagccagggtggagggcagaggtcagagcaggcctgtggactattgtggaggcagggtggagggcaggggcatgcagccggcgctgatgcagagtccagagcacagctaggccctttcctcccccacccctggggctcccttcctgatgtaggtcatgaggatggggtggctgtggctgacgggctgtcagagcccagcaggagttcccatcccccatacttaccctctccattgcccctccctctcctggtgcccccggcccaaggcaggggtggagggagaagaaggaagtgaggaaagagggacttaggcagctacagcagggagagagaggggcaggtctcggcgtgttggggcaggatggctgtggagacaggctctgagccgcaggagccctggatggacagtttcccaccccctattttccccaccccctcttctcccaagcccctcttctccccagcccctctgctccccagccctcttatctccggccctcaggttcccacctcccaccacactcacctcgaagctacacccaccatcttctccttccaccccccacttcctcctttcccccttatcctgggcccagaaggatgtcggagtatctaagctaagggtgggggaagacgctggggcgggagacgggtcagaacctttcccccaactccaccaggccaggaccagccccctcccccagcctctcgtagactggtatataatattcatgagcctcatgaatacgcaatgttctaattatggggcgggggtctcactccgctctgcctcccgctttaccactccctaaattacccggagcagcggcagcctgggaaagaggggaagaggggaagaggggaccccagatgtggagccagatgaagggggagggggaaccggtcgctgacgggcggccgcagtcaccgcggtgccgggagatggtggaggggggcggtgggtgacccacagagaggaacccaggagccgggagcctggagtcgcagagaccactcaccgaggatcatgctggggacccaggcgcccggggttccgcgtcgctctgtcccgggggccgttctggccgggctgggggtacggggggaggagccggggaggagcagaggccggccgaggcggagcgggggcggggccctcagcaggtgaagacgggaggaggggacccgggcactcagggctccgcgagggggcgtcctggcccctcccgcttcctcccgcccttcttcttgctgcctgctggcctcctgggtttacggtgtcactgcggccagggctgggggaacaggacgtctagaagacggtgtgaggtgatggacgaagctggaaactaggatgcctgggttcccgggaagggctgagtctgagggcgggaagtctggtgctgggctgatatggggtgggcaggggagtgggggggggaggggggcgggggtgcctaagtactctgggaggcgatgggccttgggttgggtaggatacctaggttccctccagagtaatggactgagcagggggcaggggaagtgcagcagaaattgtatgggtcctagtttgttgttctggctttggagcaggatgcctgggggctgggcctctgaggtgaaatgggatgttgaagatggatcccaggttgagttctggctggggtctgaatgcctgggtccttagggaaggtctcagcgaggagattgcaatcaatggacctgaggagatggaaatagaagcttgtaaccgagatcattagggcaactggaagatgacagaaaattcagaactgaggcaccttgtagagatgacctggattagggtggggtggcatcagggagcatctatccagggctaaatcagcggcattccccactaaggcgagcttcggtcgaggaggactggtgggggggcatttcgtgaggtggaggggaagatggagggtaggacaaaatgtatgagcaggggagaatgtcaggagggagaggaagtacaggccacttggaggtattcttttcttcttttttcttttttcttcttttttgagacccaagtcttgctctgtcgccaggctggagtgcagtggcacgatctcagctcactgcaacctctgcctcccgggttcaagcattctcctgcctcagcctcccgagtagctgggattacaggtgcccgccaccacgcctggctaatttttgtagttttagtagagacaggatttcactatgttggccaggctggtctcgaacgcctgacctcaggtgatccgcctgcctcgctctctcaaagtgctgggattactggcgtaagccaccgcacgcagcccactcagaggtattcttaagggaccccagtacaaggtaggagtcttggagaatgcagatgtctgggggagatggaggctggatctgtctgtacttgtctcaagagggagggtggcagccagatttcccagaatgccacacagccagcttcaggccaaccccaatcagaggaaaagtgggtgggaactggaacgtttgaggtttagggaggtagaagctgaggggaagaagttggtgaaagggtggtgggactgaagtttcggaatggtttaggaaggggaaagagactgacattcctgggttctggagggaaattgggactggatggtcaattaaggtgcaggaagtttgagtttctgtttctgggtcccagcaatctcttgccctcacgccagtaatctggtttgaagaaaagacctgtttctgtacctgccaagacactccagctcaagggagagaatgctgggagtgccaatgccttagtctcattctgattcagtggggcagagatctcaggggattggccttgggagaggatatggggtttctgggtccatcagaggaggtcctcctgctctgggtctgacctaccaccatgctggtcaactccagtatgaaaaacccttgcttctccttagaccctgcacctcctttcctcttcccattctttctcctcctgggtggactcagagactaaacaagagccatcatcaggcatggtcgattggttttagagacccctttgcgctcagctgttgtc

SEQ ID NO: 917099 - DNA, 4001 bp, Homo sapiens
cccaaacttttagctctagcccaccttccaggcttcagattctaactatctgtagaacattttgggctcaatgtcctactggtatgccaaatcaccatatccttttttttttaaaaaaaatatttattattattttttaaaacaaaacaaataggccaggcacggtggctcaagcctgtaatcccagcacttgggaggctgaggcaggtggatcacaaggtcagggttccagaccagcctggccaagatggtgaaaccccatctctactaaaaatacaaaaattagctgggcatggtggtacgtgcctgtaatcccagctactgaggagggtgaggcaggagaatggcttgaacccaggaggcggaggttgcaatgagtcaagatcatcatgccactgcactccagcctgagagattgagcaagactacatctcaaaaacaaaacaaaacaaaacaaaacaaataaagctttagctttagcaccacatgctaaagcatcatcctcactggagaccagcttcctcttccaaccctctgcctctgtcagtggtgacttccatccaatcacaaaggcctgaatgctggagtcatccttgactcatgccttctcttctcccccacccccaaacaccagttggtcaccatggcctgtcaatatttccttgaaattacctcccccattctccctttctctccactcatactgccactgccaccagccccgtctggcttttgaggcttccctcgggcctgcattgctaggacagcctcctaactgtcaccttcctcctgcctctgttccctttcatccagttgccccactcaccttcctcaaacactgctcttaccaagtcactctcctgctcaagaatagacagtggcggctgggtgtggtggctcatgcctgtaatcccagcactttgggaggctgaggcaggcggatcacctgaggtcaggagtttgagaccagcctggccaacatggtgaaaccccatctctactaaaaatacaaaaattagcccggtgtggtggcacacgcctgtaatcccagctacttgggaggccgaggcaggagaatcggtgaactggggaggtggaggctgcagtgacccaagatcgtgccactgcacaccagactgggcaacagagtgagactccgtctcataaaaacaaacaaacaaacacacgaatagacagcacctccttatttcatattgtattaaatctagaccaccttgccagtcctccaagccctatcccactgatgctacccacccagccgtggactgcagagaggtgaaacttacaaacaggcatgcttattttcctgctcattccctctttctggattcagcacctacacccctcctacctccctactgttactaccaccaatttaagtctcattacttctctagatggtagggcgattcactgtaggactaaatgagataattcatataaaacacttagcacagtgtctggcccgtagcaagacctcagcaaatattagctattattattgttgttaacactgtaccagatggcccacaatactcaaaattaactagaattaaggaagatggggtcataagaggagataaggaattagaaacagaagaagagggcagaggtgggtctgagagagaaaggtcgggtcacaagaggatggagaaggcaggcaggctgctacttacggtgctgtagttgctgaagaggccaagggtaggggctggctcgagtgggaagggcaggatctgcttgaggtccagtgggggctgcatgatcgggggctgccgtagcagaggcaggggccctgcccggctcaggctgcctgaagggcagagaaaacattctgtggggtaggaagattaaagcttgggaaccccacccaagcctgccagtcccactccctagccagggcccccacactcagaagtgtcaccctcagtgcacatagtgtacacacttcccctgctggctccagagcaatggagcacagtgccctgtgggcctgggggagggtgtagaccagtccttcccttctgggtggttttcacttcccccttttccagcctccctcccccaaactccttaggcacattacagacccagtaagagctcataccttttctgcaggctgcctgctgaaccagcaggactcccagcctcaagcccctggccaccctcttcttctggttttgctttcccccaggggatcctaaagcttggtatcgccccaggaagaagagagtcaagtgggtgattcatcctactgaccagagggggatattgagacttagatttggaggggggctgctgaatctctcagatgccctagaattagattttgctctaactataattctttattaactattgacatctgtgggggtaggtagtgggttgggtggcttttgctctgggaggtgaactacctaggccattctcagagccccttctcccaaccttcctcagtcttcccccatgcccttttgtctcaccaggaatgctcagctacaggtccagttctgcaggaggaacctcgacctggcctatgggcggggaatgcctgggtctgaccccaaggggaaatgaaagtccaggccagccattcaactacccttctctgaaaccttctcctcctcctctcagagtcacgggaggaactccaccagactccaaaggggcagcccaaaggtcctcagagcccttctgggcttccactggcccagctcccttctgcgaccctgctgtgcaccagctggggagttctggccgcccttcactgctccagtaaccccctgacagcaacaggggttcccaggaacaaaggcaaaccgaggaggctgcgtgcttggcccgtcctcccttgactttactagagcagaaggtctccaggatcccttcctgttccctccagacaccaccccctttcatacctttagtttctgatgcctgctgcccccaggcagtggcctggccctggccccccaggggcctgggcctgacagcgtccccttcccttggttctgccctctgccccctcccttgccagccccctccccctcagcccagtcagtagaatcagccaatcagaatcctggaaaagtggggcagaggggagggcaggggagcagggattaggggaatctgaggcgacagggagggggtggggagggctcaggcacagctgggggctgggagctggtccagaaaggtctggaggggtctgtctctttcaccccatgccaggatgggtggtcagggtgactgagacagagcagggggtcaaggctactgggagtttgggcttcagaattctcagggctaaaggagagggtaagatccttggctttgacccttaagtagctgggggtctgtatgctttgtgtctattccctcctctgtcaccttcaaggttgggatggggtggagagaggacacacacacacacacacacacacacacacacacacagagagacggacagatgaaagtgagtgagaggatgggagagtggtagcagcaggaataggtgactgaggaatcggacagtgacactgagagagaaaaggatagagaacaatggagagatgtcagagagcgaaatcagacatacaaacagagagacactgccgaaaagctggacacagaactagagactagggcagacagaccgagagacagagaacagagacagcgagaaagataaaagagaagagagagggacagatagatggatggggcagcttgaccacctccccttcctggtctgtccccttatggcatctgccctctgtgccccaccctcccttactgcctgttacccaaggccagggcagccttaatgagccccaggcggcatcaggaatggtgagagaaacctgagtgctcccagagtcccctgcacccagcatccacccccagcagctggttttgggctggcacttgccctgccccagagcaccagaggctgaagcttggcttgaccctttccc

SEQ ID NO: 917100 - DNA, 4001 bp, Homo sapiens
gaggccgaggcaggagaatcggtgaactggggaggtggaggctgcagtgacccaagatcgtgccactgcacaccagactgggcaacagagtgagactccgtctcataaaaacaaacaaacaaacacacgaatagacagcacctccttatttcatattgtattaaatctagaccaccttgccagtcctccaagccctatcccactgatgctacccacccagccgtggactgcagagaggtgaaacttacaaacaggcatgcttattttcctgctcattccctctttctggattcagcacctacacccctcctacctccctactgttactaccaccaatttaagtctcattacttctctagatggtagggcgattcactgtaggactaaatgagataattcatataaaacacttagcacagtgtctggcccgtagcaagacctcagcaaatattagctattattattgttgttaacactgtaccagatggcccacaatactcaaaattaactagaattaaggaagatggggtcataagaggagataaggaattagaaacagaagaagagggcagaggtgggtctgagagagaaaggtcgggtcacaagaggatggagaaggcaggcaggctgctacttacggtgctgtagttgctgaagaggccaagggtaggggctggctcgagtgggaagggcaggatctgcttgaggtccagtgggggctgcatgatcgggggctgccgtagcagaggcaggggccctgcccggctcaggctgcctgaagggcagagaaaacattctgtggggtaggaagattaaagcttgggaaccccacccaagcctgccagtcccactccctagccagggcccccacactcagaagtgtcaccctcagtgcacatagtgtacacacttcccctgctggctccagagcaatggagcacagtgccctgtgggcctgggggagggtgtagaccagtccttcccttctgggtggttttcacttcccccttttccagcctccctcccccaaactccttaggcacattacagacccagtaagagctcataccttttctgcaggctgcctgctgaaccagcaggactcccagcctcaagcccctggccaccctcttcttctggttttgctttcccccaggggatcctaaagcttggtatcgccccaggaagaagagagtcaagtgggtgattcatcctactgaccagagggggatattgagacttagatttggaggggggctgctgaatctctcagatgccctagaattagattttgctctaactataattctttattaactattgacatctgtgggggtaggtagtgggttgggtggcttttgctctgggaggtgaactacctaggccattctcagagccccttctcccaaccttcctcagtcttcccccatgcccttttgtctcaccaggaatgctcagctacaggtccagttctgcaggaggaacctcgacctggcctatgggcggggaatgcctgggtctgaccccaaggggaaatgaaagtccaggccagccattcaactacccttctctgaaaccttctcctcctcctctcagagtcacgggaggaactccaccagactccaaaggggcagcccaaaggtcctcagagcccttctgggcttccactggcccagctcccttctgcgaccctgctgtgcaccagctggggagttctggccgcccttcactgctccagtaaccccctgacagcaacaggggttcccaggaacaaaggcaaaccgaggaggctgcgtgcttggcccgtcctcccttgactttactagagcagaaggtctccaggatcccttcctgttccctccagacaccaccccctttcatacctttagtttctgatgcctgctgcccccaggcagtggcctggccctggccccccaggggcctgggcctgacagcgtccccttcccttggttctgccctctgccccctcccttgccagccccctccccctcagcccagtcagtagaatcagccaatcagaatcctggaaaagtggggcagaggggagggcaggggagcagggattaggggaatctgaggcgacagggagggggtggggagggctcaggcacagctgggggctgggagctggtccagaaaggtctggaggggtctgtctctttcaccccatgccaggatgggtggtcagggtgactgagacagagcagggggtcaaggctactgggagtttgggcttcagaattctcagggctaaaggagagggtaagatccttggctttgacccttaagtagctgggggtctgtatgctttgtgtctattccctcctctgtcaccttcaaggttgggatggggtggagagaggacacacacacacacacacacacacacacacacacacagagagacggacagatgaaagtgagtgagaggatgggagagtggtagcagcaggaataggtgactgaggaatcggacagtgacactgagagagaaaaggatagagaacaatggagagatgtcagagagcgaaatcagacatacaaacagagagacactgccgaaaagctggacacagaactagagactagggcagacagaccgagagacagagaacagagacagcgagaaagataaaagagaagagagagggacagatagatggatggggcagcttgaccacctccccttcctggtctgtccccttatggcatctgccctctgtgccccaccctcccttactgcctgttacccaaggccagggcagccttaatgagccccaggcggcatcaggaatggtgagagaaacctgagtgctcccagagtcccctgcacccagcatccacccccagcagctggttttgggctggcacttgccctgccccagagcaccagaggctgaagcttggcttgaccctttccctggttctagatttctctaggctcccactcctcaaagccatcttaagaggagacagcagagttccagaaaaagccacagaaaaaaatttgaggctactatgtgccaggtaatgaattccaagtattatcatatttaacctctgaagtagctcaatgaagtagccatgattcaatgaagtagctgataatatttttctacttgacttatgaggaaatggagactcagagtagttaacaaacttggctgatgtcacacagcctgtaaatatcagagctgagatatagatcaagatctgctggactctacagcaaattctttctctgctaccttactcccaaagggcttgaatttaactgaagcagagatctgagcacaggcttccatcttgttcaaggagaggaaggggagagcaggttccatgcacttcctcaggttggagtcctcatttttcctccagaggagggatagaggaaaacaggtagcagccactcagttatctatggctaacaactcatcttttccacagacatgagccctgggtgagcgggggaggggaggggagtggagtgggagagaggggtcaaatgagggtacagtgagggaaggaagcaggcaggcaactggagacaaactatctacttcccagattcctgggtccactccattctgaggtggcgagagaggcagatggcagcttttgggccgggtgggcagaaacaggactcttggtttcaggtagcccaggccttaggcctctccctctctttttctgaggctaacaatagttgccgctttttgaggctttactataggccaggcactttacatacacaatctcccagtaggtggtcccaccactcactagctgggtgagcagctaggttctctgactctcagtctcatttctcatctgtcaaatgaaaacaacactacttgcctcaccaagttgttgacaggattgaacaaatccatgtaagatgctggcatgtcacagtgagaactcaataaatatttgctgaataaatgaatctcatcttatagatgatgacaattggctca

SEQ ID NO: 917101 - DNA, 4001 bp, Homo sapiens
ccacagaactcagatactcctgcagatgagctggggaggggaggagaagggtggggagcgggggagaaggggcttcagtcactcctgcaggtgaggtggggaggggatgagaaggatgggggaggagaagggtagggaggggaggagaagggtggggaggggaggagaaggggcttctgtcctgggacgaacacactggtctccattcactcacttcatcaggtgcccaagtcaggcgctcacagagcccctcccctgtaactgacattctgaggcttgcgccacagaccccctaaattagaccccagtcactcaatgcccagggatccctaatcccttatccccggggcccccaagcattcgcccccatgacaccccattctctaatccactccatgctggagcattcactgacattcccacaggccctcccaaacaccacctggaaagggattgtggggctctgcacaaatgccgatcccgcaggcccctccaatgacgccaagtatgacccccgttgtccacgcactcacaacttgcaacaggtccaccattaacttacatccagactcccttgtcacaaatacacagcgccattcctaatgcttccatcataagatccccaaacacaagcacagaaacaaaccccagccactcgccagcataggccaccccatactcgcctccgctattggagacaggggttgaaagagcaaccactgttattcagctgtcaaataaaacatacaactggacagagcaaagaaagacggttccaaagggttattggaagtggggaaaaaaagacgcggaagagggttgggaaggggaaggagaacgggcttctgggaagaaccgtgaagccacgagactcacgtgcatctctgcaaggcaaaaagggtttttctttcacagagaggtgtgaacaaggttagcaaagaccaggcctggccaagcgaggtggaagtgcgggcgaccagacagcagagcggggaaagcttgaccctgagccagcctgttctcaggcgaggctgcgtgttggctcaggctggggatgggccaaagctcaagaaaatggggaaaggaaagaagcttagctaaagtttgcttaaggagcattttgctccgaccgctcggtggagttcagccagtcaccgatgaggcaagcgacggcaacgtggcaggtctgtgtgaacaaggggcatcctggaggctgaccaaagtcatatagggaacgggagatctttgcagtgagccatttgctggaacccaaaagggtgggaaattcctcaaccttcgctgttttccaggagcacagggctctggtgaaatccaacactgtcacagccggcaggctttccagtgaatggaacccacacaagcaagcccctaagccctccaacgcaggcccccgcagaagcctcatcattcaccccgctggcctccaatgctcacccaaaggcatccaaatcattcatcagcagagtcctaatcgctgcagacaaatcctccacacggcctcccaggggcccctctcccctggggccaagggcaacctcgcgtccccttgccccgcccgtgctgcaccccaagtctacagcgacctccataggcccccagtgaatcgcccagctgaccccaaatctcccccgacacccacattcagcgccccgccgccgcccgccctacagcccccaccccaccctctgcctcccacccccgcgcgcccccagagcccccgcctgaggcccgccttccgcgcatgcgcccaggccggtccgcaggcctttctcgccccagccggcagccagctcgttcgcgctggggtcaccgcgagccggtccgcagcggggtcaccgcgatccccggcgcagacacagaggccgcccccagccccgccgcctcgtggtcccgcccccgctgcacgctcccttacccctcggacctcgcagggccgcggcggacacggcccgatcggggacgtgaacgcgcagaactacatttcccagcgtcccgctcgcgctggaactacacttcccggggggctcggcggtgcacccgccggggtcgcggattggaggtttccggttggaaaagccccttggcggctaactggggaggactggaagaaatctaggatggagccagcactgctggcccaacatgtctgtgagagaacctaaaggcgcctccaggaggaagcgtctgcatcttttccttgttttttttttttttttttttggaggcagggtctcgctctgtcacccagtggggagtgcagtggtgccatgaacgctcattgcagcctcaggctggtctccgactcctgggttcaaatgatcctcctgccccagcctcccaaaatgctggaattacaggcatgagtcactgcgtccggctgcttttccatttttcatcgtagctgtaagtaatatcggtaaatgttagtgttacgtgcgtccgtataggagaccacctgagcaggctaagtgtgagcaacacgcctgtttattcacttgggtgcaagtgggctgagtctgagaaaggagtcagcggagggtggtgggcttgtcattggttcttatagctttgggataggataggcggtggagtcagcagcaatttttttttttttttttttttttgagacagagtctcactctgtcgccgaggctggagtgcagtggcgcgatctcggctcactgcaagctccgcctcccgggttcacgccattctcctgcctcatcctcctgagtagctgggactacaggcacccgccaccacgcccggctaatttttttgtatttttagtagagacggggtttcactgtgttagccaggatggtcttgatctcctgacctcgtgatccgccctcctcggcctcccaaagtgctgggattacgggcgtgagccaccgcgcccggcctcagcagcaattttttgcgggcaggggaggatgttacaaagtacattcacaagggcggggagggtgtattgtcacaagggcggagaggaatgttacaaagtacattcacaaggaccgggaatattacaaagtacattatcacaagggtgggggaatgtcacgatggcttgaccatggtgcggccagctcagaggaccttacatttagtacatccaatccagcagtattgacaaaaggaatgaaaatagatgatagggttgggcgcggtggctcacggctgtaatcccagcactttgggaggctgaggtgggcggatcaccaggtcaggagattgagaccatcctggccaacacggtgaaaccccgtctctactaaaaatacagaacattagctgggcgtggtggtgggcgcctgtaatcccatctactcgggaggctgaggcaggagaatcacttgaactcgggaggcgggggttgcggtgagccatcatgccgctgcactctagcctggcaacagagtgagacctcatctcaagaaaaaaaaaaggaaaaataaatgagatgaggacattacagggaaataaaatatatttatggatatataaagcagtggcttgtccctgtagtcccaactactggaggctgaggcaggaggattgcctgagcctgggaggttgaggctgcagtgagctatgatggcaacactgcactccagcctgggccacagagggagacaccttctcttaaaaatattttttggccaggccaggcgcggtggctcacacctgtaatcccagcactttgggaggctaaggcgggcggatcacctgaggtcaggagttcgagaccagcctgaccaacatggtgaaaccccatctgtactaaaaatataaaaattagccaggtgtggtggctcatgcctgtaatggctcatacctgtaatcccacctactcaggaggtggaggcatgagaattgcttgaacccaggaggcagaggttgcagtgagctgagatctcaccactgcactccaccctgggagacagagtgagattctgtctaaaaaaaaaaaaaaa

SEQ ID NO: 917102 - DNA, 4001 bp, Homo sapiens
caaactctgagtcccaaaggatccccacagaactcagatactcctgcagatgagctggggaggggaggagaagggtggggagcgggggagaaggggcttcagtcactcctgcaggtgaggtggggaggggatgagaaggatgggggaggagaagggtagggaggggaggagaagggtggggaggggaggagaaggggcttctgtcctgggacgaacacactggtctccattcactcacttcatcaggtgcccaagtcaggcgctcacagagcccctcccctgtaactgacattctgaggcttgcgccacagaccccctaaattagaccccagtcactcaatgcccagggatccctaatcccttatccccggggcccccaagcattcgcccccatgacaccccattctctaatccactccatgctggagcattcactgacattcccacaggccctcccaaacaccacctggaaagggattgtggggctctgcacaaatgccgatcccgcaggcccctccaatgacgccaagtatgacccccgttgtccacgcactcacaacttgcaacaggtccaccattaacttacatccagactcccttgtcacaaatacacagcgccattcctaatgcttccatcataagatccccaaacacaagcacagaaacaaaccccagccactcgccagcataggccaccccatactcgcctccgctattggagacaggggttgaaagagcaaccactgttattcagctgtcaaataaaacatacaactggacagagcaaagaaagacggttccaaagggttattggaagtggggaaaaaaagacgcggaagagggttgggaaggggaaggagaacgggcttctgggaagaaccgtgaagccacgagactcacgtgcatctctgcaaggcaaaaagggtttttctttcacagagaggtgtgaacaaggttagcaaagaccaggcctggccaagcgaggtggaagtgcgggcgaccagacagcagagcggggaaagcttgaccctgagccagcctgttctcaggcgaggctgcgtgttggctcaggctggggatgggccaaagctcaagaaaatggggaaaggaaagaagcttagctaaagtttgcttaaggagcattttgctccgaccgctcggtggagttcagccagtcaccgatgaggcaagcgacggcaacgtggcaggtctgtgtgaacaaggggcatcctggaggctgaccaaagtcatatagggaacgggagatctttgcagtgagccatttgctggaacccaaaagggtgggaaattcctcaaccttcgctgttttccaggagcacagggctctggtgaaatccaacactgtcacagccggcaggctttccagtgaatggaacccacacaagcaagcccctaagccctccaacgcaggcccccgcagaagcctcatcattcaccccgctggcctccaatgctcacccaaaggcatccaaatcattcatcagcagagtcctaatcgctgcagacaaatcctccacacggcctcccaggggcccctctcccctggggccaagggcaacctcgcgtccccttgccccgcccgtgctgcaccccaagtctacagcgacctccataggcccccagtgaatcgcccagctgaccccaaatctcccccgacacccacattcagcgccccgccgccgcccgccctacagcccccaccccaccctctgcctcccacccccgcgcgcccccagagcccccgcctgaggcccgccttccgcgcatgcgcccaggccggtccgcaggcctttctcgccccagccggcagccagctcgttcgcgctggggtcaccgcgagccggtccgcagcggggtcaccgcgatccccggcgcagacacagaggccgcccccagccccgccgcctcgtggtcccgcccccgctgcacgctcccttacccctcggacctcgcagggccgcggcggacacggcccgatcggggacgtgaacgcgcagaactacatttcccagcgtcccgctcgcgctggaactacacttcccggggggctcggcggtgcacccgccggggtcgcggattggaggtttccggttggaaaagccccttggcggctaactggggaggactggaagaaatctaggatggagccagcactgctggcccaacatgtctgtgagagaacctaaaggcgcctccaggaggaagcgtctgcatcttttccttgttttttttttttttttttttggaggcagggtctcgctctgtcacccagtggggagtgcagtggtgccatgaacgctcattgcagcctcaggctggtctccgactcctgggttcaaatgatcctcctgccccagcctcccaaaatgctggaattacaggcatgagtcactgcgtccggctgcttttccatttttcatcgtagctgtaagtaatatcggtaaatgttagtgttacgtgcgtccgtataggagaccacctgagcaggctaagtgtgagcaacacgcctgtttattcacttgggtgcaagtgggctgagtctgagaaaggagtcagcggagggtggtgggcttgtcattggttcttatagctttgggataggataggcggtggagtcagcagcaatttttttttttttttttttttttgagacagagtctcactctgtcgccgaggctggagtgcagtggcgcgatctcggctcactgcaagctccgcctcccgggttcacgccattctcctgcctcatcctcctgagtagctgggactacaggcacccgccaccacgcccggctaatttttttgtatttttagtagagacggggtttcactgtgttagccaggatggtcttgatctcctgacctcgtgatccgccctcctcggcctcccaaagtgctgggattacgggcgtgagccaccgcgcccggcctcagcagcaattttttgcgggcaggggaggatgttacaaagtacattcacaagggcggggagggtgtattgtcacaagggcggagaggaatgttacaaagtacattcacaaggaccgggaatattacaaagtacattatcacaagggtgggggaatgtcacgatggcttgaccatggtgcggccagctcagaggaccttacatttagtacatccaatccagcagtattgacaaaaggaatgaaaatagatgatagggttgggcgcggtggctcacggctgtaatcccagcactttgggaggctgaggtgggcggatcaccaggtcaggagattgagaccatcctggccaacacggtgaaaccccgtctctactaaaaatacagaacattagctgggcgtggtggtgggcgcctgtaatcccatctactcgggaggctgaggcaggagaatcacttgaactcgggaggcgggggttgcggtgagccatcatgccgctgcactctagcctggcaacagagtgagacctcatctcaagaaaaaaaaaaggaaaaataaatgagatgaggacattacagggaaataaaatatatttatggatatataaagcagtggcttgtccctgtagtcccaactactggaggctgaggcaggaggattgcctgagcctgggaggttgaggctgcagtgagctatgatggcaacactgcactccagcctgggccacagagggagacaccttctcttaaaaatattttttggccaggccaggcgcggtggctcacacctgtaatcccagcactttgggaggctaaggcgggcggatcacctgaggtcaggagttcgagaccagcctgaccaacatggtgaaaccccatctgtactaaaaatataaaaattagccaggtgtggtggctcatgcctgtaatggctcatacctgtaatcccacctactcaggaggtggaggcatgagaattgcttgaacccaggaggcagaggttgcagtgagctgagatctcaccactgcactccaccctgggagacagagtgag

SEQ ID NO: 917103 - DNA, 4001 bp, Homo sapiens
tgacccagaagaacaaacctgtttatttgtcaggcaccagtcagatctcattagaaaaatatattcagtttgaaagaagcgtatggtgaagccagtgtgtgttcatcagaaaacatcaaagtcaagaaagggattggaaatacagccactgggaaagttaaaaatgtcggatgtagttttctctgtctggagaagaaggctgatgaatgatgctactaatgaataaaaacagaggtcccttctatctctatataggtcaaacagaaaaaaatgggtcttgattgcaagagaagagatttaggttatttttttttaattcttaataatcctgcagtgtacaataccagatagtgggctcttctttttctttagacaacttaagagcaggatgggtcacacttctgttgtgatagggctttatggcagagaaataatctgagactcagaatctctttctgtttggcaacatattttgggtattcttattcaatatccaaacagtcagagtcagtgaaaggcttccaagagcagtcagaaacttggtaactatcctggcttacttacatcctttcaataacacttgcaagaaccttgaaggccagggtaggtaatcacagatgtcaagtcgtctattttcttgcctatttgtctttgacaaaagaggtaggtgggaaccctaagcccaatgcacaggaaaaacaaattccctttttatctcagaagtccaaagatggctcagggcctcatgggagcaccctggactgattcccagcctaggaggtttccttttcagagacttttcatgagaaaggaaaattcttgctaaagcaataaagggaaacttccattttagctctcttctctgaattccagctctgtatccacttttaacacacagggcactaattctccctcttcgtcccatctttctggttctctagctcctgtgcaaatcctccctgaaggctttacctctagctacatatctggacacttgtctcaaaccctttctccatctcccccaggtagcagagtctcttaatgggaagcctctttgtgcagagcccattgggccagctgtaagtttttctataccactgacagaaatccgtggaagtgctagcaaaaatctcagcaaaggatgggatgggtacctgtcctcagcttgcatttcctaagatattcacgcagagccagcacctgggcggttaaggtggtagccctaacctcgtttctcctggttccaggatgatcccatgcccactgcagtgtgggttctagggctttcatttcccccttttcttcacacatatgggtagcaagggacctgcaaaaggaagtttctgcagccagtgctgatgaacagaaaaggggccatgttataaaaatgagtagcccaagggcacacggacgagttggctccgtccatcagagaaccctggcccctgccacgggtagggcatgggcgggacgggagcctgctcaggggtaaggttgcttcttcccttcttcttgtcacagtgcccctggaaagggtcagatttcagagaatccgagcaaggcagaactggagcaggggaagtgaggtcagaaaacaggtttcccatgagctggggcatgagcaagtgaagagaaagggagccacggggtaacctgtgcgcgagtgacagcggcgggagcccgcagggcctgacagttgcgatgggcacggggagacagggcgagaggcgggcacagaatgtcagcggggcagacccccgggaaaggcagcaacccggaagacgcgccgatcctcctcccagcccctatgggtgaccgagcccccaccagccgccccgggaagccaggcgtccctccctccagccgcagctccctccggcccggctccactcacccccggtaggcttggcccgcggcccggtgcctccctcccgggcgccgcctgcccctcccctccgccctccgcttgcgtctgggagccggcggccggcggagccagcgacaggcggagacggcggcccggcaggcgcgggcggggcggggcgggcacaggaaatccccgcccgcttccggggctctgcggcggcggaggtgcggggagtgggagggagaggagtgggagggagaggagtgggagggagggagggagggagggacgggagggggcggggctgcggctcaggcgcccccaaacgcgaacccgggacctccgcgcccgccgctgtggggagggtgcggcccgagacgcttggagggcggcgggcgccggaatcgcagcctgctgtggccacttgcccgcactcttgcctgactgaccattttccgctctggctactgggcctcccacggagttctgtcctcagggttcgtcaattacctggaattgcgtaaccgcccgttacaggccagaccgaggccgagagcgatttctccagacaacagtctggaattcctcaaggagcgtaccctctagttttcacgataggataaagggcttgagagagcactgaggaggagtcacttattctgcctgaggggaagtcaggttgctatctgaagttggccttgcggctgctgtcccatttgcgggagccgtagccgcaggtgacacctgagctctcgaaatgtggctggtctgaatagagatgtgttccaagatttagaagatttaatttaaaaagtgatattttgggtatattgggttaaatatattaaaattaatttcacctggttttaactttttaaatgtggctataaatatggcttgcattatatttctattggatagtgctaccttgcagcattaagatggatttgactagaaaagatgagaagggcctacaaacagtgagtaaacccattgctgttagaatctgtttataacctacaagtcacattcacattccttatttcatcattacaacaattttcaaaaattttatttagtagacttaaaaaataattgactcacttaaggtcatatgtgacaatcattcgtttaatgcatatttattttctacgtgtgccagacactgtaactaaatgctgggagttaaaggattcacagtctggggaagcacatgtcaacaaatatttgcaataaaaacgtagattctaaaacagaggaacgtacgctgcacttgaagcaaagagaagtgaccacgtatgggacggaggtcagagaaggccccccactctgacagaaatcgtgaggcagagaagagtcaggagggctgtctaatgaaagaggaaaatgcagtagacacgcagttgggaagagtatagagcatattctaggagcagatcatgggatatgtcggggtagtagtagagccagaatttttatcccgggtcctggaactaagtccaggggttcttttcacttatgctaccactggtggtaaatataaggtgcgttaattggagtaggctagcaaaaccagtatctcggggcttaactccataaaggcttatgttcatacaagtcacagtgtggtaacaagttggttggggccagagggtggggtctgtacttcttgaattcattgaaggaccaggcttcttgcatttggtggttctcccatgccgaggccttggtaatgtagtcaaatctgtggccctcagataagggaggctggccgtggttaacttgtcagagatattaggggccagtcctggaagtggtgtgtatcattttcaccccattcccttagccagaactcatgcgcatggtcacatggccctacccagaagggtggctgggaagtaaagaatgtgtgcctcatggaaaaggaaatgggcgctgctggacacagcattgcctcgtcacacagagttaaattgaacataaccaagtacgtaaacctgactttacctgaaaagaatgtttggaaagaactgatagatattataatagcccaaactctcctcgactgttttgggaaacaaatcagtgtgagattgtttccaaaaaataaaaaaagccaggtgcagtgtctcat

SEQ ID NO: 917104 - DNA, 4001 bp, Homo sapiens
ctcttctttttctttagacaacttaagagcaggatgggtcacacttctgttgtgatagggctttatggcagagaaataatctgagactcagaatctctttctgtttggcaacatattttgggtattcttattcaatatccaaacagtcagagtcagtgaaaggcttccaagagcagtcagaaacttggtaactatcctggcttacttacatcctttcaataacacttgcaagaaccttgaaggccagggtaggtaatcacagatgtcaagtcgtctattttcttgcctatttgtctttgacaaaagaggtaggtgggaaccctaagcccaatgcacaggaaaaacaaattccctttttatctcagaagtccaaagatggctcagggcctcatgggagcaccctggactgattcccagcctaggaggtttccttttcagagacttttcatgagaaaggaaaattcttgctaaagcaataaagggaaacttccattttagctctcttctctgaattccagctctgtatccacttttaacacacagggcactaattctccctcttcgtcccatctttctggttctctagctcctgtgcaaatcctccctgaaggctttacctctagctacatatctggacacttgtctcaaaccctttctccatctcccccaggtagcagagtctcttaatgggaagcctctttgtgcagagcccattgggccagctgtaagtttttctataccactgacagaaatccgtggaagtgctagcaaaaatctcagcaaaggatgggatgggtacctgtcctcagcttgcatttcctaagatattcacgcagagccagcacctgggcggttaaggtggtagccctaacctcgtttctcctggttccaggatgatcccatgcccactgcagtgtgggttctagggctttcatttcccccttttcttcacacatatgggtagcaagggacctgcaaaaggaagtttctgcagccagtgctgatgaacagaaaaggggccatgttataaaaatgagtagcccaagggcacacggacgagttggctccgtccatcagagaaccctggcccctgccacgggtagggcatgggcgggacgggagcctgctcaggggtaaggttgcttcttcccttcttcttgtcacagtgcccctggaaagggtcagatttcagagaatccgagcaaggcagaactggagcaggggaagtgaggtcagaaaacaggtttcccatgagctggggcatgagcaagtgaagagaaagggagccacggggtaacctgtgcgcgagtgacagcggcgggagcccgcagggcctgacagttgcgatgggcacggggagacagggcgagaggcgggcacagaatgtcagcggggcagacccccgggaaaggcagcaacccggaagacgcgccgatcctcctcccagcccctatgggtgaccgagcccccaccagccgccccgggaagccaggcgtccctccctccagccgcagctccctccggcccggctccactcacccccggtaggcttggcccgcggcccggtgcctccctcccgggcgccgcctgcccctcccctccgccctccgcttgcgtctgggagccggcggccggcggagccagcgacaggcggagacggcggcccggcaggcgcgggcggggcggggcgggcacaggaaatccccgcccgcttccggggctctgcggcggcggaggtgcggggagtgggagggagaggagtgggagggagaggagtgggagggagggagggagggagggacgggagggggcggggctgcggctcaggcgcccccaaacgcgaacccgggacctccgcgcccgccgctgtggggagggtgcggcccgagacgcttggagggcggcgggcgccggaatcgcagcctgctgtggccacttgcccgcactcttgcctgactgaccattttccgctctggctactgggcctcccacggagttctgtcctcagggttcgtcaattacctggaattgcgtaaccgcccgttacaggccagaccgaggccgagagcgatttctccagacaacagtctggaattcctcaaggagcgtaccctctagttttcacgataggataaagggcttgagagagcactgaggaggagtcacttattctgcctgaggggaagtcaggttgctatctgaagttggccttgcggctgctgtcccatttgcgggagccgtagccgcaggtgacacctgagctctcgaaatgtggctggtctgaatagagatgtgttccaagatttagaagatttaatttaaaaagtgatattttgggtatattgggttaaatatattaaaattaatttcacctggttttaactttttaaatgtggctataaatatggcttgcattatatttctattggatagtgctaccttgcagcattaagatggatttgactagaaaagatgagaagggcctacaaacagtgagtaaacccattgctgttagaatctgtttataacctacaagtcacattcacattccttatttcatcattacaacaattttcaaaaattttatttagtagacttaaaaaataattgactcacttaaggtcatatgtgacaatcattcgtttaatgcatatttattttctacgtgtgccagacactgtaactaaatgctgggagttaaaggattcacagtctggggaagcacatgtcaacaaatatttgcaataaaaacgtagattctaaaacagaggaacgtacgctgcacttgaagcaaagagaagtgaccacgtatgggacggaggtcagagaaggccccccactctgacagaaatcgtgaggcagagaagagtcaggagggctgtctaatgaaagaggaaaatgcagtagacacgcagttgggaagagtatagagcatattctaggagcagatcatgggatatgtcggggtagtagtagagccagaatttttatcccgggtcctggaactaagtccaggggttcttttcacttatgctaccactggtggtaaatataaggtgcgttaattggagtaggctagcaaaaccagtatctcggggcttaactccataaaggcttatgttcatacaagtcacagtgtggtaacaagttggttggggccagagggtggggtctgtacttcttgaattcattgaaggaccaggcttcttgcatttggtggttctcccatgccgaggccttggtaatgtagtcaaatctgtggccctcagataagggaggctggccgtggttaacttgtcagagatattaggggccagtcctggaagtggtgtgtatcattttcaccccattcccttagccagaactcatgcgcatggtcacatggccctacccagaagggtggctgggaagtaaagaatgtgtgcctcatggaaaaggaaatgggcgctgctggacacagcattgcctcgtcacacagagttaaattgaacataaccaagtacgtaaacctgactttacctgaaaagaatgtttggaaagaactgatagatattataatagcccaaactctcctcgactgttttgggaaacaaatcagtgtgagattgtttccaaaaaataaaaaaagccaggtgcagtgtctcatgcctgtaatcccagcactttgggaggtagaggcgggcggatcacaaggtcaggagttcaaaaccagcctggccaacatagtgaaaccctgtctctagctgggcatggtggtgcgtgcctgtagtcccagctacttgggaggctgaggcaggagaatcgcttgaaaccaggaggtggaagttgcagtgagcagagatcgtgccactaatactccagcttgggcaacagaatgagacttcgtctcaaaaaaaaaaaaaaaaaaagaggctgaatggtatcatcttctttataccagaaccttttctttttaaaaataacttttataattttaaatttgtgtagttacataataggtg

SEQ ID NO: 917105 - DNA, 4001 bp, Homo sapiens
atcacaaaggctaataaaaccaacctttatatatactactttacattccacaacacatacgcactgtatcactgaactctatggagcagacagagcaggccatttacagaaaagaaaaccgaggtttggtgtgattcaatgtcctccccaaggtcacacaacttctaactgctagagtcagaactaccataggggaggggtggctgcttccacatatcaatttcttaaccaaaagagaacttcatcataaatgccgaatctcgataattagcgtagatctgtgctcctatcaccgaaatttcatctcatcagagaaccaccaccagcaaaaaagctgttttaaagttaaaacttaaactgctatcaatttgggaaatggctaaaccatgatatactgaaactatggaacatggtgcagcagttgttaaaaaatgacttgaagcattacatgctaacattgaaagttacggtgcaacagtccttgttaaagcagtcaaaaatgatgttaagtgcacacacgtaaaagtactccaaaagatctagaaggataaacaccacacacataatagtcggcatccctgaagacagaggttgatagtcaaagacaaaatgccatctctgtgatatgctgtttttacaaagaaaatgtactactctgctaatttagaattaatttttaaatttttaattaacctgcgggttgaacaaggtcaatttcctgctctaaaaaactatgcgtctatgaaggaaataggagccctctctaaataagaagccaaaatgcctaaaaaccgttccagcctgtgaaaacaataaactgtaaatatcagaaaacgttccttgaagaaggcaatagctcagaaatcttttttcggtatctggtctcctttgttgcaataagacagcccgtaagcaatctagcaaccagaacagttcagttcggagcaggctcccggggagatttagttgttagagttcggcaagaaaggtttcacaaaggagctgagttctgggggaaatgagaggtgatgtggcggagagatggatccggacgggaaaatgtctgggagggggtatacggagttcatgagaagccggggacagtgagaaaactgcagtcgagtcctggaaggggtgagaacgcctgcggaggcgggagtcagagggaagtggacagcgccggcagccggtttacctgggtgagaatccggcccttgttgtggtcaaacaatggaggcgtccggcggcagcagccttctgcgctgggtgcgcgaggggttcctcatcacctgagcgggatgctcgcctcctctgccggacgcagggcgccctgaaaaacacacagcaccccatgcagccggctcctccgcagccgcccggctccccggtcccctggcgcggccatgaccgcctctcccgggacccgcctggaagggctccaagacgcggctccacgggcgacgagggcggcagcgctcccccttccctcggctccaacaacaatggagcctggctcgggagtccggctcccgaggggcctcgcccggcctcgccctgcccgctgcccagccctcgctcgcaccggccgccatctgcgccccccggccccgctcccccgcactgcgggcccgcggccgaccgcccgaggcccgaggggcggcttctcagcccgggacccgccaggctgcgcggagccgctctgaccttccccgccatcccgaggcccatcctccgggatgggttgtttttcttttctttaagccactccacctccttcccacccccagcccgctccctggcccccggcccccgcctccctccgggaaagaaagaaagactgcagcccggccgccgagaactcactccaagtgaggggagtcagcgccccaggccgcgggcgccgcgcacccacctccctctcctcagggacacctcacaggtgcgcctccgagccgcgcgcgcgcgcgctccgcacacccagacgcctccgggggacagcgcgcgtgcgcacgcacgaggccggggaagccccgggggagcgggggccgcacgcatgcgcggccacccggcccgcgcccccaccgcccgcctccgcccccgccccccagccccggcccggtcgggcccggccatcccccaccccagcgcccggcgcgcgcgctcccgctcgcctccctcgctcctccccgcgcccccccctccctcgggccgcgttacccagggcaaccgcagtgcggccgcacctgagctgtgcgcctgcgtcccgcgggcccgaccctcccttcccctcggccttcgcccctgccccgccacagccgggcggaagggggcgtagccccgcctcgccaagtgaatatcggcccgccgcccccgcccagcccggcagacacaggcccgccgccgcgccggcgcctagcccgccgggtcagcgcggccaggcctcgccgccggccccgctcccagggtgcaccgcggctagcgctggggtgggagcgggcgagatgcgccgggcgggcggtgcccactgacctccctcggcggcccggcccgggcagcgcccgagcccaggcagccccgcccgccgcgccccgcccagcccatgggccacgggcccccaccgccgcccgccgggaggaccgagcctaagagggcagccgcctgaaggaacgcgacggcggcgcccgcaggtgaggcggggcccggggtgtgtcgagtccggccccgctcacctggcagcgccggcgggggcggaggggccgggcaggggcggaggggccgggcagggacgggagttcgtggcgaagactttaaaaaccctccccgccgggagacgggggacggggtcctcctgccccacctccggggcttgggagccacgttagctcccccaggggcaggggtggccccgggcgaaggcaactcgggagacggcggagtcggggaaagagggtccctgaggctcggcgacccccgcgcccgcccccgcggggtctgccggccctttctggggagggggctccccggcccgggctccagtccagggtgcggaccggccgcggcgcgcgcccaccccagtgccaagggggaggagaggccggtcccggggcgctcctgtctgccccggggtgggatcgcagggcgagggatccgcattgcaggtgcaccaggagcgccccggggcctagcccggctttgtctgggatgctgtggggaggaggccgtctgaatccacatcgcctttttaaatgcttgttaccacccggggaaccttagagaccctccctgacaagttgtatcgcctcccgtcctggtagcctttccgtaagtacactaccttgccagccccttcctgaagctttgatgcggctttagtttactctgagtaacgatttgcctgtgattcgtgaaacggagcagaatgcacaaacgcagcagagctccaggcttggctactgggctgccgtctgctacggcgagtgagtttctctaacttaggttttcatgctgacctgtattgtttcatttcaagttttggtatttagcagtacgatctagtccactaaggaaaattaggctgccagagagaaaatataaccgcgctctgtagcttaggttgcagtagtcggttttataacaaaatgcaagctaccacgctgtaatactttaacatattacgcagttccagaaacctgtaagagtattaaaactaggattgccattttaaaacttttacgtttgaaatttatttaaagagcattggtattgataaaacgacttttctttttttttttttttgctcatcaagaattcccatgcattttctcgctattgcattgtaaggaaaaagatgctaacgtttaaagtggcttttacctccaaagatgttttgaaatgtatgtaattcttttggctaactgttcatcttatgtgaaatatgcttggaagaaggctttaaaactcgtgattatatatacgggtatgcgtacatatccatacacacc

SEQ ID NO: 917106 - DNA, 4001 bp, Homo sapiens; identical to SEQ ID NO: 917105

SEQ ID NO: 917107 - DNA, 4001 bp, Homo sapiens
agagaagagattagagtgagatatggggaagctgttctaacacttattgaatgaatgagcgaatgtgtgtctacatatgtacgtgaatgttgagggactcaccgagggacaccaggtgactgatattttccagcatcacatctctgtacagctttctcttggatgtgtccatcatggcccactcttcctgggtgaagtcaatagctacatcttcaaaagtcactttcttctaaaacatcacagacattttagtttagacagagaaatccctttcaatgtccggaagaggaaggctgagatgacatagctaggagctgggtatgcagaatactcagtgttttgggttccagccagttcattctcagtactaagctggtatctgcctttcagattcactcacagagatatacccactctgaatccattaaactttactataaagaaatatcgcgtgaggtgtggcataatataacccagatatttttcagtaatgtgttaatcacctctacataactgattataaaattttcacttgaacattcataaataaaatgaaatttaccatgaatttcaagtaaattacggatttgtcacaaggcaaataaccatgatttactactttttaaacatgactgtgatgaaataaactatttctctaatgaaccacaggtttctcaccaatcaaatggttaagagacctatgatgtgttttgaataatctaatggactaatagaaaacgtgtttcctatctagcaaatatttattaaatataagtcattgatcccttattcattaaaaagttagaaagtaatgaaccagactccagcattcttcagaactgaaaaagctttatgcagaatataggattcaattcatacatatagtctctttaacgttatataattcaggtgttcatgacaaggcttaaagacagtctagcagcacaagacaagaccgctgaggctgctatactgaggaaatcttagtccgatgattcctgtgatatgaagcctcctgttctcaactttctctcggcaatccaaacatcagttatcattgtttctcttttaaatttaccttctcacttcacttgttcaaagatttaaaaagcctcttcattgttttttttctaaccagcccgtataaagcatttccacagaaccctaaattgtactctatctactatattccttcttctgagtgtgcaaccgtaattaaataattatatttcttatatgttactttcacttaccagaaggcaaaaaggttaattaccaaaaggtaaaatgaatggggataagaataataatgacttctttagttgtcctttcacaaagtttttagaagctcaaatatattttatcaaactcttcttttccctcaacactgcacagcaagtcctatcacactggatttattgaactcagctgctagaacatcagactcattgttgggctgtgatgttctgctcttcgctcatctctatcgcttgcattcatcacaatcctaagtctatttcagccaacagtacagttaatgggtcaattatttccctatgagattataggatggatagaagaaaaagaaatatataaatgaaacctctcatatctttttttgtaaatagccttaataggggctggaataaaatagtgtaatattagaaattatattgataatttaggagtctttgacacacgataccccacctagagtcctgagaaaacttaattggaggccagatacctgaaagcctcctgattgcatttggaatacccaggctaggtggattttacatcataaaaacaaacaaacagaaaagaataaaaatgaaacacccatgcaaattggagaaaaatgcccacttgccagcaatatgggtataatttcagtagaaagaagcatcccctactcactagtgaatgcattgtccggaactcagtttctctctgtctacctctggatttccatgtgcagacactttaggcactaagaaaagctgaggttggagaaagaacatgtgagacagcagtcttgtgcacaattttcagatcaaccgatgaaaagccagactttcactgaagtgtgacaccagctgcaccacagcctaaccaacagacacaaacacgcagaggcctctcctcttttcccgtggtcaaaattaggaagcctatgactatggttgctaataaagaaggaacacagatatcttgtgaatgagaacatcaaaagcacggagttttgtatgttaattggcacaagtccagatattcaattccctcactgattttaaaacacagggatccctgactccatccacatgtggaatatgatttccacctatagataaacactgggatttctcagattttattatcctagctttatgccctagcaatgtttctccaacacccaccacagccttctgaagctttactccacttttattttcactcaactctgacttttgtatttccccttggaacctggaaataatcaagtaagaatctgttttagggtcgagtgtggcggctcatgcctgtaatcccagcactctgggaggccaaggcaggtggatcacctgaggtcaagggttcaagactagcctggccaacatggtgaaaccccgtctttactgaaaatacaaaaattaactgggtatggtggtgcttgcctgtaatcccagctactcaggaggctgaagcaggagaatctcttgaacccgggaggcagagattacagtgagccgagatcccaccactgcactccagcgagggtgacagagcgagactctgtctcaaaaaaaaaatctgttttaggatgggggtaatcaatccagggatttatttcacttagagggtcaacactcccatcctgctaatctagcccttaaaatctcctgcatcagaaattagcaggagtaccctgagtcatggtgtttctgtcctgtgcatacagtcacaatcctctaggatgctcagaaaacacaaaatgacgtaggggtgggagaaatttagcagctcaatctgatattttactaacgtggtatctaaaattcttgcaatcgtggtttatattagtctttgttagttgcaatatctctgattatcatgatacatatttgctgagaaataccgatgtccatgtatatattcgtacatagatatgtaggtatataggtgcatatgtttatatgaatgtatgtgtttgagacagggggaaacatgcatgtattatttccctgctaaaaatataaaaataattaaatacattttatgtacaagtgataattatgtgtcataaacaaaaaatttactgacccatttgtacatgaagtccaggaaaaataaaaagggtaactttgtattaattgtgacattgtgcttacagatgtacatatatttccttatttaaccctcataataaccctgctgattataatttatttaccaatttaataaatgatcaacagagtttgaaaaatatgacaaaattacaaaattagaaaatgacccagcaatacttttaattatattctgcctgtcactgcctcttcttgctttttgacaaaattactcccctaaccaaggttctctatgattctggggactccagaatttagaccccaattcccaaacatcattgtgtctatttttactgccacatttaatgcacatttacagacttcaacaagcacttttcaatatcaacttttttcttattccttggactattttctacatctgttcatcaggactccagtaacatatgactccatctgccttccatgaatgtacctgacagtacatgtattatgtagtctataattcaagcagaacagctattccttcaaaaaaataagatattagagaaggcctacaaagcttcggtgaaaccagctgtaacccttaatattattaccatgtaagctcttcctcgaatatcaaaataagatttgggctttagagaatatttgtgtgtaattataacccaaacatga

SEQ ID NO: 917108 - DNA, 4001 bp, Homo sapiens
ctatccccatttaaatcccttactccgtaactatcaaacaacctgcagtactcggaacctcatcacattttcccatgactctaagctcctgcccatgctgttccttttgtccaaacacccttctcgcttgtttagcaaaatcctatgcatctttcaacctccatcttctttttctatccaagcagaagtactgttctctcctatgtacatacccctattattgcacattcctcaatcaacagattcagagtctctactactagccagccactatacaaggcattgtgaatataaaaataaatggctttccatccctctcccgaccccaactagcctggaagctcactggggacaaggacaatcgtattcatctttgtattcccagcacaatgccttgcatgcaacaggaactcaataaattcctgttggaaaaaaacaaaagaagcattcaccgtactattcactcccttacacccctcagcacttaatgtaccaaatgtaaactgagtacacgttgctttgcaaatgtcccatcagtgcctgtgatgcagtatagcctacctccttcatttgactggaagctccctgaaggcaggggctgtggcctgtctcctttccttcctctagatctccccctggtgcttaatacagagcttggatcactggggttggtcaatatgttgactaaggcagcattcaagagtgaaactgcaaacaggcttcccagttatcttggaggaggactctagagctttttacctgagccatgctgatttctcacttaaggcaacccaaaagttcaggagttcctaggtccacctttccttgagacactgtcgttttgaagaactgtcaccaaatcacggtagcgactccttcgtgtcccatcagtcctgttgccatattgaactttgtcttcaaatagaacttagtgtcctccgaagaaaagataggtgttccaagaatccctggactctgcctggctcctgcctattgtctgaagaaaaagagagtctaccagtcttggttttccagttgaattctcttgatgaagctcacgatctgtttcagaaacctgaaaccagaaaggaagaggggggctgctaaatgcaacatcttcaggccattacaacgtgcgatatgaattttttttttgctgggcgctctctgtgaagctcagaacgaggacatgagtcaagaagagttttctttctaggtcaataggaggaactggtctcctgggcaaggagtggaagccaacaggagcaaaagtaattggggcctcctatggaggaactctgccaaaaggaaagttgcttggatttgccatctcaggaatggaagaagggggcggagaccctttggggcttttgtgcccagtgggccggcccgaaaagctcgcactttacagaggcggcaagactagggtggaggaaagctcaagggccatcgctgggtgcttcggtggcgggcagaaacgggactggcagtgcccacacgtgtgcgttctccccgtccgcccgaaggtagggaaacttgctgcggaggtggaggacaggcaggcgaagcccggcgcggcgtgtcgcccgcctcgctccggccagccagcctctgcacccgctgcaccaaccgggagcagagccggagagtgccgagaagcgcgcgagatgcgtgctcgcgcccgcgtcccctccgagagccctctcccgggccggggacgcggcgggacgcgcgggcagggggcggtgtgcgcgcacggcctttcccctccctcccccggagatccccctcccttcgccacgcgcccctcctcccctcccctcccccttcccgcgcggcaccccacggcttgcgagctactgaagcgctgccgtctgtacggacgacgctgcggtctttggggcttgctcctacctgccaggcgcggcctcccgctggctccctggccgcgcggcgcctcctccaggccccagcacaccctgccaaccccaccgccgcggctgcccccaccgggaccgaggcaagtttacaaacaccaaccccggcccgtttccccggaagcacttccccctccccctcgtcctctccgccgagcggctgcatccacttccgggctcggcagctagactagcgggggcagcctcagagcgggtgagcttggggacgcacggagaggtgcagctgggtgagtgggcggcgccgtgcgccgagggcatggaggagggagcgctgaggccggcgcgtgcgccgtggccggggcgcgccccggccgccatcgagactgagggcaggaccctcggcccttcgatgattgtacgctgggtgctcgatgggaggagggtttgctgggtgagctggttcagactccttgaaaaatcatcgtcactctttcttcctcgcggacgtcctgcccatcgctctgagccggcgccccaagtagagccagagtagttcgtacccagccttttcacgtaactcggccgaggtggttcttctccgaattttttccgtcaggcccagattagcagattttggggtcagctgggagaggcgttaacttttcttcgcacactcttgctttgtgcgctcaaccacagtctgaattctcgcagaggcgttccttgagtagcccttggccacactgctcacctccctgcagaagtcaaagccccagccctcctctgcgaatcccgaggccagcctggttggttaccttctccccttcgccctttactccaggccgtccagcatcaaacactagcctccacacgtggaaaagaccctgactcccacagtagactagtcttatgggagtcctggctcttgggccaggctgcattaggaaaatggaaaccagactgtcttcaaattcttctgcctagccttagccattagagagaggtcctgctaaagatggactgcaaatgcgcttgatggaaggagatgtcaattccactgaagtcctcatttctgctgtaggtgatattatgtcgtgactttaggagaagtaatggtgataccaaaagaaaaaaaaaactgtatgatgaaaaaaagacaaggattctcaacttttttttttttgtagacagatttcatttccctgagccactccatgatttgggccattgaaagtacgttttttgtgttttaggatcattctaaaatagagacaaaatggagaaagagagagataaagaaacatcaccaggaataagtcttttaaatcttttttgaaaattagctcctacttattttacaaatcgacacaacgcaaaagtataaaagacacaaaatggttattctccccctctacttatcccatgctcctgaagggaatcattcttaccagtttggtatatatgcttttaggcttttttctgtgttcatacaaaaatcttttcaaccagtatttattgagcacctgtaatgcgccatacagtgtattttagacatctgagtcagctaacatttaaaaaactgttgcacagtattccagtttatgtgtgtgccttgtcccatcttgatgaacatttaggtttcagatttttttgctttataaacaatacaataatgaacatccttaaatagttatctttttgctccgggcagggtggctcacacctgtaatcccagcacgttgggaagccgaggtgggcggatcatctgaggtcgggagttccagaccagcctgaccaacatggagaaaccgcgtctcttctaaaaatacaaaattagccgggcgtggtggcacatgcctgtaatcccagctactcgagaggctgagtcaggagaatcacttgaacccgggaggcgggagttgtggtgaggcgagagtcgtgcctttcctgggcaataagagtgaaactctgtctcaaaaaagaaaaaaaagttaccttttgcatttataaggatttatagataggatatgtgcttttatttaaatttatttttatttttatttttttttgagatggagtctcactctgtcacccaggctagag

SEQ ID NO: 917109 - DNA, 4001 bp, Homo sapiens
gtatcacactaacaagcagcactttctttttcatgcctttttgtggttcaaacttcagtgccaactcagaaacacacagcagtttctcccagttatacaagaaatgactcctttataccttaaattgtgataatacataaatcttagaacaaaagctggcacacagtcatacgaaacatatactagctataattattattataaaagtaatatatgatggcaaaatataaaaaacatacacaagctaaataagaactattatctatgatctcaccacaggtaaccattcttaggatgatggaaactattgtgatatttttcatacaatggaagcatatggtcatatttaaaagctgtttttgtttttttcccattatgtgaagaacatctttccaggtcaataaccttatttctgtaagatataaacaactcacataaaataacaaaaaaataaaatccgactcataattgacaaaatacataaaatatgtaggaatatcaagacccatatgaagcatactaaaaacaccaatgagaactataaaaatagaattaaagaaatttataattcgattttattctgggataggaagacttcagattgtgaagataatttgacctcaaatgatttatataactcatcgactccaatcagaatctcaaaattctaaagtttatgtgtaagaaaaaaggttcaagaacaattcggacactttttttttttttttgacagggtcttactgtgttgtccaggctgaagtgcaatggcataaccatagctcactgcagccctgaactcctgggctcaagtgatcctcctacctcaacctacagagtagctggggctacaggcatgccctaccacaccgggcctggatgcttttggaaatacaaaataatgagtgtgaacaggcccactgtaatacatacaaattataatcattataacatttgacactggctccagagaagttatacagatgaaaaaaagcaaactgtctaaatatgcaagagtcagcatgcaataaatgtagcatttcaaagccatcagtaaaattaaattatttaatgaatacaagaatatttgaaagaaaataaacgtagctatttcatacaactactttcagtgggttaaattttaaaataatggaaaccctaagaatgtctacaaaaaaaaaccacaggtgaatgaatatatgtataatttgaggggagatttcgctacaccataccaaaagcaaaagtcacttaaaaaatttaaaacagtcaataaatataaccattaaaaaatacacggccaggaatggtggctcacacctgtaaccccagcgctttaaaagcctccttcgatagcggcagagccaggctgctggtggatgcggtccagcagggcagccgctccttagggccacggcgcggcaagcgggctggcccgaggtcgaggctaaacgcgcccgaggctaaacgcgcccgaggctggcgcctccacgcccgcctgaaaggacgcccaggagcggcgcctccggaaaggccgtgcccgccccacagcccagaatccgcgcagctccgcggcccacggcatcttcacgacccggcccagccccaacccgccccagacccgcatccgcgcgcggacgcccagggccttgaagccgaagctccccgcggccactcccgcgcgcctcccccgccattcccggagcccccagcgccgggcccgcaataaactcactgaactcacaaaagacgccgccgccgagtcgcgcccgcgcgcccgcggcctcgcgatcacgtgacaccgcccgtcccccgtgtcccgcgcacgcgcccaaaccgtcggcctttgtgcgctcccgggcggctccgaacgggccgggacgagtcggggactgcacacgcgcacactcgcacgcgcgcacacgcgtacactcccctctcacgtggcagcgaaggacaaagaggaagaacgggccacctgcaagcattaccaagagtgcatgtgcgcatgcgcgaaggaaggagccccgcgaactcaacttcccacagtgccccgcgtccggaagtgcctgtcgcttggagacggagtgactccaaacgggctcacacggttttctgagaaacataaagggaaaccgaatccaccaatatatatatatattttcttgagacggcgtctcgctctgtcacccaggctggagtgcagtggcgtgatctcggctcactgcaaactccgcctcccgggttgacgccattcttctgcctcagcctcccgagtagctgggactacaggcgcccgccgccacgcccggctaatttttttgtattttagtagagacggggagtcaccgtgttgcccaggctggtcgcgaactcctgagctcaggcaatccgcccgccttggcctcccaaagtgctaggattacaggcgtgagccaccgcgcccggcccaccaatactcaattggtttgacttcagttgaggaaaccagaaaaaatttaaatatatttatggaaagaaggtaagaattaacagaaaaaagtaaagttgatccataactggagtcgtagggagaattataggtaagtcacgatgcttatgacagcaagatggggccggggagatggaggagagagatgaaaaaagagaaataaccatagacacataggaaattgaatgaaaatccgctctatactaataaatttgataatttgtgacacaaatgattctccaggacaacatgggccaaatttgacccaattttatccacaatttgaagacaaattcagagatcctttgccagaaagcatcataatgagttgcttagtgaattgcttcaaacatccagtgattagagaattcttatatttattcccagaggtagaactcaccagtgaagtactagcataaaaacagacgcatggaccaatgtggaacagcgtagaaaaaccagaaataaccccatgcatatacagtcaactaatcttaggcaagtcaactaatcttgtgtcaagaatacacgatggggaaaggacagtcgcttcaataaatagcgtgaggaaaccggatatccaaatactgctacgcaaaagacctcattgcccgatgtgcacagaagccaatactatggcaccaggcgtttgagaaaagaaaagcttaattgcgagttgaccaacaaagtgacaggagtttagttcaaatctatctctctgtgctgcccttaaggcagcactattgtgaaaaaaggtttagagggtggattctgggattcacaggtgaatggtgaaggaaaaaggaagtctggaaagtccccgaccatgtgcagttgtctcttcaagcctcttcttgggtcccatgtgcaaattaaggtagagttagtgtgaaaagtgcagtggaaattcaggctgcgacatcagcaagctcattctgcatggactccgtttggttatattggtttcaactgatttcagccagttgtattatattacaaacggagtttcagcaaactgtttcttatctgccatcctgtaagctcaagaatttctgttagccggacgcggtggctcacgcctataatcctagcactttgggaggccgaggcgggcagatcacctgaggtcaggagttcgagaccagcctggccaacatggtgaaaccctgtctctactaaaaatacaaaaattagctgggcgtggtggtgcacacctgtaatcccagctcctcgggaggctgaggcaggagaatcgcttgaacctgggaggtggagattgcagcgagccgacatcgcgccactgcactccagcctgggcgacaagagcgagactccatctcaaaaaaaaaaaattcgttagtcactggtttctttaactatttgggggcatggtttcacaacttcttcttcttctttttttttttttttgagacaatccctcaccagaatctaggccttttctaacctgctcctccagactcttccaaactctgcccattacccagttccaaag

SEQ ID NO: 917110 - DNA, 4001 bp, Homo sapiens
catgcacaaccctataaggcgtttaacataatctccattttacagagagaaaactgggacaatgagtgattgtaaaatgtgcctgtgattgcacatttagtaagtagcaaaattcaaatgttaattctctatcctgctatgttcaaagcatgaatactaaagtcatattgtcatttgtgcatatctacatgcacaaacacacacaacataaatcctggagtcagctcctattcccatgcacacattcagtcactaattcccacaaaaatataaatgaaggacgccctgcctcaactgtatcacactaacaagcagcactttctttttcatgcctttttgtggttcaaacttcagtgccaactcagaaacacacagcagtttctcccagttatacaagaaatgactcctttataccttaaattgtgataatacataaatcttagaacaaaagctggcacacagtcatacgaaacatatactagctataattattattataaaagtaatatatgatggcaaaatataaaaaacatacacaagctaaataagaactattatctatgatctcaccacaggtaaccattcttaggatgatggaaactattgtgatatttttcatacaatggaagcatatggtcatatttaaaagctgtttttgtttttttcccattatgtgaagaacatctttccaggtcaataaccttatttctgtaagatataaacaactcacataaaataacaaaaaaataaaatccgactcataattgacaaaatacataaaatatgtaggaatatcaagacccatatgaagcatactaaaaacaccaatgagaactataaaaatagaattaaagaaatttataattcgattttattctgggataggaagacttcagattgtgaagataatttgacctcaaatgatttatataactcatcgactccaatcagaatctcaaaattctaaagtttatgtgtaagaaaaaaggttcaagaacaattcggacactttttttttttttttgacagggtcttactgtgttgtccaggctgaagtgcaatggcataaccatagctcactgcagccctgaactcctgggctcaagtgatcctcctacctcaacctacagagtagctggggctacaggcatgccctaccacaccgggcctggatgcttttggaaatacaaaataatgagtgtgaacaggcccactgtaatacatacaaattataatcattataacatttgacactggctccagagaagttatacagatgaaaaaaagcaaactgtctaaatatgcaagagtcagcatgcaataaatgtagcatttcaaagccatcagtaaaattaaattatttaatgaatacaagaatatttgaaagaaaataaacgtagctatttcatacaactactttcagtgggttaaattttaaaataatggaaaccctaagaatgtctacaaaaaaaaaccacaggtgaatgaatatatgtataatttgaggggagatttcgctacaccataccaaaagcaaaagtcacttaaaaaatttaaaacagtcaataaatataaccattaaaaaatacacggccaggaatggtggctcacacctgtaaccccagcgctttaaaagcctccttcgatagcggcagagccaggctgctggtggatgcggtccagcagggcagccgctccttagggccacggcgcggcaagcgggctggcccgaggtcgaggctaaacgcgcccgaggctaaacgcgcccgaggctggcgcctccacgcccgcctgaaaggacgcccaggagcggcgcctccggaaaggccgtgcccgccccacagcccagaatccgcgcagctccgcggcccacggcatcttcacgacccggcccagccccaacccgccccagacccgcatccgcgcgcggacgcccagggccttgaagccgaagctccccgcggccactcccgcgcgcctcccccgccattcccggagcccccagcgccgggcccgcaataaactcactgaactcacaaaagacgccgccgccgagtcgcgcccgcgcgcccgcggcctcgcgatcacgtgacaccgcccgtcccccgtgtcccgcgcacgcgcccaaaccgtcggcctttgtgcgctcccgggcggctccgaacgggccgggacgagtcggggactgcacacgcgcacactcgcacgcgcgcacacgcgtacactcccctctcacgtggcagcgaaggacaaagaggaagaacgggccacctgcaagcattaccaagagtgcatgtgcgcatgcgcgaaggaaggagccccgcgaactcaacttcccacagtgccccgcgtccggaagtgcctgtcgcttggagacggagtgactccaaacgggctcacacggttttctgagaaacataaagggaaaccgaatccaccaatatatatatatattttcttgagacggcgtctcgctctgtcacccaggctggagtgcagtggcgtgatctcggctcactgcaaactccgcctcccgggttgacgccattcttctgcctcagcctcccgagtagctgggactacaggcgcccgccgccacgcccggctaatttttttgtattttagtagagacggggagtcaccgtgttgcccaggctggtcgcgaactcctgagctcaggcaatccgcccgccttggcctcccaaagtgctaggattacaggcgtgagccaccgcgcccggcccaccaatactcaattggtttgacttcagttgaggaaaccagaaaaaatttaaatatatttatggaaagaaggtaagaattaacagaaaaaagtaaagttgatccataactggagtcgtagggagaattataggtaagtcacgatgcttatgacagcaagatggggccggggagatggaggagagagatgaaaaaagagaaataaccatagacacataggaaattgaatgaaaatccgctctatactaataaatttgataatttgtgacacaaatgattctccaggacaacatgggccaaatttgacccaattttatccacaatttgaagacaaattcagagatcctttgccagaaagcatcataatgagttgcttagtgaattgcttcaaacatccagtgattagagaattcttatatttattcccagaggtagaactcaccagtgaagtactagcataaaaacagacgcatggaccaatgtggaacagcgtagaaaaaccagaaataaccccatgcatatacagtcaactaatcttaggcaagtcaactaatcttgtgtcaagaatacacgatggggaaaggacagtcgcttcaataaatagcgtgaggaaaccggatatccaaatactgctacgcaaaagacctcattgcccgatgtgcacagaagccaatactatggcaccaggcgtttgagaaaagaaaagcttaattgcgagttgaccaacaaagtgacaggagtttagttcaaatctatctctctgtgctgcccttaaggcagcactattgtgaaaaaaggtttagagggtggattctgggattcacaggtgaatggtgaaggaaaaaggaagtctggaaagtccccgaccatgtgcagttgtctcttcaagcctcttcttgggtcccatgtgcaaattaaggtagagttagtgtgaaaagtgcagtggaaattcaggctgcgacatcagcaagctcattctgcatggactccgtttggttatattggtttcaactgatttcagccagttgtattatattacaaacggagtttcagcaaactgtttcttatctgccatcctgtaagctcaagaatttctgttagccggacgcggtggctcacgcctataatcctagcactttgggaggccgaggcgggcagatcacctgaggtcaggagttcgagaccagcctggccaacatggtgaaaccctgtctctactaaaaatacaaaaattagctgggcgtggtggtgcacacctg

SEQ ID NO: 917111 - DNA, 4001 bp, Homo sapiens
aatacaaaaaattaaccgggcatggcagtgtgcgcctgtgatcccagctattccagaggctgaggcaggagaatggcttgaacccgggatgtggaagttgcagtgagcagagatcctgccattgcattcccgcctgggcgagagagagagactctgtctcaaaaacaaacaaacaaacaaaaacaaaaattagctggattagccgggcgtggtggggcctgaggcaggagaatcgcttgaatccgggtggtagaggctacagtgagccgagatcacgccactgcactccagcctggagacagagtgaaactctgtctcgaaaaaaaaaaaaaagtagaaaaacagagacaaagtaaaagaaaaatttaaaaattaagagcaaaacttactgtaataggacccccctccccaaaaaagaccaaaacaaaacaacaaaaaaaccaaaaccaaatctacatttttgaaaagactatgtacacatataccttataggagtaatcaagaaaaaaaggcctagataattaggttcaaaaaagaaaaaaataacaattacagcagtaaaatattaaaaagtggtgattttaaaaatcaccatagaaattacttacagtgataaaatagcatgggcaattttatgccaataaatttgaaaaattagattaaaaacaattatctaggaaaggtatctaaaacagaatacgaactaaaaaacctaatcaatgagactttttaaaaaattgagtcagggccgggtgcggtggctcacgcttgtaatctcagcgctttgggaggccgaggcaggctgatcacctgaggtcgggagttccagaccagcctgaccaacatggagaaaccccatctccactaaaaatacagaattagctgggcgtggtggctcatgtctgtaatcccggcaactcacaagactgaggcagaagaatcacttgaacccgggaggcggaggttgctgtgagccaagatggcgccattgcactccagcctgggcaacaaagagcgaaactctgtctcaaaaaaaaaaaaaaaaaaaattgagtcagaagttaaatgcgtactaaatattttaagaccaaatagcaccaaacttttggaggcgggcggggggcggtgaggggtggtgacctgttttacagaatagaagagagactgtgctgtccaaattattcatgaagcttgtaaaatcttgttagtataacgggcaaggatagtacacaaaaagattaaaacacaatcttgtgagcataggtgaagtcaaagggaaacagccaattgaatacaccagagtattaaagaaataaaaccatatcgcattcaaccacagtataaggcaataggtgaaaaaaacgatggctgtgattcaactcattactaggtttagagattcaagagaggctgctggacagaggcgtgcaccctttagccctcccgtgttgcttagagaaggaggcaaacgcgcatccccggccccccagcgctccctgcgtggcacccgcagccagcccgggacccctccgccccgcgcgcccctggtccccactcgctccccgcgctccactcgcacccggtaagtagcccctcctccctcaagggcctctcccaccgccgcctcccgggcaggctccctgctgctcagactcccgtgaggcgatccctgcacgcaggagaactcagcgggccaggctgatcccacgagggacttgtcccgggtgaacgagccacaggcccgcatgctcacccgtcctcagtgcctgcctccaggcgtccgcggtcccgcccgagggggacgcgaggccgaactacgtttcccaggagctcctgcgccgccccgcagaggggcctggtctgtgcgtcacggacgcgctctgggccgaaggcccgcagggtccggcacagagtggcggctgcggcgccggcgacgaatcgccggctctagggtcccggggcgcgcggctgacgggctgggggcggagcgtggcctgaacgccaggctggggcgcgtgcgtaacggtgtgtgttgtgggtgcgtgtgcgtgcgttcgcagcaggggcgggcgtaggaccaatgggggcggggcgcgtgcgcgtgcgtgacgtcaggccacggggaggtggcgccgccgtgccgagccggcctcagactcacctctgacgccgctcttcgcgctccgctggtgaatggagtcgcgttctctgttttgctgttgctgctgcctttgtgacgggatcgctttctcccatcgaaccttctagttgcttattgcaggtatatacgaaagtgctgaattttgtgtttgcatcgtcatcaggcgcgtgttgagccctttagtaatgtagcagtgtattagcttcgtatttctaggtagacggtaatttcgtcaatgaaaaaatttaacggtgatcgtcaccccttgcctcagtcactttctgtccctcgcgcggccccggcgttcacggcggacgttcttgttctgtggagaataacggctgcacctggagattgacgcagagtgggcggcggtggtggtaagtttgaaccagatattttcagtaatacaaaataaggtttcttctagtctaacttccatttttccccccagctgggatagatgtttaaaattttgcatatggcctttctagtatttgttgaaatagtgacgccgattcgtgtgtggtcttttaaaaacaaatcctgcatctctagctcttagcttcctcatctttgttttgttttttaatcagatagattaactgaaggcgtgtttgtgtggttaatctattttttttattttcagagacagatcataagtttaattactatatttttattttcccttgacactagatatatatacgccatctaacacataatatgagtgtcaaagataaggttaacatcaagatttcgtacgtagatcccacccaaagtgtatgcagaaggtgaacaatttcaattccagctatacattaattgcagaaagatactgttaattaaaaaaaaaaaagtaaaagggaaggcaggatgtcacccagaatgccagccaacaagtgttattaggttagaaatgactgcagttaggtctccgagaactggatagcacaaatcctccctacccttttgaaaattacctccacactaacttttctcttgtgacataactaatctcttctgttttactaaaattgtcccccatcttccaaagcctcttggatggtaagttgcacacgctcctgcctctttttgaaagttacatttgttttttgattacttctctcagcatgcatttctttagctcttagtatatgctagtcacaagggcagagatttgagatacacatcataaattaaatgagaatttctgcttatcagtattttatataagcactgtctggaaattctacttaggacaatatttaagtagatatgaggcttaccttctggaaaagagattacaaaattatccttgttaattaattaactaattaagtccccaaaatgagaagagattcaattactatcaataatttgtagtaaagtgactgaaaaggaaatatataagctaatagattgattgccgtcctcaacaagttagcacatacttttatttttaaaaagtcttcacaataggaagaaaataattttagctagaaatatatgtgaactatatgagaaaaacttcaaaaccttactaggcaattcttactagaagaataaaggatgagtaagaataaaaacagttctgtttatagattatattcaattgtcaagaaaatctgagaatttttttttttttttttgagatagagttttgttcttgttgcccatgctggagtgcaatggctcgatcttggctcactgcaacctctgcctcctgggttcaagcaattctcctgcctcaacctccctagtagctgggattacaggcgccagccaccatgcccagctaattaacatatgccagtcacaagggcagagatttgagata

SEQ ID NO: 917112 - DNA, 4001 bp, Homo sapiens
tcgaaacaagagtaagcgactcatcctcttggaatcccctaggtcaagcttgtccaacctgaggcccatgggctgccaaattcgtaagctttcttaaaacatcagatttttttttgcgatttttttttagctcatcagctatcattagtgttagtgtatgattagtgttagtgtattttatgtatggcccaagacaattcttccagtgtggcccagggaacccaaaaaattggagacccccaccctaggttgtcccataataaaaggcaatatcaacatgtgggaaagatgaggcggcagaggtcaagaaacagaagatctaataatcatccaagtgagattgaagcccttcaaaggttcaggcttatgtagttagcagacggaattcccccacacacacccgccactcccccaagacggagtctcactctgtcacccaggctggagtacagtggggcgatctcagctcactgcaacctccgcctactgggttcaagcaattcccctgcctcagcctcctgagtagctgggattacaggcgtgctccaccacacccggctaatttttgtatttttagtagagacggggtttcaccatgtcagccaggctggtctcgaactcctgacctcgtgatccacccacctctgcctcccaaagtgcagggatacaggcgtgagccaccgcgccaggccaagatggaaattttagttactactgtcacccgagtctttctccgtttgtttccttgcacaaaatgggtagggctgtgggccctcccagctcaggagccctggggtggttttaagaaggtagaactcctggtaggaaccacctgcatcaagaccatggatcacctctctgaaggttagcgattccagggaccccacctccgagctgtcctcctacgtggaagtgaaagtattggaaacaggggaaagaagctggtcaaagacagactccagtcgtggcggtgcatgtcccagttaaaagcaaatcctggaaaatcttgttcaagaacagggtccccattcataaatgaaaaataataatagtgttattttacccacatgaaacttgccataactaggtaccacgacccacatggacacacagtgagattcccacaaagaggcaaaaggagagccctggtcactgagacaaaagatacagagacaccgggacacagagaggtacaacgggacgtggagttggatcgagctgtctcgtaaggaatatcggaaggggtggggacactactgggagatggcataggtccaggacactaattaggctttggctgagatcagataaaggaaactgttcgtaagctgcttacttaaaaagaaaggaaaaggtgcgtttgagttcaggagactgcgagtcccagagcaggaggcgggagccagcgaagggtgggcgtgtaaggggtgcagtcgcttctcccgctgggcaagagactccccctttcggcagcctgggttccccgcctccccacctcctgctcctcctcccccgagccctaagggcccgcagggcctccagtagcaaagccactggccccgcgtccccgcgtccccctgcgccgcgccccggggcgcaggcagggaccacgcggccggcgtgggggcggcgccacccgcagcagaaagccccggcgtggaccgcgtggcgtaggaaagcgctcccctcgcccccagccgcagagggcttgggcagcatcgggcgcggccccgggagagtgcgtccgcggcgccagcggctgcagggtgacctgtttcgggcggggacactcaccagaagaacacgcgtgagcagaggttcgcgtcctgcagcgggttgggcttcacctcctggtacacgggcagcatcttgccgggcggggcgggcgcgggccggggtcgcgctgatcaggcggcggtggccgcgggctccgctcctggacctcaagcagggatgctggggctccggccgccacgcctgtccgctcggctggagcctgtgaagcagccgcttccgggagccgggcgccggcggcacgccccgtccccgcctctcaggcccgccgcctcgggggcgcccgctacgcgccgccgcctggagcccgggagctgcgcaccgcgtgcgagcgcggccgggaccgacgggtgacgcggcgggaggagacgcggcgggaggaggcgaagctggcgacgccaaagggagcccagagctacgcccaggggtgaggcgagggccgcctgcgccgctggatggagagggtagcagagcgcgcggcaaggaggccgggtccggaggtgcccacgtgcacgaacccgagtgaaactttccgaaattcactatccgagtctaggcgccgacacagaaggtggagcagggaggcgtcggctgtgcccgcccctgcgccgcagaaacgccccctcggctacgggtttgggaagactgggagacagctgcctcgtgctctagcagcccgccccctgggcgcctttcccttctcaggaccaaacgacggtgccatgggaggctcttcaacctgtgagccaaacatttgaccttggacgacagcaaagtttagccacagattatccttgtagagctgcaagacctcaagaaagccgggtaactcgagagtatgacccagatgaattcgggagatggatgaatgctgtcgtcgatgggggcgggctttaggcatctcacatgttgcatgctacggtggacctctgagctttttgctgcccccttagattgggaaaggaatataagaggaaagagagactgcctgatgatttctgtcgtcaagccctaaagcctaacagataacagtggcaaacgacacgtgggttccagaataccagtgatgttcatgtgcatttctgagtgcgtagcctcactagtgtgtgtgtgtgtgtgtgtgtgtggcagtctcacacacagtgtcacgattatggctcattgcaccctcgacctcccagggctcaagcaatcctcccaactcagtttaagtagctaggactacaggcacccgccaccacacccggctcatattttgtaatttttgtagagatgcaaaaatcaaaatcaaaggctccaagttcaaatactgataatttttgaagccaaatgattgtcatggaggtttattttcttcatatttcatgcatgtttgagaatttggttttctttgtaataagatcattttattgttccttgataatttctcactttgttgcccaggctggtctcaaactcctaggctcaagtgatcctcccaccgtggcctcccaaagtgctaggattacaggcatgtaccaccacgcccgaccaattatctcacttttaattctatcagtgccccattcaaggttatccttactttatagatgaggaaggtgaagctgaaaggcagaacttgtccagtcttagagccaagaaaggataaaacatgatttgcaataagcctatgtctaagcatggcctgtctccctggtggatggccagtgtgcatgagaagtgcccagaatatgctggttgaatggctgtaggaatgaatgaacaaaatcttgttccaagcttgtgtactcccacctctaagtcttcagtcatttctgtggctaccttaacaaggtcagcagctgctcttcatatccaccctgaatgaaaaaaaatgaaaggctccaagttcatggtgcttggaacaagatcattttattgttccttgataatttcccatgtatatttgctaaaatagtatagttaatagcttttaaagaaagccttacacaaacacatatttaaaagtcaagcacaggctagccagcatagtgaggctctgtctctaccaaaagttttaaaaattagcccaggtgtggtggcgtacccttgtagtcccagctactcgagaggctgagacaggaggatggctttagcccaggagttccaggctacaaggagttaagaaggtgcccactgggctgggcacaatggctcacgcctataat

SEQ ID NO: 917113 - DNA, 4001 bp, Homo sapiens
agaagagatcatgggaaaatgttagatccaacagtttcctgcacctatcactaagttatattgttagcccagggcaatttggttagtaaaccctcttatccacatgccaagaggtctttgatgtgcccaagaagagggcagtgtgccaagggctacctgtaggtacctggcttgctttaatcattccaagttaactgtcagtgggaggcagtgtggtgcaatggaaaggagacagtgttttgagtcatggtctgttaagagataggtagcttttgccaactcacttagcctctctaaatatatatttcctcgtatgtaaaaggaggatgaaagattaaattgaactactgttgagataaaatgtaatagtgtgttaagtgcagctacttctatgagacaaaatttaaattacttaattatgtactatagcagagtatgtgaaagtaaggacaactagaagccctattagtcctagatcaaataatggatatgattccctagaggtaccgtatctgaacacaggaagtaatcagagcaatgcactctttctctgttaaaaccaaactcaggtagtagatcctctagaaagctttccttggacccctattccctcctgccacccattccacattctgtagtttgtgcaaacttacgtggcagaagttactattacagcgtaattaacctgcttacacaggctgtgagttcctcgatgacagagacctcgtcctattcaactctacattttctgtacgcagcagtgcctgatgcatagtgggcctctattaacgattatttaattgagcagctgatgtcttaggtaggatatcatgacattaacactaaatcggcaatcaagaaatcttacacagtaaaataaaatttgatattttagtcaaagacgagtgatttccctaagcatgcatacaaataagtattgatccacgaaccccctcccgtcaaaagagatcagtgaaaaatccaatatcaacacacaaagccaatatactcatctctttctatccagttactatcacatagtaaacataaataagagttgttaaatggggacggacttttttttggtttcgataccttgggtagtaatactagtaattcattttacttaaatgttgactaaaatctacagcaaaattgacttcgattgtatggggtgcttttttgatgtttcctgaataaccccagaacttcctgtcatgatattcacaggtctaaacctgttactgtcgtgattagatcggggctctccctctctccaacctagtagctggaattattctattttacttttcatgtctgtgtgggagggtgggggagcggagggttggattttagggatcttaggtttgtacacattactggaaatacaattgacatagaacactaagatacgttttaggttccaattacaaaacgacacccggcgagcctctggcaatgcgcgcaccttagtttccaaaacaggtatttggcttcagtttgcttcccctggtgagtggtgagcggagtcggggcggccggcagggctgcaccccgggctggtcctccacaacccccggcgctcggcccccgcacgacccccaggggaagccgcactagccccggggctccccccacagcctcccgggagggtttcgcgcccgcctggaggagccggcggctccccgcgaccctcctagaaggagcggaccggcgctcgggccccgcgggctcggggtccccgagccgcacttactcagactcgcggacaggctgcgcagtcggccgcgggcacgaaaccgggcgccgcgcagcagcgtacccccgcgtcgcttccgtcgctcctcatcatcctcctccagcccaggggccgctgccggcgccacggtctagcccggagctcctgctgcgagctgtggccccacttccggcccccgctcgggtgtcgccggcaaatgcccccgccggctcccacataacctgttctccgtctccgctcccggagtgggaaccctgcccgctcttccgagcatgcgcagaagccgctgccagtgagcccccgcgacggtggcccggacggaaaagatacctcggcggcgtgggcccggctccctgctccaggacctagggatcttggccttccaccctcctccgagcaccaggactccctccagttccgtacccgaggcctccgtggtgaagaggtgccggacccgatgagctcgggagtccaccatcgctctgcaagccgcaggtttgcggagcaatttgttctgcctgatagggttgttaagggtgtcgcaatgaggtccacgatttaaagcgcttccataactatttttctccttttacctctacgagagtggactgtcaagggcgaatgcaggttttgtgaggcctgaaccttgtgccatttggagagcccttttaaagaaaaataatgtaaaattgtcttatttttgcaaattttaccgaggtacacgaccatgggaacacctcgttagggcccctctcaaggccttggaagtgttcgcaaaaatgggcccttaaaacttgggcttcattagcttcgctgtcaacccccctgtgcactgaagtgtacacacttgtttacagatgtgtgcctcccctcccttgggctttccttattctatgtcccctattttatatatacagaggatatttcataaatctgtgggtttttttttttttccttttgagatggagcctcgctcttgtcgcccaggctggagtgcaatggcgtgatctcggctcactgcaacctccgcctccctggttcaagcgattctctcgcctcagcctctgacctagctgggattacaggtgcccgccaccacgccccgctactttttgtttttgttttgttgctgttttgagacggagtttcgctcttgtttcccaggctggagtgcaatggcaagatctcggctcaccgcaacctcccgcctcccgggttcaagcgattctcctgcctcagcctccggagtagctgggattacaggcatgcgccaccacgcccagctaattttgtatttttcttcagtagagacgggatttcaccatgttggccaggctgctctcaaactccccacctctggtgatccacccacctcggcctcccaaagtgctgggattacaggcgtgagccaccaggcccggcctaatttttgtattttttagtagagacgggggttcaccatgttggccaggctggtgtcaaactcctgacctcaagtgatccgctcacctcagcctcttaaagtgctgggattacaggcattagccactggcccggcctgtggtgttgttgttattgaacatatgtgtcttgctaccagatggagagctccaggtcaaagctgggttcttgaatcatagcttcctaatcttgatcacggaataagtgccaagcatatataaagtagaccatttacataaataaattaataatcatggcaactctagaagatacttagtgaaaaaaacccttgattgtctttgaaccaatcaactaaaataacatgatgaaatggagactgggctttgaatcaatttggagtttgcctggtttcataattcatggttcttctcatgtaactaatacaaagtccagcttctgacattgtaggagctcagtagaggttgaacaagctacaaatgtacacggataggtaccctctcctaagatgggcaagtggaggctcctctaccttaacactattcatttttcctccaaaataaattgataactaaattgaagagcagatactcacaaaacaatatcatgagactttacaacatcacagatgattttagatattcaggcatattaggtcaattagacatacgaagtaaataactgaatgttcttgggctagacggaacctccgctacaaactagcactgaatgaaatgtgtcagttttgaaaaaggaggtttttatacattacacaacctctaagggcacttaacagctctaa

SEQ ID NO: 917114 - DNA, 4001 bp, Homo sapiens
tagcgccccatggtggctcacgcctgtcatcccagcactttgggaagctgaggtgggtggatcacttgaggtcaggagttcgagaccagcctggacaacgtggtgaaaccccgtctctactaaaaatacaaaaatcagccgggcgtggtggtgggcacctgtagccccagctactcaggaggctgaggcaggagaatcacttgaacctgggaggtggaggttgcagtgagctgagatcacgccactgcactccagcctgggcgatggagaaagactccgtctcaaaaaacaaacaaaaaacagtgccctaaacgtccgtaacccttttaactgtgtgaatttcgtgtcctgttgggccgatctccgtcggtgcacttttggagtgtcctgtgccgctgccctccctgcgggcctggcaggaccagacccacagccatggacgctgccatttacaaaacgcccaccaagtgctaccagaaatgggacatgcagagctggtatgagcgcacacacggcatcagacgcccagaggaagccaaactcaagagtgagctccagccgtctacggtgaaaacaagccggagctgtgtcccacaggtgtctgtgtgtggggtgcacctgttctgggctgcggggcacaagcatggggttgctggtcctaagggcacacgagtggccgcctggaaaaccagaagcaggagctcctggacgccaaggctgtgaacagtcggacgcctccccgtctccagcaagccgggagccttatcttatcgccggcgcttcagctctcccgttatttagggaccggccacaggctcgatggcattcctctgctgtgagcacagaactaaactgggcacgtccatggcagatgaacagaatggtggagtgaacgcataagtgagatttcattgacttagctgcagccctcagattttaattctgccatgataaacagcacccacggggttttgaagagcaaatgcctcgtaggaaagctggactgcatgtctgtgcacctgccatttccctgaaattcatgcaaaagcttgatcctaaaatcaatttgctacttaaaggtattttaagaagctttgtctccaatctcgtccaatcaagtttatgtcattttcttagaacacatttgtgtatgggcaactctccaagctgaaccattttgggagatgatattctaactttaattcattggaatttagaactaatccccaaacagtattaatgggttcacatttcaaactggcttattttacatccctttgtaatgaattcagaacaagaaggcttaatctctgcagcgagaagtgagccctcaccctactcccaccagcacggccgagagaggcttcactggctttaactctattagaaacagaaggtgctaggcctagttaacgctttacaaatacaagtgaaaagtcacgtttaaaaactgaatcttaataactgcaaagtaaagtaatactgtcaccctcagagaaaccacaggagaaacgtgatctgccgcatatcaaatttgagggacactcagattaaattgccacttttagcagcggtatcaggtaacaccatccgctgaaggaccgcactgccttcaaagctctcggaggcttactgggagaactcgagcagccagtgttccctccagcccgcacaccggagcgcggtgggcccagcctacctgtggtgagggcctcggcggttgcgatgtgcatgatggtgttgtcactcacgggccattctcctggcgagagtacgaggtggtccaggcccccggaacgttgcagctcctcctggatcttcatgcctacagtgctgttctccttgcagacatttctgtagccaagagcatcgccgacgctccccagcaacatcgcagccttaaatttctccatcccaggaggcagctcctcttccccaacagctgcggagcgtcctggcctttgtctcctcctcagcccgcctgacttttatagtggtcactgtgtcactgtcaggagcgtcctctgatggccaggcgctccttgtctatctctgcaggtggcaccaatgagaggacctttctgtcccccacgtgggaggtgtcagttttcttctgcgtctggacaggcaccagctcctcagcagaggagcctgctagcttctgccggcagccgcagcacattcagagcgttgacagagcaggggctcctctcgctgtccctggaaggagtgcgcacacttccccgtgtgtggcgtggggtgatgcgggagcagatgtgtgcaggcgtgcctgtcactgccgcccgctgcggggcgtgccctcacccctcgggcaacaacccatctgctgtctctacagttctgcctttcctggacatttcaaatacaatgtgtggccttcggtgtctggcttccttcactcaacataatgttgagattaatctgtgacatgcggttttatcatttagaaaacttttcgattatgaaatgtgtttttgatagaaaacttttaaaaaatgcagtgtagagggaacaaagtctatctagctcctgtgtgaacaatgacggtgtcttctcagcatgcggtgtttaacggctcccaaataattggactgcactgagggggaaagtcgtcagcaaaccgcaggcttcactagaacctcccatccggccctcggtcagctcagtgtatttacatcatccctgctagctcatgaaaagaatattaaaaaatatggagacggggggtgaggcagaatgcacacagccagggttcctggtttgaaataaattaggaaaacagtccatctcccgaccccaccccaggacagttctccgcagaggccgggagcccagcagggctgtgtctctcccgtctccttcctcggggcctggtttccatcagacccaggggaagcaaagagttacacctggactgaagaaatgcgtctgataaaaactctcgtagtgtacagcgagacagtaggaagcatttaaccgcctggcgttatatcagcacttgttaaaacggaggatctcaagcagtgagttcacctcaccctccactgtctgctggtggaggcagccatcagcacagtcatgccagctagcatgatcctgagattcagaaacaaacttcaaaaccagcatgcaggccgggcgcggtggctcatggctgtaatcccagcactttgggaggccgaggcgggcggatcccctgagctcaggattttgaggccagcctgaccaatatgatgaaaccccgtctctactaaaaatacaaaaattagccgggcatggtggtgggcacctgtaatcccagctacttgggaggctgagataggaggatcacttgaacctaggaggcagaggttgcagtgagccgagatcacgccattgcactccagcctgggcaacaagagcaaaactctgtctcagaaacaaacaaacaaacaaacaaaactccaaaacaaaaaacagcatgcacgcagggtccctatccaaacaagacagacaggaggggcggcccttcgttcaaactctcacctgttttaggcacaactgcactgtggggccgaagcgtgtgctgctgaggggattaacacagcccgctcgctgagcgcttcagttcgcaggcggcggaaacctttgccaagagcactagctggctccctcagcaaacaggacgggataaggttagctcgtttatccaacaaatatttgcagagcccctactttgtacctgaaactgtggacacagcaacaaggatcagaagaaagtttattcttggccccaagaagcctgaggtctaaaatggatataaacttcaagcgaaaataacacaatgacatgtacaatgtcactgagaggagctggcgttgttgattccggaacgctggcaggtgcaccgtgaatcggcaggtagcacatgatcctcagacccccgtgcttggccgtttgcctccgataagggacggtttccagcagtttgtgctggcac

SEQ ID NO: 917115 - DNA, 4001 bp, Homo sapiens
tgtgcatggcgtctacactcacggtgttgtgtgtgcatggcgtctacacgcacggtgttgtgtgtgcatggcgtctacacgcacggtgttgtgtgtgcatggcgtctacacgcacggtgttgtgtgtgcatggcgtctacacgcacggtgttgtgtgtgcatggcgtctacacgcacggtgttgtgtgtgcatggcgtctacactcacggtgttgtgtgtgtatggcgtctacatgcaaggtgttgtgtgtgcatggcgtctacatgcacggtgttgtgtgtgcatggtgtctacactcatggtggtgtgtgtgtatggtgtctacatgcacggtgttgtgtgtgcatggtgtctacactcatggtgttgtgtgtgcatggtgtctacactcacggtgttttgtgtgcatggtgtctacatgcacattgtatgtgtatggtgtctacacacatgttgtctgcacacatggtgttgtgtgcatgcacagtattgttttacatgacgccatgttcatcaccccagttctgagtcagggaggagagagaatgtggcaagactgtggtttgggagacacgagtcctgcagtctcataggagaggtgtgagggctgcattcctgcaggaattaaggtcaccttcgcctgcacccgaaacccctggatgggggtacagctgcgtggctttgtccaggctgtgtctaaacccagtgtgtgcccctcacagtcaccggcacagtggatccacaaacagcctttctcaactcagtcctgggttaacaagcctagcccttcctgagtcccctaaaaggattcattttattctggaattagacatgaaatgtctgtattcaactgaaatttagccttttcaaagcaaacagaagccataaaacaaaatggcacaaacagcattgtcttttcaggttagaatttaagcgagaaacagattttcaaagctgctacccttgggcttctccccgggtctctttcctttgggacactccactcctgtctcctgtcttccctgtctggtctcctgaaagacaaatcagtttctaaagctgcctgaggggccgggtgcagtggctcacacctgtaatcccagcactttgggaggctgggatgggcagatcataaggtcaggagttcgagaccagcctgggcaacatagtgaaacccccgtctctactaaaaatacaaagttagcccagcctctcaggaggctgaggcaggagaatcgcttgaactcaggaggtggaggttgcagtgagccgagatcgcgccactgtactccagcccgggcaaaagagtgagactatgtcccaaaaaaaaaaaaaaaaaaaaaaaaaatggtgcctgagtctcccaacccatgtctcaataaagaaaaggcaaaatactaacatccagtgatcttgtagcaaaatgtcaactgtttccaaacgttttctgccatgagctgaagtgccactcccagttatcagggccccgggagaggctgagaaggtgctggccctgtgccctggaggctgtggccaggtgacacctcccgccatcctgctgggccctgaagttggctgagtgagcctcagggcagagacatgtcagatgtgccttcggccacacgggcctgcaccaacttcccacactggcctaagtgcttcctcacactttgctggttgctccgtttaatcctctgtgaccttgtgagggaggaaggccctgggagggaagccacttccccagttttcccagggagtgggggtagggagctgggaatggccagctgcatacccgagcaatggccgagctctctgtgcgaggccgcccctccccaggcctggcacacacacacacctgctaaacgcttgccaagtgacttggtgataatgcgctggcaacatgggcttgtcgtttcagggccatggatgccacctctcctatgtgtcttgtagagcgctagacacggctacttcctggttcagagtctgctctcgtgccctgttcagagaggctcacccggaaggaggcagccccagtcagagaggctcacccggaaggaggcagccccagtcagagaggctcacccggaaggaggcagccccagtcagagaggctcaccgggaaggagggaccctgttcagagagacacacccggaaggagtgagccccggtcagagaggctcacccggaaggagggagccctgttcagagagacacacccggaaggagggaccctgttcagagaggctcacccggaaggaggcagccctgttcagagagacacacctggaaggagtgagccccgttcagagagacacacccggaaggaggcagcccggttcagagaggctcacccagaaggagacagccctgttcagaggctcacccggaaggagggagccccgttcagagagacacacccggaaggaggcagcccggttcagagaggctcacccggaaggagggagccacacaggctgccccgaccctcagacctgtgctcactctagcagcagagccagggtttgccagaccacacagccccgtggctcgtggggtgaaggacttttcagtgcagcttacttaaagctgccaaacgtagttccatttgtaaaagtctgcctgtctttggaaagcatgctgaagagcccctgcacactgcaattgttaggatacctgcaggccaccgtgatctcagcagtcagggaggatgcttacgagcacaggggccagattctctggttcccgtccaagctctgccactcgctgggctgtgtggcactgggcaagcgcctgaacctctctgtatgtcaattttttctcctgtaagattgtgataaaatcagcctccacggtgatgtgaggagcatgtgtggaggataacatgcgtgaagcagctggaacaatgcctggtacagaagtgctgtggagtcagcactcaccattgtcgttttgtagagatggagtcttgctatgtttcctaggctgatctagaactcctgggctcaggcaatctgcccaccgtggcctcccacaatgctgggattgcagacgtgagccactgtgcccagccctcaccattgttaacacagcttaaagacccccttccataggctacaatttgttatttaaagaacaaagataaacttaagtgaaatttcgactttgatttttagtgagttgaaaaaaatctgcttgctttggtttctagaggggtaagctgtagggaccagccccacagggtcggtgggtctctccctgtgtgcagtgacgagagagtgtagaaataaagacacaagacaagagataagagaaaaggcagctgggcccgggggaccactactaccaatgcacggagaccggtagtggccccgaatgtctggctgcactgttatttattggatacaaggcagaaggggcagggtaaagaatgcgagtcacctccaatggtaggtaaggtcatgtgggtcacgtgtccactggacagggggcccttccctgcctggcagccgaggcagagagggagaggagacagagagaaagacagcttatgccattatttctgcatatcagggactattagtactgatagtactaatttttcactaatttactactgctatctagaaggcagagccaggtgtacaggatggaacatgaaggcagactaggagtgtgaccactgaagcacagcatcacagggagacggttaggcctccggataactgcgggcgagcctgactcatgtcaggccctccacaagaggtggaagagcagtcttctctaaactcccctggggaaagggagacccccccccccttcctggtctgctaagtagcaggtgttgttccttgccaccttttgctactgctggaccacgatccgcctggtaacgggcgtcttcccagacgctggcgtcacagctagaccaaggagccatctggtggccctgtccgggcataacagaaggctcgcactcttgtcttctggtcacacctc

SEQ ID NO: 917116 - DNA, 4001 bp, Homo sapiens
cagttaccctatccaaagttacttcaattacttttgaaaaaccaaacaccacacgccctacaagtttgaaacccttgccaaaaggttatgaagaccagccaaaaaatttatttttctacttctgaaaattagtttgctaagatggagtaagaaggaattttttctaatcaacactggtctcctctgcccattcacaaagagatattttctaagtctttcacatttttgtcacgtatagacagaattcctctacctatttacaactggcattttctcttaaaacggcctttaatatattgtccaaattggtttgagttccttttccagacagtaagttcctaaaattaaaaaataaaaaaattaaaagtaccgtattttttccagcctctaaaggcaaaagaggacttcttcagcttctagacttatccctggagttcagggggctagagaaggctagagaatttctcactatggttccatgtcttaggcaacttcccatatcctcaacaactgcaaaatatcactggcctaggagtccactgctaggcccttatcaatattgtcgatactgcagttatgtgggtacatacattagtctctagctcagcttgggaacccacttcttccctgatttccttacattctttgacctttcataaattactgttacagctacaatagtgacattcactgtccacccctgggtcagttttgtcaggaggaacaacgacaagaaaaaatgaataatcagggtaccgtttgaaaaagtaaatgtgtttttcaaaaaaaaaaaaaatcattcaattgcactattttaactgacaccaatcatgccaggcactgggctgccatcctaaaatgatgacattaaaaaaaatatatctgtgcattactgataccccattttttcttagtactccatattttgagtattttcagacataacaaaataacaatcgacatgacatttctaaaacagtgggaagcagctaagcaaaacgagcattttgcaagcgattgaaaagctgaaaagagaacaggaattaactccagtttgtactaaagctattaggtatgtatctcagcagtctttctcaccatgaaactccttaacatctaaagctaaaccacatccaactttatatggttttagaagacagacaaagcagagaaaaaaaatgaaagctggtaatatggggaagagaaaaaatgttagcttttactgtcattgtcactttttaatacttcggttacatctacatattttttataaagcagcttagatgcctggattaacagcagtatactcaatccattcggggtactttatggccagccttaagccattaacagcctaggagagtatttgacagcaaatccaaatatcaatactctgaggagccccttgacgccttccgtttacaagatctgagcagcgcctgcttccaaggctccgggggtctgacagtgaaggatgctgttcgggaacaaagtgcaacgtcctcccaaccgctgcaaatgttcctgtgcgcacaccacgaacacacactaagcacgcgcaccacgcacccggggggccgtctctgaagaccaccccggggatggaaacagcctgtcattaaaaggggcggcagctccaccgccacacttgggaccccaggaagacgcgtctcgagacccagcacctccctctactctgggcccggtgcggtgagtttcctccttcggccgcgctcctcccgccctcctccctccgccatgcgaaggcgcagctctcgggcggccccgaagccagaagggggaccagcggcaggcggaggggctggagcgccggagccgggccgctccatccatgccggccgcacacccgccgccaccccatctaaacgcagcctccgcggcgagcacgtcggcgcccggctcacctgggggccgcagcctccgcagctcacagacatgtcaccggcctcaacgacccgtgagcgagccgggcaagcaagctggccccctcccgcgctgacccccagccctccccctcccagccccgcggcccgcccccgccctgcccacccctcggcttccgccgccgccgccgccgccgcagctccggcccgcaacaccgcctactctccacgcctcccactctctctcgcgagagggcagcgcgcctctcgcgagaaaaattccgcggccgagcccgcgcaaaagtgggtgggcgtttaaaaagggaaagaaggaacaggaaaaaaagccttcccacgtgctccagtgcagcccgcggagcagcccgcggggcagccccgctggtcacatgacttaaagggggcctctccattggccgggacccactcagccttgggagctttaaattcgagggcgacctacgaacctgcggcggacgtcttgcgcgcttcctggtccgttgccttggaaacggcttaacccttccctctggcaagtccccaggccttggcttgctccgcagatttggtttcaggctctgcctcttttccctcgaccccttagtcttaacagcctggggccagctgggctccttcttcgccacaaggctagttttgctttcttccgaagcccggggcccttcccaaagtggcagccccaccagatccgaaggcccaaggaaggctcatcctttctgatggctccgccccttctcccagcatctccggggaggaccactcacagcgcaccgggcaaccagccctatcccagccaagaagtagcttccagggttctcagggccctagtgctcaccctgatgtctttacgtggtatggaaatcggaaagtaaagctttggtcactgggaagcctagccagagatgaaaagctgttatggtgattattttcacctaaaatcggaagggccagtccagtcaaattgccctgtctcctaaagggcatctgttcctcaagagtggaaacacctggcaataagaaagacatttttgagtgtatcctcgttatgagttaagttttgccctgttcagaggagagggtcacggaagaaagggtgcattcgtttgttcatttcttcattcaacaaacactactctaggctgttgattgaacaatgatgaagacaagtagtgtagattctagggaacttatctgagggtgaaaagaaaaaaaatctgttggttttaagctgtatgcaaagaagttacaataagtgacgtgatggtgatggtgactgagtggctagtaaaggggatgcccttttaaggaggagatattttagcagcgatttgaataacagacgcaaaaatcagagcatagagcattccaggaaaaggataacactaattcaaaggccctaagtaaggatctattctagtgcatttgagggaagaagaaatgagaaagtaaactttcttgagcctggagatggaaactgtaagagttaaagaaagaaacacaaaaagcagcttaacagagacaggtttattttggagaataaacctgagaggggcttctggccgatttcggtcaggagtgttctctcttacagactaaaggtatttagtggtttagggagggagagcatattgtagacttggaatgtttctgggtggaggagagttttattgtcaggggtgtaatgtctctggttggaggggaggcatatttctgatcagagtggggtttatctcagggttggaaagtttctggtcagaagtgttatttgtggtttatggtcatgctgacattagccattaggctgatgtttctggggctggatttaggcggtttttaatcaaggggaacttaaaatggcggtgcttgtccaagatggtgatgctcttgctctgtcagaaactagcatgggccagatcctgtaaggctttgttagccaagaaaggaattgaaagtttattctaaacgcaatataaggtattacagagtttttaataggggagagacacccagagtttacttttttttaaaaaaaaaaagtctcgtctttgaaaagaatgggtc

SEQ ID NO: 917117 - DNA, 4001 bp, Homo sapiens
tgaattcatttgaaaataaaaattctttcataacacattaacatatttttattaaaaaactatcttttccaaaccaaaaaaagaaatttagcaagaagggtgccaatgatttacactttttgcaaatctttttaatgtctggcttaacgtgaaaccagatagtggctcctcctttctgtttctgcattcaatctagtgatatgttgtttttgttgaagtatatgaagaaaattcaggctaacttagacatgtagtaggaaaagggagtatattttaatatatattgatcttatgtttaaaatatatttaacttttcagctagttacagatattcttctctgatgctagaccacatttgacaagttatgcagtttcttaatgtcagttgcaatacagactctgaaaccctatcaatgaccttttcacactgttaattaaaatccactatcacttagttttatccgctatcacttttgcacttatcaacatagtaaaataggcaaatattacattaatgttattataaaaacagatttgttgaggatccattgaagggccttgggacctgcatggtccatggagcacaatttgagaaccactgccttaaaggatgaacagagtctgacaaaagtggtaagatttatcatttatttaacatttggaatatatgaattcataaaagcaacactacagaggacagtttgctttctcaggacactctttcaaaagcttatttaaaatgcagctgacccatataatgtaaaggtttttctggcaattccttcaaataatttaggtgggaaaattcatgtgacaagcttttcaaactgaactattaaacatttaacttaaaagctgcataataactaaagttaaacctgtcctttaagtctggttagtgagtttatttaaacattataatgtaaagcactgaggaatattacgtatgacagggaagaaccaaaaggctctgataacagactttctcattcaaaatgtttaaagtaatgattacagaatttgaagtagagtggacaaaaacgaagaagaaatgcctgaacttttgaaagaattaggtatatactgctattcaggaagctatggtgttaattataaattttcagcctgaacaaaaatatgtaggtggtaaaaaaactaggtaggtagaatatactaggccttctgttttattagtggagggcaaggcatttaaaatacagtagtactacaacaacaaaggtggaaaaaagcctgggagttttttcaccaaaatgttaacagtggctatctccggatggtagcattcctggggttttttccttttacttatctattttctaatttttctagaagaaacagcatatacacgtaatacaaataaaataatattttatgtaacttcttacatcataaaaattaaagtaacagattatcaaaaagcagaggattcaacataagctttatatttaagtgacgtgttaacaatggcagttttggtgagtttaagagtagaaactaagatgagaaggaagatccggtttcttctttaccgaaaagagacatgatagattggaaaatgtctcgtggctcaatcgtaaagaaaaataaggaatgaatatgaataatttatgacagactaactggagtgtgaaagggaaaaaaaaagctgaagcagggaagggaactcgacccctcggccaacagtgaagcagaagaaaacgcggtaaattgagtctttaagacctagtctattccagtctatatagaagacccccaagaaaaagaaagactgctcattggcctgagaaattaccttagattcatgacaaggaaggccatttgcccgcaaaatttagctacactggacgggcaagtacccctacagaagagaaaacgtctgtgagcccacacgaccggctgctcacctcaacaacttgcacaggcaccagctcctttcgccggccgccatcttccgccgacccccgaactcaggaaacgcttcactttccttttccctattggctcctgagaaagcaagccgtgctcgccccgcccccacgggccaattgtgcgttactattggttactggtagccgcttcccacggccttccagccaatagaatatgccgaggcgtagactagtgttcggcgtggcgcacacggctcccgcccccgtgggcgggacagcagtggggggttgggctgaggagggcgtggcctgtgattgacagccgtcgctccctccctcggccacctcccccactagaagcccccgcctgggcgcctgcgcccccgttcccggcccaaagcccgccgcccgttggaggccattggctggcctttgcgcacagcggatcgattttccaggtgcggagttcactcttgccgcggttgcttcctttgggacccacggcgtccggcagccaggcgcagagtccgaggagggggcagcgcagagcggacccgacgcggcgccgccgggcaccttccccgcaggcggtgggtgagccctgggagctgagtctgcggcccggctctgcgcagctcacctgccctcccgctcccgcacacgcgtgagatcccagtacagtgtcggagcgcaccagcgcgaggtggccgagaccgcggaggaggacaggcctccgccctgcggcgccggcacggcagaggacattgtggcactggcacggcagagaacactgtggcaccggcggggccggcagttccagggtgggcactcccagccacctggggagtgggcgagggtccgaggcccactctcccctcacgctctcatccccgtgcccccaggtcgggaggacggcggcgcgcaactttgaatcatccgtgtgaagagggctgcggcttccccggtcccaaatgaaggggcggttcccggacccctgtttgctttagagccgagccgcgccgatgccctcacactctgcgcctcctctcccgggactttaacaccccgctctcctccaccgaccaggtgaccttttgctctgagccagatcagagaagaattcggtgtccgtgcgggacgatgcctgagcaggagagacagatcacagccagagaaggggccagtcggaaagtgagttttgttcccccgcgtccgcgcagcgtgctcactcccaccaggaggattttcctccccgcgttcggcgcttactcgcccccagggggtgcgcagggaaggccgagccagaccccagctccagggatgtcttggcgtgggagaaaaggaccctttagaaaaagtgtgccgtcaactgatgtttgggagcaatggaaaaccccgcacctcaaaattcatctttatgcttttaaggggtctgatgctggagagataaagtgagcgtcgagttgctgtgctagagccctaatggctcaaaacgatgaagttagttacctggagaagttactcagagcctggtgcttggaccagatatggtatatcgaggtcctggaacttttataactgttttaaattcattttaattgtacaagtaatacattaagacagtcttttaaaaatggaaacagcacagaaatattttgcacaaaaagcagatctatttttcagtctttttctattcacgtacatatgtcttcattcggcaaatatttattgagaactttctatgtttcaggcacacagtgttgagttgatacagtggttaacaagacatgtatctatatgtaatatgcacacattcagagaaatctttaggtttcatttgtatgaggtgttaaaatttttgttttacctaaatgagatcactgtatgtgcattctcttttttcagtttaacgatatatcttagagattgtttcactaactgtctaattcagtgcaacctctgcacagtttggacgcatcatagtttattcatggtttcctagtggtggacgttctgtttgctactttttttctctctctcttgcaagtgaacatctttgtacatgatttttaatgctgacactatttcttt
